(19) United States
(12) Patent Application Publication
(10) Pub. No.: US 2010/0251416 A1
(43) Pub. Date: Sep. 30, 2010

(54) PLANTS WITH INCREASED TOLERANCE AND/OR RESISTANCE TO ENVIRONMENTAL STRESS AND INCREASED BIOMASS PRODUCTION

(75) Inventors: Piotr Puzio, Mariakerke (BE); Oliver Bläsing, Potsdam (DE); Oliver Thimm, Berlin (DE)

Correspondence Address: CONNOLLY BOVE LODGE & HUTZ, LLP, P O BOX 2207, WILMINGTON, DE, 19899, US

(73) Assignee: BASF PLANT SCIENCE GMBH, LIMBURGERHOF (DE)

(21) Appl. No.: 12/601,041

(22) PCT Filed: May 19, 2008
(86) PCT No.: PCT/EP08/56085

§ 371 Date: Nov. 20, 2009

(51) Int. Cl. A01H 1/00; C12N 5/10; A01H 5/00; C07H 21/04; C12N 15/63; C12P 21/02; C07K 14/00; C07K 16/00; C12Q 1/02; C12N 15/82; C12Q 1/68; C40B 40/08

(52) U.S. Cl. 800/278; 435/419; 800/298; 435/412; 435/415; 435/416; 435/417; 435/414; 435/411; 800/320.1; 800/320.3; 800/320; 800/320.2; 800/312; 800/314; 800/306; 800/317.1; 800/322; 800/317.2; 800/317.3; 800/317; 800/317.4; 536/23.7; 536/23.74; 435/320.1; 435/69.1; 530/350; 530/387.9; 435/29; 435/468; 435/6; 506/17; 536/23.1; 530/387.1

(57) ABSTRACT

This invention relates generally to a plant cell with increased tolerance and/or resistance to environmental stress and increased biomass production as compared to a corresponding non-transformed wild type plant cell by increasing or generating one or more activities of polypeptides associated with abiotic stress responses and abiotic stress tolerance in plants.

[0001] This invention relates generally to a plant cell with increased tolerance and/or resistance to environmental stress and increased biomass production as compared to a corresponding non-transformed wild type plant cell by increasing or generating one or more activities of polypeptides associated with abiotic stress responses and abiotic stress tolerance in plants.

[0002] In particular, this invention relates to plants tailored to grow under conditions of water deficiency.

[0003] The invention also deals with methods of producing and screening for and breeding such plant cells or plants.

[0004] Under field conditions, plant performance in terms of growth, development, biomass accumulation and yield depends on acclimation ability to the environmental changes and stresses. Abiotic environmental stresses such as drought stress, salinity stress, heat stress and cold stress, are major limiting factors of plant growth and productivity (Boyer. 1982. Science 218, 443-448). Plants exposed to heat and/or low water or drought conditions typically have low yields of plant material, seeds, fruit and other edible products. Crop losses and crop yield losses of major crops such as rice, maize (corn) and wheat caused by these stresses represent a significant economic and political factor and contribute to food shortages in many underdeveloped countries.

[0005] Drought, heat, cold and salt stress have a common theme important for plant growth and that is water availability. Plants are typically exposed during their life cycle to conditions of reduced environmental water content. Most plants have evolved strategies to protect themselves against these conditions of low water or desiccation. However, if the severity and duration of the drought conditions are too great, the effects on plant development, growth and yield of most crop plants are profound. Continuous exposure to drought causes major alterations in the plant metabolism. These great changes in metabolism ultimately lead to cell death and consequently yield losses.

[0006] Developing stress-tolerant and/or resistant plants is a strategy that has the potential to solve or mediate at least some of these problems (McKersie and Leshem, 1994. Stress and Stress Coping in Cultivated Plants, Kluwer Academic Publishers). However, traditional plant breeding strategies to develop new lines of plants that exhibit resistance (tolerance) to these types of stress are relatively slow and require specific resistant lines for crossing with the desired line. Limited germplasm resources for stress tolerance and incompatibility in crosses between distantly related plant species represent significant problems encountered in conventional breeding. Additionally, the cellular processes leading to drought, cold and salt tolerance and/or resistance are complex in nature and involve multiple mechanisms of cellular adaptation and numerous metabolic pathways (McKersie and Leshem, 1994. Stress and Stress Coping in Cultivated Plants, Kluwer Academic Publishers). This multi-component nature of stress tolerance and/or resistance has not only made breeding for tolerance and/or resistance largely unsuccessful, but has also limited the ability to genetically engineer stress tolerance plants using biotechnological methods.

[0007] Plants are exposed during their life cycle also to heat, cold and salt stress. The protection strategies are similar to those of drought resistance. Since high salt content in some soils results in less available water for cell intake, its effect is similar to those observed under drought conditions. Likewise, under freezing temperatures, plant cells loose water as a result of ice formation that starts in the apoplast and withdraws water from the symplast (McKersie and Leshem, 1994. Stress and Stress Coping in Cultivated Plants, Kluwer Academic Publishers). Physiologically these stresses are also interconnected and may induce similar cellular damage. For example drought and salt stress are manifested primarily as osmotic stress, leading to the disruption of homeostasis and ion distribution in the cell (Serrano et al., 1999; Zhu, 2001a; Wang et al., 2003). Oxidative stress, which frequently accompanies high temperature, salinity or drought stress, may cause denaturation of functional or structural proteins (Smirnoff, 1998). As a consequence these abiotic stresses often activate similar signaling pathways (Shinozaki and Ymaguchi-Shinozaki, 2000; Knight and Knight, 2001; Zhu 2001b, 2002) and cellular responses, e.g. the production of certain stress proteins, antioxidants and compatible solutes (Vierling and Kimpel, 1992; Zhu et al., 1997; .Cushman and Bohnert, 2000).

[0008] The results of current research indicate that drought tolerance and/or resistance is a complex quantitative trait and that no real diagnostic marker is available yet. This lack of a mechanistic understanding makes it difficult to design a transgenic approach to improve water stress tolerance and/or resistance.

[0009] At the moment many genetical and biotechnological approaches are known in order to obtain plants growing under conditions of low water availability.

[0010] These approaches are generally based on the introduction and expression of genes in plant cell coding for different enzymes as disclosed for example in WO2004011888, WO2006032708, US20050097640, US 20060037108, US20050108791, Serrano et al. (1999; Scientia Horticulturae 78: 261-269) and many others.

[0011] For example the overexpression of antioxidant enzymes or ROS-scavenging enzymes is one possibility to engineer tolerance, e.g. transgenic alfalfa plants expressing Mn-superoxide dismutase tend to have reduced injury after water-deficit stress (McKersie et al., 1996. Plant Physiol. 111, 1177-1181). These same transgenic plants have increased biomass production in field trials (McKersie et al., 1999. Plant Physiology, 119: 839-847; McKersie et al., 1996. Plant Physiol. 111, 1177-1181). Transgenic plants that overproduce osmolytes such as mannitol, fructans, proline or glycine-betaine also show increased resistance to some forms of abiotic stress and it is proposed that the synthesized osmolytes act as ROS scavengers (Tarczynski. et al. 1993 Science 259, 508-510; Sheveleva., et al. 1997. Plant Physiol.115, 1211-1219).

[0012] The expression of genes from the family of glutaredoxin and thioredoxin confers increase tolerance to environmental stress, specially to salinity or cold (EP1 529 112 A). These plants had higher seed yields, photosynthesis and dry matter production than susceptible plants. Nothing is known about the development of these plants under condition of sparsly nutrient disposability.

[0013] Generally the transformed and stress resistant plants cited exhibit slower growth and reduced biomass, due to an imbalance in development and physiology of the plant, thus having significant fitness cost (Kasuga et al., 1999, Danby and Gehring et al., 2005). Despite maintaining basic metabolic function this leads to severe biomass and yield loss. Sometimes the root/shoot dry weight ratio increase as plant water stress develops. The increase is mostly due to a relative reduction in shoot dry weight. The ratio of seed yield to above-ground dry weight is relatively stable under many environmental conditions and so a robust correlation between plant size and grain yield can often be obtained. These processes are intrinsically linked because the majority of grain biomass is dependent on current stored photosynthetic productivity by the leaves and stem of the plant. Therefore selecting for plant size, even at early stages of development, has been used as an indicator for future potential.

[0014] In some cases (US20060037108) an increased biomass, mainly a greater shoot biomass was observed after a drought treatment by withholding water for 6 to 8 days.

[0015] There is still a need to identify genes expressed in stress tolerant plants that have the capacity to confer stress resistance to its host plant and to other plant species, specially to confer increased tolerance and/or resistance to environmental stress, preferably under conditions of water deficiency and confers increased biomass production. It is a object of this invention to identify new methods to confer stress tolerance and/or resistance in plants or plant cells. Complex traits of abiotic stress phenomena make genetic optimisation difficult. However, the modification of a single gene e.g. transcription factors or antiporters resulted in several cases in a significant increase in stress tolerance (Wang et al., 2003

[0016] It is further an object of this invention to put plants at disposal, which are water stress resistant for a period of at least 1.0, preferably 1.5 days of water deficiency as compared to a corresponding non-transformed wild type plant, and exhibit additionally under conditions of low water or desiccation an equal, preferably an increased biomass production.

[0017] There is further a need to identify genes expressed in stress tolerant plants that have the capacity to confer stress resistance and increased biomass production, specially under any sub-optimal growing condition.

[0018] Accordingly, in a first embodiment, the present invention provides a method for producing a transgenic plant cell with increased tolerance and/or resistance to environmental stress and increased biomass production as compared to a corresponding non-transformed wild type plant cell by increasing or generating one or more activities selected from the group consisting of: 2,3-dihydroxy-2,3-dihydrophenylpropionatedehydrogenase, 3-deoxy-D-arabino-heptulosonate-7-phosphate (DAHP) synthase, 3-deoxy-D-arabino-heptulosonate-7-phosphatesynthase, 3-oxoacyl-(acyl carrier protein) synthase, acid shock protein precursor, aspartate ammonia-lyase, b0081-protein, b0482-protein, b0631-protein, b0753-protein, b0866-protein, b1052-protein, b1161-protein, b1423-protein, b1878-protein, b2226-protein, b2475-protein, cellobiose/arbutin/salicin-specific PTS enzyme (IIB component/IC component), Checkpoint protein, CP4-57 prophage/RNase LS, Dihydrouridine synthase,

[0019] DNA-binding transcriptional dual regulator protein, D-xylose transporter subunit, gamma-Glu-putrescine synthase, gluconate transporter, glucose-1-phosphate thymidylyltransferase, Glutamine tRNA synthetase, glutathione-dependent oxidoreductase, glycine betaine transporter subunit protein, glycogen synthase, GTP cyclohydrolase I, heat shock protein, heat shock protein HtpX, heme lyase (CcmH subunit), hexuronate transporter, histidine/lysine/arginine/ornithine transporter subunit protein, HyaA/HyaB-processing protein, inner membrane protein, L-arabinose transporter subunit, Lsm (Like Sm) protein, L-threonine 3-dehydrogenase, methylglyoxal synthase, multidrug efflux system (subunit B), N,N′-diacetylchitobiose-specific enzyme IIA component of PTS, NADH dehydrogenase (subunit N), neutral amino-acid efflux system, nicotinamide-nucleotide adenylyltransferase, ornithine decarboxylase, pantothenate kinase, peptidyl-prolyl cis-trans isomerase A (rotamase A), phosphate transporter, phosphatidylglycerophosphate synthetase, polyphosphate kinase, potassiumtransporting ATPase (subunit B), predicted antimicrobial peptide transporter subunit, predicted arginine/ornithine transporter, predicted hydrolase, predicted kinase, predicted ligase, predicted outer membrane lipoprotein, predicted oxidoreductase (flavin:NADH component), predicted porin, predicted PTS enzymes (IIB component/IIC component), predicted serine transporter protein, predicted transporter protein, Protein component of the small (40S) ribosomal subunit, regulator of length of O-antigen component of lipopolysaccharide chains, ribonuclease activity regulator protein RraA, sensory histidine kinase in two-component regulatory system with NarP (NarL), sodium/proton antiporter, Splicing factor, threonine and homoserine efflux system, transcriptional regulator protein, transcriptional repressor protein MetJ, transporter subunit/periplasmic-binding component of ABC superfamily, tRNA pseudouridine synthase, tRNA-specific adenosine deaminase, universal stress protein UP12, Ya1049c-protein, YCR059C-protein, YEL005C-protein, YER156C-protein, Yfr042w-protein, YGL045W-protein, and YOR024w-protein.

[0020] In one embodiment of the invention the proteins having a activity selected from the group consisting of: 2,3-dihydroxy-2,3-dihydrophenylpropionatedehydrogenase, 3-deoxy-D-arabino-heptulosonate-7-phosphate (DAHP) synthase, 3-deoxy-D-arabino-heptulosonate-7-phosphatesynthase, 3-oxoacyl-(acyl carrier protein) synthase, acid shock protein precursor, aspartate ammonia-lyase, b0081-protein, b0482-protein, b0631-protein, b0753-protein, b0866-protein, b1052-protein, b1161-protein, b1423-protein, b1878-protein, b2226-protein, b2475-protein, cellobiose/arbutin/salicin-specific PTS enzyme (IIB component/IC component), Checkpoint protein, CP4-57 prophage/RNase LS, Dihydrouridine synthase, DNA-binding transcriptional dual regulator protein, D-xylose transporter subunit, gamma-Glu-putrescine synthase, gluconate transporter, glucose-1-phosphate thymidylyltransferase, Glutamine tRNA synthetase, glutathione-dependent oxidoreductase, glycine betaine transporter subunit protein, glycogen synthase, GTP cyclohydrolase I, heat shock protein, heat shock protein HtpX, heme lyase (CcmH subunit), hexuronate transporter, histidine/lysine/arginine/ornithine transporter subunit protein, HyaA/HyaB-processing protein, inner membrane protein, L-arabinose transporter subunit, Lsm (Like Sm) protein, L-threonine 3-dehydrogenase, methylglyoxal synthase, multidrug efflux system (subunit B), N,N′-diacetylchitobiose-specific enzyme IIA component of PTS, NADH dehydrogenase (subunit N), neutral amino-acid efflux system, nicotinamide-nucleotide adenylyltransferase, ornithine decarboxylase, pantothenate kinase, peptidylprolyl cis-trans isomerase A (rotamase A), phosphate transporter, phosphatidylglycerophosphate synthetase, polyphosphate kinase, potassium-transporting ATPase (subunit B), predicted antimicrobial peptide transporter subunit, predicted arginine/ornithine transporter, predicted hydrolase, predicted kinase, predicted ligase, predicted outer membrane lipoprotein, predicted oxidoreductase (flavin:NADH component), predicted porin, predicted PTS enzymes (IIB component/IIC component), predicted serine transporter protein, predicted transporter protein, Protein component of the small (40S) ribosomal subunit, regulator of length of O-antigen component of lipopolysaccharide chains, ribonuclease activity regulator protein RraA, sensory histidine kinase in two-component regulatory system with NarP (NarL), sodium/proton antiporter, Splicing factor, threonine and homoserine efflux system, transcriptional regulator protein, transcriptional repressor protein MetJ, transporter subunit/periplasmic-binding component of ABC superfamily, tRNA pseudouridine synthase, tRNA-specific adenosine deaminase, universal stress protein UP12, Ya1049c-protein, YCR059C-protein, YEL005C-protein, YER156C-protein, Yfr042w-protein, YGL045W-protein, and YOR024w-protein and the polypeptides as depicted in table II, column 5 and 7 are named as “stress related protein” SRP.

[0021] As used herein, the term “environmental stress” refers to any sub-optimal growing condition and includes, but is not limited to, sub-optimal conditions associated with drought, cold or salinity or combinations thereof. In preferred embodiments, environmental stress is drought and low water content. Wherein drought stress means any environmental stress which leads to a lack of water in plants or reduction of water supply to plants.

[0022] In one embodiment of the invention the term “increased tolerance and/or resistance to environmental stress” relates to an increased resistance to water stress, which is produced as a secondary stress by cold, and salt, and, of course, as a primary stress during drought.

[0023] As used herein, the term “sub-optimal growing condition” refers also to limited nutrient availability and sub-optimal disposability.

[0024] In one embodiment, limited nutrient availability is drought and low water content.

[0025] In one embodiment, limited nutrient availability is a sub-optimal disposability in nutrients selected from the group consisting of phosphorus, potassium and nitrogen.

[0026] In one embodiment, limited nutrient availability is a sub-optimal disposability of nitrogen.

[0027] In one embodiment, the biomass of the transgenic plants of the invention is increased by an enhanced nutrient use efficiency (NUE). An improvement or increase in nutrient use efficiency of a plant may be manifested by improving a plant's general efficiency of nutrient assimilation (e.g. in terms of improvement of general nutrient uptake and/or transport, improving a plant's general transport mechanisms, assimilation pathway improvements, and the like), and/or by improving specific nutrient use efficiency of nutrients including, but not limited to, phosphorus, potassium, and nitrogen.

[0028] Plant nutrition is essential to the growth and development of plants and therefore also for quantity and quality of plant products. Because of the strong influence of the efficiency of nutrition uptake as well as nutrition utilization on plant yield and product quality, a huge amount of fertilizer is poured onto soils to optimize plant growth and quality.

[0029] In the present invention, the enhanced tolerance to limited nutrient availability may, for example and preferably, be determined according to the following method:

[0030] For high-throughput purposes plants are screened for biomass production on agar plates with limited supply of nitrogen (adapted from Estelle and Somerville, 1987). This screening pipeline consists of two level. Transgenic lines are subjected to subsequent level if biomass production is significantly improved in comparison to wild type plants. With each level number of replicates and statistical stringency is increased. For the sowing, the seeds, which are stored in the refrigerator (at −20° C.), are removed from the Eppendorf tubes with the aid of a toothpick and transferred onto the above-mentioned agar plates, with limited supply of nitrogen (0.05 mM KNO₃).

[0031] After the seeds have been sown, plates are subjected to stratification for 2-4 days in the dark at 4° C. After the stratification, the test plants are grown for 22 to 25 days at a 16-h-light, 8-h-dark rhythm at 20° C., an atmospheric humidity of 60% and a CO₂ concentration of approximately 400 ppm. The light sources used generates a light resembling the solar color spectrum with a light intensity of approximately 100 μE/m²s. After 10 to 11 days the plants are individualized. Improved growth under nitrogen limited conditions is assessed by biomass production of shoots and roots of transgenic plants in comparison to wild type control plants after 20-25 days growth.

[0032] Transgenic lines showing a significant improved biomass production in comparison to wild type plants are subjected to following experiment of the subsequent level:

[0033] In case of Arabidopsis thaliana, the seeds are sown in pots containing a 1:1 (v:v) mixture of nutrient depleted soil (“Einheitserde Typ 0”, 30% clay, Tantau, Wansdorf Germany) and sand. Germination is induced by a four day period at 4° C., in the dark. Subsequently the plants are grown under standard growth conditions (photoperiod of 16 h light and 8 h dark, 20° C., 60% relative humidity, and a photon flux density of 200 μE).

[0034] The plants are grown and cultured, inter alia they are watered every second day with a N-depleted nutrient solution. The N-depleted nutrient solution e.g. contains beneath water

| mineral nutrient | final concentration | |
|---|---|---|
| KCl | 3.00 | mM |
| MgSO₄ × 7 H₂O | 0.5 | mM |
| CaCl₂ × 6 H₂O | 1.5 | mM |
| K₂SO₄ | 1.5 | mM |
| NaH₂PO₄ | 1.5 | mM |
| Fe-EDTA | 40 | μM |
| H₃BO₃ | 25 | μM |
| MnSO₄ × H₂O | 1 | μM |
| ZnSO₄ × 7 H₂O | 0.5 | μM |
| Cu₂SO₄ × 5 H₂O | 0.3 | μM |
| Na₂MoO₄ × 2 H₂O | 0.05 | μM |

[0035] After 9 to 10 days the plants are individualized. After a total time of 29 to 31 days the plants are harvested and rated by the fresh weight of the arial parts of the plants. The biomass increase is measured as ratio of the fresh weight of the aerial parts of the respective transgene plant and the non-transgenic wild type plant.

[0036] Accordingly, in one embodiment of the invention, the transgenic plant of the invention manifests a biomass increase compared to a wild type control under the stress condition of limited nutrient, preferably nitrogen availability.

[0037] In one embodiment of the invention, the term “environmental stress” encompass even the absence of substantial abiotic stress.

[0038] In the present invention, the biomass increase may, for example and preferably, be determined according to the following method:

[0039] Transformed plants are grown in pots in a growth chamber (e.g. York, Mannheim, Germany). In case the plants are Arabidopsis thaliana seeds thereof are sown in pots containing a 3.5:1 (v:v) mixture of nutrient rich soil (GS90, Tantau, Wansdorf, Germany). Plants are grown under standard growth conditions. In case the plants are Arabidopsis thaliana, the standard growth conditions are: photoperiod of 16 h light and 8 h dark, 20° C., 60% relative humidity, and a photon flux density of 220 μmol/m²s. Plants are grown and cultured. In case the plants are Arabidopsis thaliana they are watered every second day. After 13 to 14 days the plants are individualized. Transgenic events and wildtype control plants are evenly distributed over the chamber. Watering is carried out every two days after removing the covers in a standard experiment or, alternatively, every day. For measuring biomass performance, plant fresh weight is determined at harvest time (26-27 days after sowing) by cutting shoots and weighing them. Alternatively, the harvest time is 24-25 days after sowing. Besides weighing, phenotypic information is added in case of plants that differ from the wild type control. Plants are in the stage prior to flowering and prior to growth of inflorescence when harvested.

[0040] Accordingly, in one embodiment of the invention, the transgenic plant of the invention manifests a biomass increase compared to a wild type control under the stress condition of low temperature.

[0041] In one embodiment of the invention the term “ increased tolerance and/or resistance to environmental stress” relates to an increased cold resistance.

[0042] In one embodiment of the invention the term “increased cold resistance” relates to low temperature tolerance, comprising freezing tolerance and/or chilling tolerance.

[0043] Further, improved or enhanced “chilling tolerance” or variations thereof refers to improved adaptation to low but non-freezing temperatures around 10° C., preferably temperatures between 1 to 18° C., more preferably 4-14° C., and most preferred 8 to 12° C., 11 to 12° C.; hereinafter called “chilling temperature”.

[0044] Improved or enhanced “freezing tolerance” or variations thereof refers to improved adaptation to temperatures near or below zero, namely preferably temperatures below 4° C., more preferably below 3 or 2° C., and particularly preferred at or below 0 (zero) ° C. or below −4° C., or even extremely low temperatures down to −10° C. or lower; hereinafter called “freezing temperature.

[0045] More generally, “improved adaptation” to environmental stress like low temperatures e.g. freezing and/or chilling temperatures refers to increased biomass production as compared to a corresponding non-transformed wild type plant.

[0046] Accordingly, for the purposes of the description of the present invention, the term “low temperature” with respect to low temperature stress on a plant, and preferably a crop plant, refers to any of the low temperature conditions as described herein, preferably chilling and/or freezing temperatures as defined above, as the context requires. It is understood that a skilled artisan will be able to recognize from the particular context in the present description which temperature or temperature range is meant by “low temperature”.

[0047] In the present invention, enhanced tolerance to low temperature may, for example and preferably, be determined according to the following method:

[0048] Transformed plants are grown in pots in a growth chamber (e.g. York, Mannheim,

[0049] Germany). In case the plants are Arabidopsis thaliana seeds thereof are sown in pots containing a 3.5:1 (v:v) mixture of nutrient rich soil (GS90, Tantau, Wansdorf, Germany). Plants are grown under standard growth conditions. In case the plants are Arabidopsis thaliana, the standard growth conditions are: photoperiod of 16 h light and 8 h dark, 20° C., 60% relative humidity, and a photon flux density of 200 μmol/m²s. Plants are grown and cultured. In case the plants are Arabidopsis thaliana they are watered every second day. After 12 to 13 days the plants are individualized. Cold (e.g. chilling at 11-12° C.) is applied 14 days after sowing until the end of the experiment. For measuring biomass performance, plant fresh weight was determined at harvest time (29-30 days after sowing) by cutting shoots and weighing them. Beside weighing, phenotypic information was added in case of plants that differ from the wild type control.

[0050] Accordingly, in one embodiment of the invention, the increased cold resistance manifests in an biomass increase of the transgenic plant of the invention compared to a wild type control under the stress condition of low temperature.

[0051] In one embodiment of the invention the term “increased tolerance and/or resistance to environmental stress” relates to an increased cold resistance, meaning to low temperature tolerance, comprising freezing tolerance and/or chilling tolerance.

[0052] In one embodiment of the invention the term “increased tolerance and/or resistance to environmental stress” relates to an increased salt resistance.

[0053] In a preferred embodiment of the invention the term “increased tolerance and/or resistance to environmental stress” relates to an increased drought resistance.

[0054] In one embodiment increased drought resistance refers to resistance to drought cycles, meaning alternating periods of drought and re-watering.

[0055] In the present invention, enhanced tolerance to low temperature may, for example and preferably, be determined according to the following method:

[0056] Transformed plants are grown in pots in a growth chamber (e.g. York, Mannheim, Germany). In case the plants are Arabidopsis thaliana seeds thereof are sown in pots containing a 1:1 (v:v) mixture of nutrient rich soil (GS90, Tantau, Wansdorf, Germany). Plants are grown under standard growth conditions. In case the plants are Arabidopsis thaliana, the standard growth conditions are: photoperiod of 16 h light and 8 h dark, 20° C., 60% relative humidity, and a photon flux density of 220 μmol/m²s. Plants are grown and cultured. After 13 to 14 days the plants are individualized. The water supply throughout the experiment was limited and plants were subjected to cycles of drought and re-watering. In case the plants are Arabidopsis thaliana watering is carried out at day 1 (before sowing), day 14 or day 15, day 21 or day 22, and, finally, day 27 or day 28. For measuring biomass production, plant fresh weight is determined one day after the final watering (day 28 or day 29) by cutting shoots and weighing them. Plants are in the stage prior to flowering and prior to growth of inflorescence when harvested. Significance values for the statistical significance of the biomass changes are calculated by applying the ‘student's’ t test (parameters: two-sided, unequal variance). Beside weighing, phenotypic information was added in case of plants that differ from the wild type control.

[0057] Accordingly, in one embodiment of the invention, the increased cold resistance manifests in an biomass increase of the transgenic plant of the invention compared to a wild type control under the stress condition of cycling drought.

[0058] In an other preferred embodiment of the invention the term “ increased tolerance and/or resistance to environmental stress” relates to an increased resistance to water stress, e.g. drought, cold and salt resistance. Water stress relates to conditions of low water or desiccation.

[0059] In one embodiment of the invention the term “increased tolerance and/or resistance to environmental stress” is defined as survival of plants under drought conditions longer than non-transformed wild type plant.

[0060] Drought conditions means under conditions of water deficiency, in other words the plants survives and growth under conditions of water deficiency in Arabidopsis for a period of at least 10, preferably 11, 12, more preferably 13 day or more without showing any symptoms of injury, such as wilting and leaf browning and/or rolling, on the other hand the plants being visually turgid and healthy green in color.

[0061] In one embodiment of the invention the term “increased biomass production” means that the plants exhibit an increased growth rate from the starting of withholding water as compared to a corresponding non-transformed wild type plant. An increased growth rate comprises an increased in biomass production of the whole plant, an increase in biomass of the visible part of the plant, e.g. of stem and leaves and florescence, visible higher and larger stem.

[0062] In one embodiment increased biomass production includes higher seed yield, higher photosynthesis and/or higher dry matter production.

[0063] In one embodiment of the invention the term “increased biomass production” means that the plants exhibit an prolonged growth from the starting of withholding water as compared to a corresponding non-transformed wild type plant. An prolonged growth comprises survival and/or continued growth of the whole plant at the moment when the non-transformed wild type plants show visual symptoms of injury.

[0064] In one embodiment of the invention the term “increased biomass production” means that the plants exhibit an increased growth rate and prolonged growth from the starting of withholding water as compared to a corresponding non-transformed wild type plant.

[0065] In one embodiment this invention fulfills in part the need to identify new, unique genes capable of conferring stress tolerance in combination with an increase in biomass production to plants upon expression or over-expression of endogenous and/or exogenous genes.

[0066] Accordingly, the present invention relates to a method for producing a transgenic plant cell, a plant or a part thereof with increased tolerance and/or resistance to environmental stress and increased biomass production as compared to a corresponding non-transformed wild type plant cell, a plant or a part thereof, which comprises
[0067] (a) increasing or generating one or more activities selected from the group consisting of: 2,3-dihydroxy-2,3-dihydrophenylpropionatedehydrogenase, 3-deoxy-D-arabino-heptulosonate-7-phosphate (DAH P) synthase, 3-deoxy-D-arabino-heptu losonate-7-phosphatesynthase, 3-oxoacyl-(acyl carrier protein) synthase, acid shock protein precursor, aspartate ammonia-lyase, b0081-protein, b0482-protein, b0631-protein, b0753-protein, b0866-protein, b1052-protein, b1161-protein, b1423-protein, b1878-protein, b2226-protein, b2475-protein, cellobiose/arbutin/salicin-specific PTS enzyme (IIB component/IC component), Checkpoint protein, CP4-57 prophage/RNase LS, Dihydrouridine synthase, DNA-binding transcriptional dual regulator protein, D-xylose transporter subunit, gamma-Glu-putrescine synthase, gluconate transporter, glucose-1-phosphate thymidylyltransferase, Glutamine tRNA synthetase, glutathione-dependent oxidoreductase, glycine betaine transporter subunit protein, glycogen synthase, GTP cyclohydrolase I, heat shock protein, heat shock protein HtpX, heme lyase (CcmH subunit), hexuronate transporter, histidine/lysine/arginine/ornithine transporter subunit protein, HyaA/HyaB-processing protein, inner membrane protein, L-arabinose transporter subunit, Lsm (Like Sm) protein, L-threonine 3-dehydrogenase, methylglyoxal synthase, multidrug efflux system (subunit B), N,N′-diacetylchitobiose-specific enzyme IIA component of PTS, NADH dehydrogenase (subunit N), neutral amino-acid efflux system, nicotinamide-nucleotide adenylyltransferase, ornithine decarboxylase, pantothenate kinase, peptidylprolyl cis-trans isomerase A (rotamase A), phosphate transporter, phosphatidylglycerophosphate synthetase, polyphosphate kinase, potassium-transporting ATPase (subunit B), predicted antimicrobial peptide transporter subunit, predicted arginine/ornithine transporter, predicted hydrolase, predicted kinase, predicted ligase, predicted outer membrane lipoprotein, predicted oxidoreductase (flavin:NADH component), predicted porin, predicted PTS enzymes (IIB component/IIC component), predicted serine transporter protein, predicted transporter protein, Protein component of the small (40S) ribosomal subunit, regulator of length of O-antigen component of lipopolysaccharide chains, ribonuclease activity regulator protein RraA, sensory histidine kinase in two-component regulatory system with NarP (NarL), sodium/proton antiporter, Splicing factor, threonine and homoserine efflux system, transcriptional regulator protein, transcriptional repressor protein MetJ, transporter subunit/periplasmic-binding component of ABC superfamily, tRNA pseudouridine synthase, tRNA-specific adenosine deaminase, universal stress protein UP12, Ya1049c-protein, YCR059C-protein, YEL005C-protein, YER156C-protein, Yfr042w-protein, YGL045W-protein, and YOR024w-protein. in plant cell, a plant or a part thereof, and
[0068] (b) growing the plant cell, a plant or a part thereof under conditions which permit the development of a plant with increased tolerance and/or resistance to environmental stress and increased biomass production as compared to a corresponding non-transformed wild type plant.

[0069] In a preferred embodiment the present invention relates to a method for producing a transgenic plant cell, a plant or a part thereof with increased tolerance and/or resistance to environmental stress and increased biomass production as compared to a corresponding non-transformed wild type plant cell, a plant or a part thereof, which comprises
[0070] (a) increasing or generating one or more activities selected from the group consisting of: 2,3-dihydroxy-2,3-dihydrophenylpropionatedehydrogenase, 3-deoxy-D-arabino-heptu losonate-7-phosphate (DAH P) synthase, 3-deoxy-D-arabino-heptu losonate-7-phosphatesynthase, 3-oxoacyl-(acyl carrier protein) synthase, acid shock protein precursor, aspartate ammonia-lyase, b0081-protein, b0482-protein, b0631-protein, b0753-protein, b0866-protein, b1052-protein, b1161-protein, b1423-protein, b1878-protein, b2226-protein, b2475-protein, cellobiose/arbutin/salicin-specific PTS enzyme (IIB component/IC component), Checkpoint protein, CP4-57 prophage/RNase LS, Dihydrouridine synthase, DNA-binding transcriptional dual regulator protein, D-xylose transporter subunit, gamma-Glu-putrescine synthase, gluconate transporter, glucose-1-phosphate thymidylyltransferase, Glutamine tRNA synthetase, glutathione-dependent oxidoreductase, glycine betaine transporter subunit protein, glycogen synthase, GTP cyclohydrolase I, heat shock protein, heat shock protein HtpX, heme lyase (CcmH subunit), hexuronate transporter, histidine/lysine/arginine/ornithine transporter subunit protein, HyaA/HyaB-processing protein, inner membrane protein, L-arabinose transporter subunit, Lsm (Like Sm) protein, L-threonine 3-dehydrogenase, methylglyoxal synthase, multidrug efflux system (subunit B), N,N′-diacetylchitobiose-specific enzyme IIA component of PTS, NADH dehydrogenase (subunit N), neutral amino-acid efflux system, nicotinamide-nucleotide adenylyltransferase, ornithine decarboxylase, pantothenate kinase, peptidyl-prolyl cis-trans isomerase A (rotamase A), phosphate transporter, phosphatidylglycerophosphate synthetase, polyphosphate kinase, potassium-transporting ATPase (subunit B), predicted antimicrobial peptide transporter subunit, predicted arginine/ornithine transporter, predicted hydrolase, predicted kinase, predicted ligase, predicted outer membrane lipoprotein, predicted oxidoreductase (flavin:NADH component), predicted porin, predicted PTS enzymes (IIB component/IIC component), predicted serine transporter protein, predicted transporter protein, Protein component of the small (40S) ribosomal subunit, regulator of length of O-antigen component of lipopolysaccharide chains, ribonuclease activity regulator protein RraA, sensory histidine kinase in two-component regulatory system with NarP (NarL), sodium/proton antiporter, Splicing factor, threonine and homoserine efflux system, transcriptional regulator protein, transcriptional repressor protein MetJ, transporter subunit/periplasmic-binding component of ABC superfamily, tRNA pseudouridine synthase, tRNA-specific adenosine deaminase, universal stress protein UP12, Ya1049c-protein, YCR059C-protein, YEL005C-protein, YER156C-protein, Yfr042w-protein, YGL045W-protein, and YOR024w-protein. in plant cell, a plant or a part thereof, and
[0071] (b) growing the plant cell, a plant or a part thereof together with non-transformed wildtype plants
[0072] c) imposing at water stress by withholding water,
[0073] d) after the non-transformed wild type plants show visual symptoms of injury selecting the plant with increased tolerance and/or resistance to environmental stress and increased biomass production as compared to a corresponding non-transformed wild type plant.

[0074] In one embodiment of the invention the increased water stress resistance is determinated and quantified according to the following method:

[0075] Transformed plants are grown individually in pots in a growth chamber (York Industriekälte GmbH, Mannheim, Germany).

[0076] Germination is induced. In case the plants are Arabidopsis thaliana sown seeds are kept at 4° C., in the dark, for 3 days in order to induce germination. Subsequently conditions are changed for 3 days to 20° C/6° C. day/night temperature with a 16/8 h day-night cycle at 150 μE/m²s.

[0077] Subsequently the plants are grown under standard growth conditions. In case the plants are Arabidopsis thaliana, the standard growth conditions are: photoperiod of 16 h light and 8 h dark, 20° C., 60% relative humidity, and a photon flux density of 200 μE. Plants are grown and cultured until they develop leaves. In case the plants are Arabidopsis thaliana they are watered daily until they were approximately 3 weeks old. Starting at that time drought was imposed by withholding water.

[0078] After the non-transformed wild type plants show visual symptoms of injury, the evaluation starts and plants are scored for symptoms of drought symptoms and biomass production comparison to wild type and neighboring plants for 5-6 days in succession.

[0079] Visual symptoms of injury stating for one or any combination of two, three or more of the following features:

[0080] a) wilting

[0081] b) leaf browning

[0082] c) loss of turgor, which results in drooping of leaves or needles stems, and flowers,

[0083] d) drooping and/or shedding of leaves or needles,

[0084] e) the leaves are green but leaf angled slightly toward the ground compared with controls,

[0085] f) leaf blades begun to fold (curl) inward,

[0086] g) premature senescence of leaves or needles,

[0087] h) loss of chlorophyll in leaves or needles and/or yellowing.

[0088] In one embodiment the present invention relates to a method for producing a transgenic plant cell, a plant or a part thereof with increased tolerance and/or resistance to environmental stress and increased biomass production as compared to a corresponding non-transformed wild type plant cell, a plant or a part thereof, which comprises
[0089] (a) increasing or generating the activity of a protein as shown in table II, column 3 encoded by the nucleic acid sequences as shown in table I, column 5, in plant cell, a plant or a part thereof, and
[0090] (b) growing the plant cell, a plant or a part thereof under conditions which permit the development of a plant with increased tolerance and/or resistance to environmental stress and increased biomass production as compared to a corresponding non-transformed wild type plant.

[0091] Accordingly, the present invention relates to a method for producing a transgenic plant cell, a plant or a part thereof with increased tolerance and/or resistance to environmental stress and increased biomass production as compared to a corresponding non-transformed wild type plant cell, a plant or a part thereof, which comprises
[0092] (a) increasing or generating one or more activities selected from the group consisting of: 2,3-dihydroxy-2,3-dihydrophenylpropionatedehydrogenase, 3-deoxy-D-arabino-heptulosonate-7-phosphate (DAH P) synthase, 3-deoxy-D-arabino-heptu losonate-7-phosphatesynthase, 3-oxoacyl-(acyl carrier protein) synthase, acid shock protein precursor, aspartate ammonia-lyase, b0081-protein, b0482-protein, b0631-protein, b0753-protein, b0866-protein, b1052-protein, b1161-protein, b1423-protein, b1878-protein, b2226-protein, b2475-protein, cellobiose/arbutin/salicin-specific PTS enzyme (IIB component/IC component), Checkpoint protein, CP4-57 prophage/RNase LS, Dihydrouridine synthase, DNA-binding transcriptional dual regulator protein, D-xylose transporter subunit, gamma-Glu-putrescine synthase, gluconate transporter, glucose-1-phosphate thymidylyltransferase, Glutamine tRNA synthetase, glutathione-dependent oxidoreductase, glycine betaine transporter subunit protein, glycogen synthase, GTP cyclohydrolase I, heat shock protein, heat shock protein HtpX, heme lyase (CcmH subunit), hexuronate transporter, histidine/lysine/arginine/ornithine transporter subunit protein, HyaA/HyaB-processing protein, inner membrane protein, L-arabinose transporter subunit, Lsm (Like Sm) protein, L-threonine 3-dehydrogenase, methylglyoxal synthase, multidrug efflux system (subunit B), N,N′-diacetylchitobiose-specific enzyme IIA component of PTS, NADH dehydrogenase (subunit N), neutral amino-acid efflux system, nicotinamide-nucleotide adenylyltransferase, ornithine decarboxylase, pantothenate kinase, peptidyl-prolyl cis-trans isomerase A (rotamase A), phosphate transporter, phosphatidylglycerophosphate synthetase, polyphosphate kinase, potassium-transporting ATPase (subunit B), predicted antimicrobial peptide transporter subunit, predicted arginine/ornithine transporter, predicted hydrolase, predicted kinase, predicted ligase, predicted outer membrane lipoprotein, predicted oxidoreductase (flavin:NADH component), predicted porin, predicted PTS enzymes (IIB component/IIC component), predicted serine transporter protein, predicted transporter protein, Protein component of the small (40S) ribosomal subunit, regulator of length of O-antigen component of lipopolysaccharide chains, ribonuclease activity regulator protein RraA, sensory histidine kinase in two-component regulatory system with NarP (NarL), sodium/proton antiporter, Splicing factor, threonine and homoserine efflux system, transcriptional regulator protein, transcriptional repressor protein MetJ, transporter subunit/periplasmic-binding component of ABC superfamily, tRNA pseudouridine synthase, tRNA-specific adenosine deaminase, universal stress protein UP12, Ya1049c-protein, YCR059C-protein, YEL005C-protein, YER156C-protein, Yfr042w-protein, YGL045W-protein, and YOR024w-protein. in the plastid of a plant cell, and
[0093] (b) growing the plant cell under conditions which permit the development of a plant with increased tolerance and/or resistance to environmental stress and increased biomass production as compared to a corresponding non-transformed wild type plant.

[0094] In one embodiment the present invention relates to a method for producing a transgenic plant cell, a plant or a part thereof with increased tolerance and/or resistance to environmental stress and increased biomass production as compared to a corresponding non-transformed wild type plant cell, a plant or a part thereof, which comprises
[0095] (a) increasing or generating the activity of a protein as shown in table II, column 3 encoded by the nucleic acid sequences as shown in table I, column 5 or 7, in the plastid of a plant cell, and
[0096] (b) growing the plant cell under conditions which permit the development of a plant with increased tolerance and/or resistance to environmental stress and increased biomass production as compared to a corresponding non-transformed wild type plant.

[0097] In another embodiment the present invention is related to a method for producing a transgenic plant cell, a plant or a part thereof with increased tolerance and/or resistance to environmental stress and increased biomass production as compared to a corresponding non-transformed wild type plant cell, a plant or a part thereof, which comprises

[0098] (a) increasing or generating one or more activities selected from the group consisting of: 2,3-dihydroxy-2,3-dihydrophenylpropionatedehydrogenase, 3-deoxy-D-arabino-heptu losonate-7-phosphate (DAHP) synthase, 3-deoxy-D-arabino-heptulosonate-7-phosphatesynthase, 3-oxoacyl-(acyl carrier protein) synthase, acid shock protein precursor, aspartate ammonia-lyase, b0081-protein, b0482-protein, b0631-protein, b0753-protein, b0866-protein, b1052-protein, b1161-protein, b1423-protein, b1878-protein, b2226-protein, b2475-protein, cellobiose/arbutin/salicin-specific PTS enzyme (IIB component/IC component), Checkpoint protein, CP4-57 prophage/RNase LS, Dihydrouridine synthase, DNA-binding transcriptional dual regulator protein, D-xylose transporter subunit, gamma-Glu-putrescine synthase, gluconate transporter, glucose-1-phosphate thymidylyltransferase, Glutamine tRNA synthetase, glutathione-dependent oxidoreductase, glycine betaine transporter subunit protein, glycogen synthase, GTP cyclohydrolase I, heat shock protein, heat shock protein HtpX, heme lyase (CcmH subunit), hexuronate transporter, histidine/lysine/arginine/ornithine transporter subunit protein, HyaA/HyaB-processing protein, inner membrane protein, L-arabinose transporter subunit, Lsm (Like Sm) protein, L-threonine 3-dehydrogenase, methylglyoxal synthase, multidrug efflux system (subunit B), N,N′-diacetylchitobiose-specific enzyme IIA component of PTS, NADH dehydrogenase (subunit N), neutral amino-acid efflux system, nicotinamide-nucleotide adenylyltransferase, ornithine decarboxylase, pantothenate kinase, peptidyl-prolyl cis-trans isomerase A (rotamase A), phosphate transporter, phosphatidylglycerophosphate synthetase, polyphosphate kinase, potassium-transporting ATPase (subunit B), predicted antimicrobial peptide transporter subunit, predicted arginine/ornithine transporter, predicted hydrolase, predicted kinase, predicted ligase, predicted outer membrane lipoprotein, predicted oxidoreductase (flavin:NADH component), predicted porin, predicted PTS enzymes (IIB component/IIC component), predicted serine transporter protein, predicted transporter protein, Protein component of the small (40S) ribosomal subunit, regulator of length of O-antigen component of lipopolysaccharide chains, ribonuclease activity regulator protein RraA, sensory histidine kinase in two-component regulatory system with NarP (NarL), sodium/proton antiporter, Splicing factor, threonine and homoserine efflux system, transcriptional regulator protein, transcriptional repressor protein MetJ, transporter subunit/periplasmic-binding component of ABC superfamily, tRNA pseudouridine synthase, tRNA-specific adenosine deaminase, universal stress protein UP12, Ya1049c-protein, YCR059C-protein, YEL005C-protein, YER156C-protein, Yfr042w-protein, YGL045W-protein, and YOR024w-protein. in an organelle of a plant cell or

[0099] (b) increasing or generating the activity of a protein as shown in table II, column 3 encoded by the nucleic acid sequences as shown in table I, column 5 or 7, which are joined to a nucleic acid sequence encoding a transit peptide in a plant cell; or

[0100] (c) increasing or generating the activity of a protein as shown in table II, column 3 encoded by the nucleic acid sequences as shown in table I, column 5 or 7, which are joined to a nucleic acid sequence encoding chloroplast localization sequence, in a plant cell, and

[0101] (d) growing the plant cell under conditions which permit the development of a plant with increased tolerance and/or resistance to environmental stress and increased biomass production as compared to a corresponding non-transformed wild type plant.

[0102] In another embodiment, the present invention relates to a method for producing a transgenic plant cell, a plant or a part thereof with increased tolerance and/or resistance to environmental stress and increased biomass production as compared to a corresponding non-transformed wild type plant cell, a plant or a part thereof, which comprises

[0103] (a) increasing or generating the activity of a protein as shown in table II, column 3 encoded by the nucleic acid sequences as shown in table I, column 5 or 7, in an organelle of a plant through the transformation of the organelle, or

[0104] (b) increasing or generating the activity of a protein as shown in table II, column 3 encoded by the nucleic acid sequences as shown in table I, column 5 or 7 in the plastid of a plant, or in one or more parts thereof through the transformation of the plastids; and

[0105] (c) growing the plant cell under conditions which permit the development of a plant with increased tolerance and/or resistance to environmental stress and increased biomass production as compared to a corresponding non-transformed wild type plant.

[0106] In principle the nucleic acid sequence encoding a transit peptide can be isolated from every organism such as microorganisms such as algae or plants containing plastids preferably chloroplasts. A “transit peptide” is an amino acid sequence, whose encoding nucleic acid sequence is translated together with the corresponding structural gene. That means the transit peptide is an integral part of the translated protein and forms an amino terminal extension of the protein. Both are translated as so called “preprotein”. In general the transit peptide is cleaved off from the preprotein during or just after import of the protein into the correct cell organelle such as a plastid to yield the mature protein. The transit peptide ensures correct localization of the mature protein by facilitating the transport of proteins through intracellular membranes. Preferred nucleic acid sequences encoding a transit peptide are derived from a nucleic acid sequence encoding a protein finally resided in the plastid and stemming from an organism selected from the group consisting of the genera

[0107] Acetabularia, Arabidopsis, Brassica, Capsicum, Chlamydomonas, Cururbita, Dunaliella, Euglena, Flaveria, Glycine, Helianthus, Hordeum, Lemna, Lolium, Lycopersion, Malus, Medicago, Mesembryanthemum, Nicotiana, Oenotherea, Oryza, Petunia, Phaseolus, Physcomitrella, Pinus, Pisum, Raphanus, Silene, Sinapis, Solanum, Spinacea, Stevia, Synechococcus, Triticum and Zea.

[0108] Advantageously such transit peptides, which are beneficially used in the inventive process, are derived from the nucleic acid sequence encoding a protein selected from the group consisting of

[0109] ribulose bisphosphate carboxylase/oxygenase, 5-enolpyruvyl-shikimate-3-phosphate synthase, acetolactate synthase, chloroplast ribosomal protein CS17, Cs protein, ferredoxin, plastocyanin, ribulose bisphosphate carboxylase activase, tryptophan synthase, acyl carrier protein, plastid chaperonin-60, cytochrome c552, 22-kDA heat shock protein, 33-kDa Oxygen-evolving enhancer protein 1, ATP synthase γ subunit, ATP synthase δ subunit, chlorophyll-a/b-binding proteinll-1, Oxygen-evolving enhancer protein 2, Oxygen-evolving enhancer protein 3, photosystem I: P21, photosystem I: P28, photosystem I: P30, photosystem I: P35, photosystem I: P37, glycerol-3-phosphate acyltransferases, chlorophyll a/b binding protein, CAB2 protein, hydroxymethyl-bilane synthase, pyruvate-orthophosphate dikinase, CAB3 protein, plastid ferritin, ferritin, early light-inducible protein, glutamate-1-semialdehyde aminotransferase, protochlorophyllide reductase, starch-granule-bound amylase synthase, light-harvesting chlorophyll a/b-binding protein of photosystem II, major pollen allergen Lol p 5a, plastid CIpB ATP-dependent protease, superoxide dismutase, ferredoxin NADP oxidoreductase, 28-kDa ribonucleoprotein, 31-kDa ribonucleoprotein, 33-kDa ribonucleoprotein, acetolactate synthase, ATP synthase CF₀ subunit 1, ATP synthase CF₀ subunit 2, ATP synthase CF₀subunit 3, ATP synthase CF₀ subunit 4, cytochrome f, ADP-glucose pyrophosphorylase, glutamine synthase, glutamine synthase 2, carbonic anhydrase, GapA protein, heat-shock-protein hsp21, phosphate translocator, plastid CIpA ATP-dependent protease, plastid ribosomal protein CL24, plastid ribosomal protein CL9, plastid ribosomal protein PsCL18, plastid ribosomal protein PsCL25, DAHP synthase, starch phosphorylase, root acyl carrier protein II, betaine-aldehyde dehydrogenase, GapB protein, glutamine synthetase 2, phosphoribulokinase, nitrite reductase, ribosomal protein L12, ribosomal protein L13, ribosomal protein L21, ribosomal protein L35, ribosomal protein L40, triose phosphate-3-phosphoglyerate-phosphate translocator, ferredoxin-dependent glutamate synthase, glyceraldehyde-3-phosphate dehydrogenase, NADP-dependent malic enzyme and NADP-malate dehydrogenase.

[0110] More preferred the nucleic acid sequence encoding a transit peptide is derived from a nucleic acid sequence encoding a protein finally resided in the plastid and stemming from an organism selected from the group consisting of the species:

[0111] Acetabularia mediterranea, Arabidopsis thaliana, Brassica campestris, Brassica napus, Capsicum annuum, Chlamydomonas reinhardtii, Cururbita moschata, Dunaliella salina, Dunaliella tertiolecta, Euglena gracilis, Flaveria trinervia, Glycine max, Helianthus annuus, Hordeum vulgare, Lemna gibba, Lolium perenne, Lycopersion esculentum, Malus domestica, Medicago falcata, Medicago sativa, Mesembryanthemum crystallinum, Nicotiana plumbaginifolia, Nicotiana sylvestris, Nicotiana tabacum, Oenotherea hookeri, Oryza sativa, Petunia hybrida, Phaseolus vulgaris, Physcomitrella patens, Pinus tunbergii, Pisum sativum, Raphanus sativus, Silene pratensis, Sinapis alba, Solanum tuberosum, Spinacea oleracea, Stevia rebaudiana, Synechococcus, Synechocystis, Triticum aestivum and Zea mays.

[0112] Even more preferred nucleic acid sequences are encoding transit peptides as disclosed by von Heijne et al. [Plant Molecular Biology Reporter, Vol. 9 (2), 1991: 104-126], which are hereby incorparated by reference. Table V shows some examples of the transit peptide sequences disclosed by von Heijne et al. According to the disclosure of the invention especially in the examples the skilled worker is able to link other nucleic acid sequences disclosed by von Heijne et al. to the nucleic acid sequences shown in table I, columns 5 and 7. Most preferred nucleic acid sequences encoding transit peptides are derived from the genus Spinacia such as chlorplast 30S ribosomal protein PSrp-1, root acyl carrier protein II, acyl carrier protein, ATP synthase: γ subunit, ATP synthase: δ subunit, cytochrom f, ferredoxin I, ferredoxin NADP oxidoreductase (=FNR), nitrite reductase, phosphoribulokinase, plastocyanin or carbonic anhydrase. The skilled worker will recognize that various other nucleic acid sequences encoding transit peptides can easily isolated from plastid-localized proteins, which are expressed from nuclear genes as precursors and are then targeted to plastids. Such transit peptides encoding sequences can be used for the construction of other expression constructs. The transit peptides advantageously used in the inventive process and which are part of the inventive nucleic acid sequences and proteins are typically 20 to 120 amino acids, preferably 25 to 110, 30 to 100 or 35 to 90 amino acids, more preferably 40 to 85 amino acids and most preferably 45 to 80 amino acids in length and functions post-translationally to direct the protein to the plastid preferably to the chloroplast. The nucleic acid sequences encoding such transit peptides are localized upstream of nucleic acid sequence encoding the mature protein. For the correct molecular joining of the transit peptide encoding nucleic acid and the nucleic acid encoding the protein to be targeted it is sometimes necessary to introduce additional base pairs at the joining position, which forms restriction enzyme recognition sequences useful for the molecular joining of the different nucleic acid molecules. This procedure might lead to very few additional amino acids at the N-terminal of the mature imported protein, which usually and preferably do not interfer with the protein function. In any case, the additional base pairs at the joining position which forms restriction enzyme recognition sequences have to be choosen with care, in order to avoid the formation of stop codons or codons which encode amino acids with a strong influence on protein folding, like e.g. proline. It is preferred that such additional codons encode small structural flexible amino acids such as glycine or alanine.

[0113] As mentioned above the nucleic acid sequences coding for the proteins as shown in table II, column 3 and its homologs as disclosed in table I, columns 5 and 7 can be joined to a nucleic acid sequence encoding a transit peptide. This nucleic acid sequence encoding a transit peptide ensures transport of the protein to the plastid. The nucleic acid sequence of the gene to be expressed and the nucleic acid sequence encoding the transit peptide are operably linked. Therefore the transit peptide is fused in frame to the nucleic acid sequence coding for proteins as shown in table II, column 3 and its homologs as disclosed in table I, columns 5 and 7.

[0114] The term “organelle” according to the invention shall mean for example “mitochondria” or preferably “plastid” (throughout the specification the “plural” shall comprise the “singular” and vice versa). The term “plastid” according to the invention are intended to include various forms of plastids including proplastids, chloroplasts, chromoplasts, gerontoplasts, leucoplasts, amyloplasts, elaioplasts and etioplasts preferably chloroplasts. They all have as a common ancestor the aforementioned proplasts.

[0115] Other transit peptides are disclosed by Schmidt et al. [J. Biol. Chem., Vol. 268, No. 36, 1993: 27447-27457], Della-Cioppa et al. [Plant. Physiol. 84, 1987: 965-968], de Castro Silva Filho et al. [Plant Mol. Biol., 30, 1996: 769-780], Zhao et al. [J. Biol. Chem. Vol. 270, No. 11, 1995: 6081-6087], Römer et al. [Biochem. Biophys. Res. Commun., Vol. 196, No. 3, 1993: 1414-1421], Keegstra et al. [Annu. Rev. Plant Physiol. Plant Mol. Biol., 40, 1989: 471-501], Lubben et al. [Photosynthesis Res., 17, 1988: 173-194] and Lawrence et al. [J. Biol. Chem., Vol. 272, No. 33, 1997: 20357-20363]. A general review about targeting is disclosed by Kermode Allison R. in Critical Reviews in Plant Science 15 (4): 285-423 (1996) under the title “Mechanisms of Intracellular Protein Transport and Targeting in Plant Cells.”

[0116] Favored transit peptide sequences, which are used in the inventive process and which forms part of the inventive nucleic acid sequences are generally enriched in hydroxylated amino acid residues (serine and threonine), with these two residues generally constituting 20-35% of the total. They often have an amino-terminal region empty of Gly, Pro, and charged residues. Furthermore they have a number of small hydrophobic amino acids such as valine and alanine and generally acidic amino acids are lacking. In addition they generally have a middle region rich in Ser, Thr, Lys and Arg. Overall they have very often a net positive charge.

[0117] Alternatively, nucleic acid sequences coding for the transit peptides may be chemically synthesized either in part or wholly according to structure of transit peptide sequences disclosed in the prior art. Said natural or chemically synthesized sequences can be directly linked to the sequences encoding the mature protein or via a linker nucleic acid sequence, which may be typically less than 500 base pairs, preferably less than 450, 400, 350, 300, 250 or 200 base pairs, more preferably less than 150, 100, 90, 80, 70, 60, 50, 40 or 30 base pairs and most preferably less than 25, 20, 15, 12, 9, 6 or 3 base pairs in length and are in frame to the coding sequence. Furthermore favorable nucleic acid sequences encoding transit peptides may comprise sequences derived from more than one biological and/or chemical source and may include a nucleic acid sequence derived from the amino-terminal region of the mature protein, which in its native state is linked to the transit peptide. In a preferred embodiment of the invention said amino-terminal region of the mature protein is typically less than 150 amino acids, preferably less than 140, 130, 120, 110, 100 or 90 amino acids, more preferably less than 80, 70, 60, 50, 40, 35, 30, 25 or 20 amino acids and most preferably less than 19, 18, 17, 16, 15, 14, 13, 12, 11 or 10 amino acids in length. But even shorter or longer stretches are also possible. In addition target sequences, which facilitate the transport of proteins to other cell compartments such as the vacuole, endoplasmic reticulum, golgi complex, glyoxysomes, peroxisomes or mitochondria may be also part of the inventive nucleic acid sequence. The proteins translated from said inventive nucleic acid sequences are a kind of fusion proteins that means the nucleic acid sequences encoding the transit peptide for example the ones shown in table V, preferably the last one of the table are joint to the nucleic acid sequences shown in table I, columns 5 and 7. The person skilled in the art is able to join said sequences in a functional manner. Advantageously the transit peptide part is cleaved off from the protein part shown in table II, columns 5 and 7 during the transport preferably into the plastids. All products of the cleavage of the preferred transit peptide shown in the last line of table V have preferably the N-terminal amino acid sequences QIA CSS or QIA EFQLTT in front of the start methionine of the protein metioned in table II, columns 5 and 7. Other short amino acid sequences of an range of 1 to 20 amino acids preferable 2 to 15 amino acids, more preferable 3 to 10 amino acids most preferably 4 to 8 amino acids are also possible in front of the start methionine of the protein metioned in table II, columns 5 and 7. In case of the amino acid sequence QIA CSS the three amino acids in front of the start methionine are stemming from the LIC (=ligatation independent cloning) cassette. Said short amino acid sequence is preferred in the case of the expression of E. coli genes. In case of the amino acid sequence QIA EFQLTT the six amino acids in front of the start methionine are stemming from the LIC cassette. Said short amino acid sequence is preferred in the case of the expression of S. cerevisiae genes. The skilled worker knows that other short sequences are also useful in the expression of the genes metioned in table I, columns 5 and 7. Furthermore the skilled worker is aware of the fact that there is not a need for such short sequences in the expression of the genes.

TABLE V
Examples of transit peptides disclosed by von Heijne et al.

| Trans | | | SEQ ID | |
|---|---|---|---|---|
| Pep | Organism | Transit Peptide | NO: | Reference |
| 1 | Acetabularia | MASIMMNKSVVLSKECAKPLATPK | 17 | Mol. Gen. |
| | mediterranea | VTLNKRGFATTIATKNREMMVWQP | | Genet. |
| | | FNNKMFETFSFLPP | | 218: 445-452 |
| | | | | (1989) |
| 2 | Arabidopsis | MAASLQSTATFLQSAKIATAPSRG | 18 | EMBO J. |
| | thaliana | SSHLRSTQAVGKSFGLETSSARLT | | 8: 3187-3194 |
| | | CSFQSDFKDFTGKCSDAVKIAGFA | | (1989) |
| | | LATSALVVSGASAEGAPK | | |
| 3 | Arabidopsis | MAQVSRICNGVQNPSLICNLSKSS | 19 | Mol. Gen. |
| | thaliana | QRKSPLSVSLKTQQHPRAYPISSS | | Genet. |
| | | WGLKKSGMTLIGSELRPLKVMSSV | | 210: 437-442 |
| | | STAEKASEIVLQPIREISGLIKLP | | (1987) |
| 4 | Arabidopsis | MAAATTTTTTSSSISFSTKPSPSS | 20 | Plant |
| | thaliana | SKSPLPISRFSLPFSLNPNKSSSS | | Physiol. |
| | | SRRRGIKSSSP SS ISAVLNTTTNV | | 85: 1110-1117 |
| | | TTTPSPTKPTKPETF ISRFAPDQP | | (1987) |
| | | RKGA | | |
| 5 | Arabidopsis | MITSSLTCSLQALKLSSPFAHGST | 21 | J. Biol. |
| | thaliana | PLSSLSKPNSFPNHRMPALVPV | | Chem. |
| | | | | 2652763-2767 |
| | | | | (1990) |
| 6 | Arabidopsis | MASLLGTSSSAIWASPSLSSPSSK | 22 | EMBO J. |
| | thaliana | PSSSPICFRPGKLFGSKLNAGIQI | | 9: 1337-1346 |
| | | RPKKNRSRYHVSVMNVATEINSTE | | (1990) |
| | | QVVGKFDSKKSARPVYPFAAI | | |
| 7 | Arabidopsis | MASTALSSAIVGTSFIRRSPAPISL | 23 | Plant |
| | thaliana | RSLPSANTQSLFGLKSGTARGG | | Physiol. |
| | | RVVAM | | 93: 572-577 |
| | | | | (1990) |
| 8 | Arabidopsis | MAASTMALSSPAFAGKAVNLSPAA | 24 | Nucl. Acids |
| | thaliana | SEVLGSGRVTNRKTV | | Res. |
| | | | | 14: 4051-4064 |
| | | | | (1986) |
| 9 | Arabidopsis | MAAITSATVTIPSFTGLKLAVSSK | 25 | Gene 65: |
| | thaliana | PKTLSTISRSSSATRAPPKLALKS | | 59-69 |
| | | SLKDFGVIAVATAASIVLAGNAMA | | (1988) |
| | | MEVLLGSDDGSLAFVPSEFT | | |
| 10 | Arabidopsis | MAAAVSTVGAINRAPLSLNGSGSG | 26 | Nucl. Acids |
| | thaliana | AVSAPASTFLGKKVVTVSRFAQSN | | Res. |
| | | KKSNGSFKVLAVKEDKQTDGDRWR | | 17: 2871 |
| | | GLAYDTSDDQIDI | | (1989) |
| 11 | Arabidopsis | MkSSMLSSTAWTSPAQATMVAPF | 27 | Plant Mol. |
| | thaliana | TGLKSSASFPVTRKANNDITSITS | | Biol. 11: |
| | | NGGRVSC | | 745-759 |
| | | | | (1988) |
| 12 | Arabidopsis | MAASGTSATFRASVSSAPSSSSQL | 28 | Proc. Natl. |
| | thaliana | THLKSPFKAVKY TPLPS SRSKSSS | | Acad. Sci. |
| | | FSVSCTIAKDPPVLMAAGSDPALW | | USA, 86: |
| | | QRPDSFGRFGKFGGKYVPE | | 4604-4608 |
| | | | | (1989) |
| 13 | Brassica | MSTTFCSSVCMQATSLAATTRISF | 29 | Nucl. Acids |
| | campestris | QKPALVSTTNLSFNLRRSIPTRFS | | Res. |
| | | ISCAAKPETVEKVSKIVKKQLSLK | | 15: 7197 |
| | | DDQKVVAE | | (1987) |
| 14 | Brassica napus | MATTFSASVSMQATSLATTTRISF | 30 | Eur. J. |
| | | QKPVLVSNHGRTNLSFNLSRTRLSI | | Biochem. |
| | | SC | | 174: 287-295 |
| | | | | (1988) |
| 15 | Chlamydomonas | MQALSSRVNIAAKPQRAQRLVVRA | 31 | Plant Mol. |
| | reinhardtii | EEVKAAPKKEVGPKRGSLVK | | Biol. 12: |
| | | | | 463-474 |
| | | | | (1989) |
| 16 | Cucurbita moschata | MAELIQDKESAQSAATAAAASSGY | 32 | FEBS Lett. |
| | | ERRNEPAHSRKFLEVRSEEELL- | | 238: 424-430 |
| | | SCIKK | | (1988) |
| 17 | Spinacea oleracea | MSTINGCLTSISPSRTQLKNTSTL | 33 | J. Biol. |
| | | RPTFIANSRVNPSSSVPPSLIRNQ | | Chem. |
| | | PVFAAPAPIITPTL | | 265: |
| | | | | 105414-5417 |
| | | | | (1990) |
| 18 | Spinacea oleracea | MTTAVTAAVSFPSTKTTSLSARCS | 34 | Curr. |
| | | SVISPDKISYKKVPLYYRNVSATG | | Genet. 13: |
| | | KMGPIRAQIASDVEAPPPAPAK- | | 517-522 |
| | | VEKMS | | (1988) |
| 19 | Spinacea oleracea | MTTAVTAAVSFPSTKTTSLSARSS | 35 | |
| | | SVISPDKISYKKVPLYYRNVSATG | | |
| | | KMGPIRA | | |

[0118] Alternatively to the targeting of the sequences shown in table II, columns 5 and 7 preferably of sequences in general encoded in the nucleus with the aid of the targeting sequences mentioned for example in table V alone or in combination with other targeting sequences preferably into the plastids, the nucleic acids of the invention can directly be introduced into the plastidal genome. Therefore in a preferred embodiment the nucleic acid sequences shown in table I, columns 5 and 7 are directly introduced and expressed in plastids.

[0119] The term “introduced” in the context of this specification shall mean the insertion of a nucleic acid sequence into the organism by means of a “transfection”, “transduction” or preferably by “transformation”.

[0120] A plastid, such as a chloroplast, has been “transformed” by an exogenous (preferably foreign) nucleic acid sequence if nucleic acid sequence has been introduced into the plastid that means that this sequence has crossed the membrane or the membranes of the plastid. The foreign DNA may be integrated (covalently linked) into plastid DNA making up the genome of the plastid, or it may remain unintegrated (e.g., by including a chloroplast origin of replication). “Stably” integrated DNA sequences are those, which are inherited through plastid replication, thereby transferring new plastids, with the features of the integrated DNA sequence to the progeny.

[0121] For expression a person skilled in the art is familiar with different methods to introduce the nucleic acid sequences into different organelles such as the preferred plastids. Such methods are for example disclosed by Pal Maiga (Annu. Rev. Plant Biol., 2004, 55: 289-313), Thomas Evans (WO 2004/040973), Kevin E. McBride et al. (U.S. Pat. No. 5,455,818), Henry Daniell et al. (U.S. Pat. No. 5,932,479 and U.S. Pat. No. 5,693,507) and Jeffrey M. Straub et al. (U.S. Pat. No. 6,781,033). A preferred method is the transformation of microspore-derived hypocotyl or cotyledonary tissue (which are green and thus contain numerous plastids) leaf tissue and afterwards the regeneration of shoots from said transformed plant material on selective medium. As methods for the transformation bombarding of the plant material or the use of independently replicating shuttle vectors are well known by the skilled worker. But also a PEG-mediated transformation of the plastids or Agrobacterium transformation with binary vectors is possible. Useful markers for the transformation of plastids are positive selection markers for example the chloramphenicol-, streptomycin-, kanamycin-, neomycin-, amikamycin-, spectinomycin-, triazine- and/or lincomycin-resistance genes. As additional markers named in the literature often as secondary markers, genes coding for the resistance against herbicides such as phosphinothricin (=glufosinate, BASTA™, Liberty™, encoded by the bar gene), glyphosate (=N-(phosphonomethyl)glycine, Roundup Ready™, encoded by the 5-enolpyruvylshikimate-3-phosphate synthase gene=epsps), sulfonylurea (=Staple™, encoded by the acetolactate synthase gene), imidazolinone[=IMI, imazethapyr, imazamox, Clearfield™, encoded by the acetohydroxyacid synthase (AHAS) gene, also known as acetolactate synthase (ALS) gene] or bromoxynil (=Buctril™, encoded by the oxy gene) or genes coding for antibiotics such as hygromycin or G418 are useful for further selection. Such secondary markers are useful in the case when most genome copies are transformed. In addition negative selection markers such as the bacterial cytosine deaminase (encoded by the codA gene) are also useful for the transformation of plastids.

[0122] To increase the possibility of identification of transformants it is also diserable to use reporter genes other then the aforementioned resistance genes or in addition to said genes. Reporter genes are for example β-galactosidase-, β-glucuronidase-(GUS), alkaline phosphatase- and/or green-fluorescent protein-genes (GFP).

[0123] For the inventive process it is of great advantage that by transforming the plastids the intraspecies specific transgene flow is blocked, because a lot of species such as corn, cotton and rice have a strict maternal inheritance of plastids. By placing the genes specified in table I, columns 5 and 7 or active fragments thereof in the plastids of plants, these genes will not be present in the pollen of said plants. A further preferred embodiment of the invention relates to the use of so called “chloroplast localization sequences”, in which a first RNA sequence or molecule is capable of transporting or “chaperoning” a second RNA sequence, such as a RNA sequence transcribed from the sequences depicted in table I, columns 5 and 7 or a sequence encoding a protein, as depicted in table II, columns 5 and 7, from an external environment inside a cell or outside a plastid into a chloroplast. In one embodiment the chloroplast localization signal is substantially similar or complementary to a complete or intact viroid sequence. The chloroplast localization signal may be encoded by a DNA sequence, which is transcribed into the chloroplast localization RNA. The term “viroid” refers to a naturally occurring single stranded RNA molecule (Flores, C R Acad Sci III. 2001 October; 324(10):943-52). Viroids usually contain about 200-500 nucleotides and generally exist as circular molecules. Examples of viroids that contain chloroplast localization signals include but are not limited to ASBVd, PLMVd, CChMVd and ELVd. The viroid sequence or a functional part of it can be fused to the sequences depicted in table I, columns 5 and 7 or a sequence encoding a protein, as depicted in table II, columns 5 and 7 in such a manner that the viroid sequence transports a sequence transcribed from a sequence as depicted in table I, columns 5 and 7 or a sequence encoding a protein as depicted in table II, columns 5 and 7 into the chloroplasts. A preferred embodiment uses a modified ASBVd (Navarro et al., Virology. 2000 Mar. 1; 268(1):218-25).

[0124] In a further specific embodiment the protein to be expressed in the plastids such as the proteins depicted in table II, columns 5 and 7 are encoded by different nucleic acids. Such a method is disclosed in WO 2004/040973, which shall be incorporated by reference. WO 2004/040973 teaches a method, which relates to the translocation of an RNA corresponding to a gene or gene fragment into the chloroplast by means of a chloroplast localization sequence. The genes, which should be expressed in the plant or plants cells, are split into nucleic acid fragments, which are introduced into different compartments in the plant e.g. the nucleus, the plastids and/or mitochondria. Additionally plant cells are described in which the chloroplast contains a ribozyme fused at one end to an RNA encoding a fragment of a protein used in the inventive process such that the ribozyme can trans-splice the translocated fusion RNA to the RNA encoding the gene fragment to form and as the case may be reunite the nucleic acid fragments to an intact mRNA encoding a functional protein for example as disclosed in table II, columns 5 and 7.

[0125] In a preferred embodiment of the invention the nucleic acid sequences as shown in table I, columns 5 and 7 used in the inventive process are transformed into plastids, which are metabolical active. Those plastids should preferably maintain at a high copy number in the plant or plant tissue of interest, most preferably the chloroplasts found in green plant tissues, such as leaves or cotyledons or in seeds.

[0126] For a good expression in the plastids the nucleic acid sequences as shown in table I, columns 5 and 7 are introduced into an expression cassette using a preferably a promoter and terminator, which are active in plastids preferably a chloroplast promoter. Examples of such promoters include the psbA promoter from the gene from spinach or pea, the rbcL promoter, and the atpB promoter from corn.

[0127] For the purposes of the description of the present invention, the terms “cytoplasmic” and “non-targeted” are exchangable and shall indicate, that the nucleic acid of the invention is expressed without the addition of an non-natural transit peptide encoding sequence. A non-natural transit peptide encoding sequence is a sequence which is not a natural part of a nucleic acid of the invention, e.g. of the nucleic acids depicted in table I column 5 or 7, but is rather added by molecular manipulation steps as for example described in the example under “plastid targeted expression”. Therfore the terms “cytoplasmic” and “non-targeted” shall not exclude a targeted localisation to any cell compartment for the products of the inventive nucleic acid sequences by their naturally occuring sequence properties within the background of the transgenic organism. The subcellular location of the mature polypeptide derived from the enclosed sequences can be predicted by a skilled person for the organism (plant) by using software tools like TargetP (Emanuelsson et al., (2000), Predicting subcellular localization of proteins based on their N-terminal amino acid sequence., J. Mol. Biol. 300, 1005-1016.), ChloroP (Emanuelsson et al. (1999), ChloroP, a neural network-based method for predicting chloroplast transit peptides and their cleavage sites., Protein Science, 8: 978-984.) or other predictive software tools (Emanuelsson et al. (2007), Locating proteins in the cell using TargetP, SignalP, and related tools., Nature Protocols 2, 953-971).

[0128] Comprises/comprising and grammatical variations thereof when used in this specification are to be taken to specify the presence of stated features, integers, steps or components or groups thereof, but not to preclude the presence or addition of one or more other features, integers, steps, components or groups thereof.

[0129] In accordance with the invention, the term “plant cell” or the term “organism” as understood herein relates always to a plant cell or a organelle thereof, preferably a plastid, more preferably chloroplast.

[0130] As used herein, “plant” is meant to include not only a whole plant but also a part thereof i.e., one or more cells, and tissues, including for example, leaves, stems, shoots, roots, flowers, fruits and seeds.

[0131] Surprisingly it was found, that the transgenic expression of the Saccaromyces cerevisiae protein as shown in table II, column 3 and/or the transgenic expression of the E. coli protein as shown in table II, column 3 in a plant and/or the transgenic expression of the Synechocystis sp. protein as shown in table II, column 3 in a plant such as Arabidopsis thaliana for example, conferred transgenic a plant cell, a plant or a part thereof with increased tolerance and/or resistance to environmental stress and increased biomass production as compared to a corresponding non-transformed wild type plant cell, a plant or a part thereof.

[0132] Accordingly, in one embodiment, in case the activity of the Escherichia coli K12 nucleic acid molecule or a polypeptide comprising the nucleic acid SEQ ID NO.: 38 or polypeptide SEQ ID NO.: 39, respectively is increased or generated, e.g. if the activity of a nucleic acid molecule or a polypeptide comprising the nucleic acid or polypeptide or the consensus sequence or the polypeptide motif, as depicted in Table I, II or IV, column 7 in the respective same line as the nucleic acid molecule SEQ ID NO.: 38 or polypeptide SEQ ID NO.: 39, respectively is increased or generated or if the activity “b0081-protein” is increased or generated in an plant cell, plant or part thereof an increase in tolerance and/or resistance to environmental stress and an increase biomass production as compared to a corresponding non-transformed wild type plant cell, a plant or a part thereof is conferred. Accordingly, in one embodiment, in case the activity of the Escherichia coli K12 nucleic acid molecule or a polypeptide comprising the nucleic acid SEQ ID NO.: 54 or polypeptide SEQ ID NO.: 55, respectively is increased or generated, e.g. if the activity of a nucleic acid molecule or a polypeptide comprising the nucleic acid or polypeptide or the consensus sequence or the polypeptide motif, as depicted in Table I, II or IV, column 7 in the respective same line as the nucleic acid molecule SEQ ID NO.: 54 or polypeptide SEQ ID NO.: 55, respectively is increased or generated or if the activity “transporter subunit/periplasmic-binding component of ABC superfamily” is increased or generated in an plant cell, plant or part thereof an increase in tolerance and/or resistance to environmental stress and an increase biomass production as compared to a corresponding non-transformed wild type plant cell, a plant or a part thereof is conferred. Accordingly, in one embodiment, in case the activity of the Escherichia coli K12 nucleic acid molecule or a polypeptide comprising the nucleic acid SEQ ID NO.: 70 or polypeptide SEQ ID NO.: 71, respectively is increased or generated, e.g. if the activity of a nucleic acid molecule or a polypeptide comprising the nucleic acid or polypeptide or the consensus sequence or the polypeptide motif, as depicted in Table I, II or IV, column 7 in the respective same line as the nucleic acid molecule SEQ ID NO.: 70 or polypeptide SEQ ID NO.: 71, respectively is increased or generated or if the activity “b0482-protein” is increased or generated in an plant cell, plant or part thereof an increase in tolerance and/or resistance to environmental stress and an increase biomass production as compared to a corresponding non-transformed wild type plant cell, a plant or a part thereof is conferred. Accordingly, in one embodiment, in case the activity of the Escherichia coli K12 nucleic acid molecule or a polypeptide comprising the nucleic acid SEQ ID NO.: 89 or polypeptide SEQ ID NO.: 90, respectively is increased or generated, e.g. if the activity of a nucleic acid molecule or a polypeptide comprising the nucleic acid or polypeptide or the consensus sequence or the polypeptide motif, as depicted in Table I, II or IV, column 7 in the respective same line as the nucleic acid molecule SEQ ID NO.: 89 or polypeptide SEQ ID NO.: 90, respectively is increased or generated or if the activity “universal stress protein UP12” is increased or generated in an plant cell, plant or part thereof an increase in tolerance and/or resistance to environmental stress and an increase biomass production as compared to a corresponding non-transformed wild type plant cell, a plant or a part thereof is conferred. Accordingly, in one embodiment, in case the activity of the Escherichia coli K12 nucleic acid molecule or a polypeptide comprising the nucleic acid SEQ ID NO.: 143 or polypeptide SEQ ID NO.: 144, respectively is increased or generated, e.g. if the activity of a nucleic acid molecule or a polypeptide comprising the nucleic acid or polypeptide or the consensus sequence or the polypeptide motif, as depicted in Table I, II or IV, column 7 in the respective same line as the nucleic acid molecule SEQ ID NO.: 143 or polypeptide SEQ ID NO.: 144, respectively is increased or generated or if the activity “transcriptional regulator protein” is increased or generated in an plant cell, plant or part thereof an increase in tolerance and/or resistance to environmental stress and an increase biomass production as compared to a corresponding non-transformed wild type plant cell, a plant or a part thereof is conferred. Accordingly, in one embodiment, in case the activity of the Escherichia coli K12 nucleic acid molecule or a polypeptide comprising the nucleic acid SEQ ID NO.: 162 or polypeptide SEQ ID NO.: 163, respectively is increased or generated, e.g. if the activity of a nucleic acid molecule or a polypeptide comprising the nucleic acid or polypeptide or the consensus sequence or the polypeptide motif, as depicted in Table I, II or IV, column 7 in the respective same line as the nucleic acid molecule SEQ ID NO.: 162 or polypeptide SEQ ID NO.: 163, respectively is increased or generated or if the activity “b0631-protein” is increased or generated in an plant cell, plant or part thereof an increase in tolerance and/or resistance to environmental stress and an increase biomass production as compared to a corresponding non-transformed wild type plant cell, a plant or a part thereof is conferred. Accordingly, in one embodiment, in case the activity of the Escherichia coli K12 nucleic acid molecule or a polypeptide comprising the nucleic acid SEQ ID NO.: 213 or polypeptide SEQ ID NO.: 214, respectively is increased or generated, e.g. if the activity of a nucleic acid molecule or a polypeptide comprising the nucleic acid or polypeptide or the consensus sequence or the polypeptide motif, as depicted in Table I, II or IV, column 7 in the respective same line as the nucleic acid molecule SEQ ID NO.: 213 or polypeptide SEQ ID NO.: 214, respectively is increased or generated or if the activity “potassium-transporting ATPase (subunit B)” is increased or generated in an plant cell, plant or part thereof an increase in tolerance and/or resistance to environmental stress and an increase biomass production as compared to a corresponding non-transformed wild type plant cell, a plant or a part thereof is conferred. Accordingly, in one embodiment, in case the activity of the Escherichia coli K12 nucleic acid molecule or a polypeptide comprising the nucleic acid SEQ ID NO.: 358 or polypeptide SEQ ID NO.: 359, respectively is increased or generated, e.g. if the activity of a nucleic acid molecule or a polypeptide comprising the nucleic acid or polypeptide or the consensus sequence or the polypeptide motif, as depicted in Table I, II or IV, column 7 in the respective same line as the nucleic acid molecule SEQ ID NO.: 358 or polypeptide SEQ ID NO.: 359, respectively is increased or generated or if the activity “b0753-protein” is increased or generated in an plant cell, plant or part thereof an increase in tolerance and/or resistance to environmental stress and an increase biomass production as compared to a corresponding non-transformed wild type plant cell, a plant or a part thereof is conferred. Accordingly, in one embodiment, in case the activity of the Escherichia coli K12 nucleic acid molecule or a polypeptide comprising the nucleic acid SEQ ID NO.: 367 or polypeptide SEQ ID NO.: 368, respectively is increased or generated, e.g. if the activity of a nucleic acid molecule or a polypeptide comprising the nucleic acid or polypeptide or the consensus sequence or the polypeptide motif, as depicted in Table I, II or IV, column 7 in the respective same line as the nucleic acid molecule SEQ ID NO.: 367 or polypeptide SEQ ID NO.: 368, respectively is increased or generated or if the activity “threonine and homoserine efflux system” is increased or generated in an plant cell, plant or part thereof an increase in tolerance and/or resistance to environmental stress and an increase biomass production as compared to a corresponding non-transformed wild type plant cell, a plant or a part thereof is conferred. Accordingly, in one embodiment, in case the activity of the Escherichia coli K12 nucleic acid molecule or a polypeptide comprising the nucleic acid SEQ ID NO.: 420 or polypeptide SEQ ID NO.: 421, respectively is increased or generated, e.g. if the activity of a nucleic acid molecule or a polypeptide comprising the nucleic acid or polypeptide or the consensus sequence or the polypeptide motif, as depicted in Table I, II or IV, column 7 in the respective same line as the nucleic acid molecule SEQ ID NO.: 420 or polypeptide SEQ ID NO.: 421, respectively is increased or generated or if the activity “predicted transporter protein” is increased or generated in an plant cell, plant or part thereof an increase in tolerance and/or resistance to environmental stress and an increase biomass production as compared to a corresponding non-transformed wild type plant cell, a plant or a part thereof is conferred. Accordingly, in one embodiment, in case the activity of the Escherichia coli K12 nucleic acid molecule or a polypeptide comprising the nucleic acid SEQ ID NO.: 455 or polypeptide SEQ ID NO.: 456, respectively is increased or generated, e.g. if the activity of a nucleic acid molecule or a polypeptide comprising the nucleic acid or polypeptide or the consensus sequence or the polypeptide motif, as depicted in Table I, II or IV, column 7 in the respective same line as the nucleic acid molecule SEQ ID NO.: 455 or polypeptide SEQ ID NO.: 456, respectively is increased or generated or if the activity “b0866-protein” is increased or generated in an plant cell, plant or part thereof an increase in tolerance and/or resistance to environmental stress and an increase biomass production as compared to a corresponding non-transformed wild type plant cell, a plant or a part thereof is conferred. Accordingly, in one embodiment, in case the activity of the Escherichia coli K12 nucleic acid molecule or a polypeptide comprising the nucleic acid SEQ ID NO.: 535 or polypeptide SEQ ID NO.: 536, respectively is increased or generated, e.g. if the activity of a nucleic acid molecule or a polypeptide comprising the nucleic acid or polypeptide or the consensus sequence or the polypeptide motif, as depicted in Table I, II or IV, column 7 in the respective same line as the nucleic acid molecule SEQ ID NO.: 535 or polypeptide SEQ ID NO.: 536, respectively is increased or generated or if the activity “methylglyoxal synthase” is increased or generated in an plant cell, plant or part thereof an increase in tolerance and/or resistance to environmental stress and an increase biomass production as compared to a corresponding non-transformed wild type plant cell, a plant or a part thereof is conferred. Accordingly, in one embodiment, in case the activity of the Escherichia coli K12 nucleic acid molecule or a polypeptide comprising the nucleic acid SEQ ID NO.: 618 or polypeptide SEQ ID NO.: 619, respectively is increased or generated, e.g. if the activity of a nucleic acid molecule or a polypeptide comprising the nucleic acid or polypeptide or the consensus sequence or the polypeptide motif, as depicted in Table I, II or IV, column 7 in the respective same line as the nucleic acid molecule SEQ ID NO.: 618 or polypeptide SEQ ID NO.: 619, respectively is increased or generated or if the activity “HyaA/HyaB-processing protein” is increased or generated in an plant cell, plant or part thereof an increase in tolerance and/or resistance to environmental stress and an increase biomass production as compared to a corresponding non-transformed wild type plant cell, a plant or a part thereof is conferred. Accordingly, in one embodiment, in case the activity of the Escherichia coli K12 nucleic acid molecule or a polypeptide comprising the nucleic acid SEQ ID NO.: 671 or polypeptide SEQ ID NO.: 672, respectively is increased or generated, e.g. if the activity of a nucleic acid molecule or a polypeptide comprising the nucleic acid or polypeptide or the consensus sequence or the polypeptide motif, as depicted in Table I, II or IV, column 7 in the respective same line as the nucleic acid molecule SEQ ID NO.: 671 or polypeptide SEQ ID NO.: 672, respectively is increased or generated or if the activity “predicted oxidoreductase (flavin:NADH component)” is increased or generated in an plant cell, plant or part thereof an increase in tolerance and/or resistance to environmental stress and an increase biomass production as compared to a corresponding non-transformed wild type plant cell, a plant or a part thereof is conferred. Accordingly, in one embodiment, in case the activity of the Escherichia coli K12 nucleic acid molecule or a polypeptide comprising the nucleic acid SEQ ID NO.: 764 or polypeptide SEQ ID NO.: 765, respectively is increased or generated, e.g. if the activity of a nucleic acid molecule or a polypeptide comprising the nucleic acid or polypeptide or the consensus sequence or the polypeptide motif, as depicted in Table I, II or IV, column 7 in the respective same line as the nucleic acid molecule SEQ ID NO.: 764 or polypeptide SEQ ID NO.: 765, respectively is increased or generated or if the activity “b1052-protein” is increased or generated in an plant cell, plant or part thereof an increase in tolerance and/or resistance to environmental stress and an increase biomass production as compared to a corresponding non-transformed wild type plant cell, a plant or a part thereof is conferred. Accordingly, in one embodiment, in case the activity of the Escherichia coli K12 nucleic acid molecule or a polypeptide comprising the nucleic acid SEQ ID NO.: 768 or polypeptide SEQ ID NO.: 769, respectively is increased or generated, e.g. if the activity of a nucleic acid molecule or a polypeptide comprising the nucleic acid or polypeptide or the consensus sequence or the polypeptide motif, as depicted in Table I, II or IV, column 7 in the respective same line as the nucleic acid molecule SEQ ID NO.: 768 or polypeptide SEQ ID NO.: 769, respectively is increased or generated or if the activity “3-oxoacyl-(acyl carrier protein) synthase” is increased or generated in an plant cell, plant or part thereof an increase in tolerance and/or resistance to environmental stress and an increase biomass production as compared to a corresponding non-transformed wild type plant cell, a plant or a part thereof is conferred. Accordingly, in one embodiment, in case the activity of the Escherichia coli K12 nucleic acid molecule or a polypeptide comprising the nucleic acid SEQ ID NO.: 907 or polypeptide SEQ ID NO.: 908, respectively is increased or generated, e.g. if the activity of a nucleic acid molecule or a polypeptide comprising the nucleic acid or polypeptide or the consensus sequence or the polypeptide motif, as depicted in Table I, II or IV, column 7 in the respective same line as the nucleic acid molecule SEQ ID NO.: 907 or polypeptide SEQ ID NO.: 908, respectively is increased or generated or if the activity “b1161-protein” is increased or generated in an plant cell, plant or part thereof an increase in tolerance and/or resistance to environmental stress and an increase biomass production as compared to a corresponding non-transformed wild type plant cell, a plant or a part thereof is conferred. Accordingly, in one embodiment, in case the activity of the Escherichia coli K12 nucleic acid molecule or a polypeptide comprising the nucleic acid SEQ ID NO.: 927 or polypeptide SEQ ID NO.: 928, respectively is increased or generated, e.g. if the activity of a nucleic acid molecule or a polypeptide comprising the nucleic acid or polypeptide or the consensus sequence or the polypeptide motif, as depicted in Table I, II or IV, column 7 in the respective same line as the nucleic acid molecule SEQ ID NO.: 927 or polypeptide SEQ ID NO.: 928, respectively is increased or generated or if the activity “sodium/proton antiporter” is increased or generated in an plant cell, plant or part thereof an increase in tolerance and/or resistance to environmental stress and an increase biomass production as compared to a corresponding non-transformed wild type plant cell, a plant or a part thereof is conferred. Accordingly, in one embodiment, in case the activity of the Escherichia coli K12 nucleic acid molecule or a polypeptide comprising the nucleic acid SEQ ID NO.: 1009 or polypeptide SEQ ID NO.: 1010, respectively is increased or generated, e.g. if the activity of a nucleic acid molecule or a polypeptide comprising the nucleic acid or polypeptide or the consensus sequence or the polypeptide motif, as depicted in Table I, II or IV, column 7 in the respective same line as the nucleic acid molecule SEQ ID NO.: 1009 or polypeptide SEQ ID NO.: 1010, respectively is increased or generated or if the activity “predicted antimicrobial peptide transporter subunit” is increased or generated in an plant cell, plant or part thereof an increase in tolerance and/or resistance to environmental stress and an increase biomass production as compared to a corresponding non-transformed wild type plant cell, a plant or a part thereof is conferred. Accordingly, in one embodiment, in case the activity of the Escherichia coli K12 nucleic acid molecule or a polypeptide comprising the nucleic acid SEQ ID NO.: 1154 or polypeptide SEQ ID NO.: 1155, respectively is increased or generated, e.g. if the activity of a nucleic acid molecule or a polypeptide comprising the nucleic acid or polypeptide or the consensus sequence or the polypeptide motif, as depicted in Table I, II or IV, column 7 in the respective same line as the nucleic acid molecule SEQ ID NO.: 1154 or polypeptide SEQ ID NO.: 1155, respectively is increased or generated or if the activity “predicted antimicrobial peptide transporter subunit” is increased or generated in an plant cell, plant or part thereof an increase in tolerance and/or resistance to environmental stress and an increase biomass production as compared to a corresponding non-transformed wild type plant cell, a plant or a part thereof is conferred. Accordingly, in one embodiment, in case the activity of the Escherichia coli K12 nucleic acid molecule or a polypeptide comprising the nucleic acid SEQ ID NO.: 1308 or polypeptide SEQ ID NO.: 1309, respectively is increased or generated, e.g. if the activity of a nucleic acid molecule or a polypeptide comprising the nucleic acid or polypeptide or the consensus sequence or the polypeptide motif, as depicted in Table I, II or IV, column 7 in the respective same line as the nucleic acid molecule SEQ ID NO.: 1308 or polypeptide SEQ ID NO.: 1309, respectively is increased or generated or if the activity “b1423-protein” is increased or generated in an plant cell, plant or part thereof an increase in tolerance and/or resistance to environmental stress and an increase biomass production as compared to a corresponding non-transformed wild type plant cell, a plant or a part thereof is conferred. Accordingly, in one embodiment, in case the activity of the Escherichia coli K12 nucleic acid molecule or a polypeptide comprising the nucleic acid SEQ ID NO.: 1368 or polypeptide SEQ ID NO.: 1369, respectively is increased or generated, e.g. if the activity of a nucleic acid molecule or a polypeptide comprising the nucleic acid or polypeptide or the consensus sequence or the polypeptide motif, as depicted in Table I, II or IV, column 7 in the respective same line as the nucleic acid molecule SEQ ID NO.: 1368 or polypeptide SEQ ID NO.: 1369, respectively is increased or generated or if the activity “acid shock protein precursor” is increased or generated in an plant cell, plant or part thereof an increase in tolerance and/or resistance to environmental stress and an increase biomass production as compared to a corresponding non-transformed wild type plant cell, a plant or a part thereof is conferred. Accordingly, in one embodiment, in case the activity of the Escherichia coli K12 nucleic acid molecule or a polypeptide comprising the nucleic acid SEQ ID NO.: 1374 or polypeptide SEQ ID NO.: 1375, respectively is increased or generated, e.g. if the activity of a nucleic acid molecule or a polypeptide comprising the nucleic acid or polypeptide or the consensus sequence or the polypeptide motif, as depicted in Table I, II or IV, column 7 in the respective same line as the nucleic acid molecule SEQ ID NO.: 1374 or polypeptide SEQ ID NO.: 1375, respectively is increased or generated or if the activity “predicted arginine/ornithine transporter” is increased or generated in an plant cell, plant or part thereof an increase in tolerance and/or resistance to environmental stress and an increase biomass production as compared to a corresponding non-transformed wild type plant cell, a plant or a part thereof is conferred. Accordingly, in one embodiment, in case the activity of the Escherichia coli K12 nucleic acid molecule or a polypeptide comprising the nucleic acid SEQ ID NO.: 1507 or polypeptide SEQ ID NO.: 1508, respectively is increased or generated, e.g. if the activity of a nucleic acid molecule or a polypeptide comprising the nucleic acid or polypeptide or the consensus sequence or the polypeptide motif, as depicted in Table I, II or IV, column 7 in the respective same line as the nucleic acid molecule SEQ ID NO.: 1507 or polypeptide SEQ ID NO.: 1508, respectively is increased or generated or if the activity “3-deoxy-D-arabino-heptulosonate-7-phosphatesynthase” is increased or generated in an plant cell, plant or part thereof an increase in tolerance and/or resistance to environmental stress and an increase biomass production as compared to a corresponding non-transformed wild type plant cell, a plant or a part thereof is conferred. Accordingly, in one embodiment, in case the activity of the Escherichia coli K12 nucleic acid molecule or a polypeptide comprising the nucleic acid SEQ ID NO.: 1953 or polypeptide SEQ ID NO.: 1954, respectively is increased or generated, e.g. if the activity of a nucleic acid molecule or a polypeptide comprising the nucleic acid or polypeptide or the consensus sequence or the polypeptide motif, as depicted in Table I, II or IV, column 7 in the respective same line as the nucleic acid molecule SEQ ID NO.: 1953 or polypeptide SEQ ID NO.: 1954, respectively is increased or generated or if the activity “N,N′-diacetylchitobiose-specific enzyme IIA component of PTS” is increased or generated in an plant cell, plant or part thereof an increase in tolerance and/or resistance to environmental stress and an increase biomass production as compared to a corresponding non-transformed wild type plant cell, a plant or a part thereof is conferred. Accordingly, in one embodiment, in case the activity of the Escherichia coli K12 nucleic acid molecule or a polypeptide comprising the nucleic acid SEQ ID NO.: 2156 or polypeptide SEQ ID NO.: 2157, respectively is increased or generated, e.g. if the activity of a nucleic acid molecule or a polypeptide comprising the nucleic acid or polypeptide or the consensus sequence or the polypeptide motif, as depicted in Table I, II or IV, column 7 in the respective same line as the nucleic acid molecule SEQ ID NO.: 2156 or polypeptide SEQ ID NO.: 2157, respectively is increased or generated or if the activity “neutral amino-acid efflux system” is increased or generated in an plant cell, plant or part thereof an increase in tolerance and/or resistance to environmental stress and an increase biomass production as compared to a corresponding non-transformed wild type plant cell, a plant or a part thereof is conferred. Accordingly, in one embodiment, in case the activity of the Escherichia coli K12 nucleic acid molecule or a polypeptide comprising the nucleic acid SEQ ID NO.: 2195 or polypeptide SEQ ID NO.: 2196, respectively is increased or generated, e.g. if the activity of a nucleic acid molecule or a polypeptide comprising the nucleic acid or polypeptide or the consensus sequence or the polypeptide motif, as depicted in Table I, II or IV, column 7 in the respective same line as the nucleic acid molecule SEQ ID NO.: 2195 or polypeptide SEQ ID NO.: 2196, respectively is increased or generated or if the activity “b1878-protein” is increased or generated in an plant cell, plant or part thereof an increase in tolerance and/or resistance to environmental stress and an increase biomass production as compared to a corresponding non-transformed wild type plant cell, a plant or a part thereof is conferred. Accordingly, in one embodiment, in case the activity of the Escherichia coli K12 nucleic acid molecule or a polypeptide comprising the nucleic acid SEQ ID NO.: 2219 or polypeptide SEQ ID NO.: 2220, respectively is increased or generated, e.g. if the activity of a nucleic acid molecule or a polypeptide comprising the nucleic acid or polypeptide or the consensus sequence or the polypeptide motif, as depicted in Table I, II or IV, column 7 in the respective same line as the nucleic acid molecule SEQ ID NO.: 2219 or polypeptide SEQ ID NO.: 2220, respectively is increased or generated or if the activity “L-arabinose transporter subunit” is increased or generated in an plant cell, plant or part thereof an increase in tolerance and/or resistance to environmental stress and an increase biomass production as compared to a corresponding non-transformed wild type plant cell, a plant or a part thereof is conferred. Accordingly, in one embodiment, in case the activity of the Escherichia coli K12 nucleic acid molecule or a polypeptide comprising the nucleic acid SEQ ID NO.: 2277 or polypeptide SEQ ID NO.: 2278, respectively is increased or generated, e.g. if the activity of a nucleic acid molecule or a polypeptide comprising the nucleic acid or polypeptide or the consensus sequence or the polypeptide motif, as depicted in Table I, II or IV, column 7 in the respective same line as the nucleic acid molecule SEQ ID NO.: 2277 or polypeptide SEQ ID NO.: 2278, respectively is increased or generated or if the activity “phosphatidylglycerophosphate synthetase” is increased or generated in an plant cell, plant or part thereof an increase in tolerance and/or resistance to environmental stress and an increase biomass production as compared to a corresponding non-transformed wild type plant cell, a plant or a part thereof is conferred. Accordingly, in one embodiment, in case the activity of the Escherichia coli K12 nucleic acid molecule or a polypeptide comprising the nucleic acid SEQ ID NO.: 2470 or polypeptide SEQ ID NO.: 2471, respectively is increased or generated, e.g. if the activity of a nucleic acid molecule or a polypeptide comprising the nucleic acid or polypeptide or the consensus sequence or the polypeptide motif, as depicted in Table I, II or IV, column 7 in the respective same line as the nucleic acid molecule SEQ ID NO.: 2470 or polypeptide SEQ ID NO.: 2471, respectively is increased or generated or if the activity “regulator of length of O-antigen component of lipopolysaccharide chains” is increased or generated in an plant cell, plant or part thereof an increase in tolerance and/or resistance to environmental stress and an increase biomass production as compared to a corresponding non-transformed wild type plant cell, a plant or a part thereof is conferred. Accordingly, in one embodiment, in case the activity of the Escherichia coli K12 nucleic acid molecule or a polypeptide comprising the nucleic acid SEQ ID NO.: 2493 or polypeptide SEQ ID NO.: 2494, respectively is increased or generated, e.g. if the activity of a nucleic acid molecule or a polypeptide comprising the nucleic acid or polypeptide or the consensus sequence or the polypeptide motif, as depicted in Table I, II or IV, column 7 in the respective same line as the nucleic acid molecule SEQ ID NO.: 2493 or polypeptide SEQ ID NO.: 2494, respectively is increased or generated or if the activity “glucose-1-phosphate thymidylyltransferase” is increased or generated in an plant cell, plant or part thereof an increase in tolerance and/or resistance to environmental stress and an increase biomass production as compared to a corresponding non-transformed wild type plant cell, a plant or a part thereof is conferred. Accordingly, in one embodiment, in case the activity of the Escherichia coli K12 nucleic acid molecule or a polypeptide comprising the nucleic acid SEQ ID NO.: 2627 or polypeptide SEQ ID NO.: 2628, respectively is increased or generated, e.g. if the activity of a nucleic acid molecule or a polypeptide comprising the nucleic acid or polypeptide or the consensus sequence or the polypeptide motif, as depicted in Table I, II or IV, column 7 in the respective same line as the nucleic acid molecule SEQ ID NO.: 2627 or polypeptide SEQ ID NO.: 2628, respectively is increased or generated or if the activity “multidrug efflux system (subunit B)” is increased or generated in an plant cell, plant or part thereof an increase in tolerance and/or resistance to environmental stress and an increase biomass production as compared to a corresponding non-transformed wild type plant cell, a plant or a part thereof is conferred. Accordingly, in one embodiment, in case the activity of the Escherichia coli K12 nucleic acid molecule or a polypeptide comprising the nucleic acid SEQ ID NO.: 2858 or polypeptide SEQ ID NO.: 2859, respectively is increased or generated, e.g. if the activity of a nucleic acid molecule or a polypeptide comprising the nucleic acid or polypeptide or the consensus sequence or the polypeptide motif, as depicted in Table I, II or IV, column 7 in the respective same line as the nucleic acid molecule SEQ ID NO.: 2858 or polypeptide SEQ ID NO.: 2859, respectively is increased or generated or if the activity “GTP cyclohydrolase I” is increased or generated in an plant cell, plant or part thereof an increase in tolerance and/or resistance to environmental stress and an increase biomass production as compared to a corresponding non-transformed wild type plant cell, a plant or a part thereof is conferred. Accordingly, in one embodiment, in case the activity of the Escherichia coli K12 nucleic acid molecule or a polypeptide comprising the nucleic acid SEQ ID NO.: 2942 or polypeptide SEQ ID NO.: 2943, respectively is increased or generated, e.g. if the activity of a nucleic acid molecule or a polypeptide comprising the nucleic acid or polypeptide or the consensus sequence or the polypeptide motif, as depicted in Table I, II or IV, column 7 in the respective same line as the nucleic acid molecule SEQ ID NO.: 2942 or polypeptide SEQ ID NO.: 2943, respectively is increased or generated or if the activity “heme lyase (CcmH subunit)” is increased or generated in an plant cell, plant or part thereof an increase in tolerance and/or resistance to environmental stress and an increase biomass production as compared to a corresponding non-transformed wild type plant cell, a plant or a part thereof is conferred. Accordingly, in one embodiment, in case the activity of the Escherichia coli K12 nucleic acid molecule or a polypeptide comprising the nucleic acid SEQ ID NO.: 2965 or polypeptide SEQ ID NO.: 2966, respectively is increased or generated, e.g. if the activity of a nucleic acid molecule or a polypeptide comprising the nucleic acid or polypeptide or the consensus sequence or the polypeptide motif, as depicted in Table I, II or IV, column 7 in the respective same line as the nucleic acid molecule SEQ ID NO.: 2965 or polypeptide SEQ ID NO.: 2966, respectively is increased or generated or if the activity “b2226-protein” is increased or generated in an plant cell, plant or part thereof an increase in tolerance and/or resistance to environmental stress and an increase biomass production as compared to a corresponding non-transformed wild type plant cell, a plant or a part thereof is conferred. Accordingly, in one embodiment, in case the activity of the Escherichia coli K12 nucleic acid molecule or a polypeptide comprising the nucleic acid SEQ ID NO.: 2981 or polypeptide SEQ ID NO.: 2982, respectively is increased or generated, e.g. if the activity of a nucleic acid molecule or a polypeptide comprising the nucleic acid or polypeptide or the consensus sequence or the polypeptide motif, as depicted in Table I, II or IV, column 7 in the respective same line as the nucleic acid molecule SEQ ID NO.: 2981 or polypeptide SEQ ID NO.: 2982, respectively is increased or generated or if the activity “histidine/lysine/arginine/ornithine transporter subunit protein” is increased or generated in an plant cell, plant or part thereof an increase in tolerance and/or resistance to environmental stress and an increase biomass production as compared to a corresponding non-transformed wild type plant cell, a plant or a part thereof is conferred. Accordingly, in one embodiment, in case the activity of the Escherichia coli K12 nucleic acid molecule or a polypeptide comprising the nucleic acid SEQ ID NO.: 3130 or polypeptide SEQ ID NO.: 3131, respectively is increased or generated, e.g. if the activity of a nucleic acid molecule or a polypeptide comprising the nucleic acid or polypeptide or the consensus sequence or the polypeptide motif, as depicted in Table I, II or IV, column 7 in the respective same line as the nucleic acid molecule SEQ ID NO.: 3130 or polypeptide SEQ ID NO.: 3131, respectively is increased or generated or if the activity “sensory histidine kinase in two-component regulatory system with NarP (NarL)” is increased or generated in an plant cell, plant or part thereof an increase in tolerance and/or resistance to environmental stress and an increase biomass production as compared to a corresponding non-transformed wild type plant cell, a plant or a part thereof is conferred. Accordingly, in one embodiment, in case the activity of the Escherichia coli K12 nucleic acid molecule or a polypeptide comprising the nucleic acid SEQ ID NO.: 3216 or polypeptide SEQ ID NO.: 3217, respectively is increased or generated, e.g. if the activity of a nucleic acid molecule or a polypeptide comprising the nucleic acid or polypeptide or the consensus sequence or the polypeptide motif, as depicted in Table I, II or IV, column 7 in the respective same line as the nucleic acid molecule SEQ ID NO.: 3216 or polypeptide SEQ ID NO.: 3217, respectively is increased or generated or if the activity “b2475-protein” is increased or generated in an plant cell, plant or part thereof an increase in tolerance and/or resistance to environmental stress and an increase biomass production as compared to a corresponding non-transformed wild type plant cell, a plant or a part thereof is conferred. Accordingly, in one embodiment, in case the activity of the Escherichia coli K12 nucleic acid molecule or a polypeptide comprising the nucleic acid SEQ ID NO.: 3335 or polypeptide SEQ ID NO.: 3336, respectively is increased or generated, e.g. if the activity of a nucleic acid molecule or a polypeptide comprising the nucleic acid or polypeptide or the consensus sequence or the polypeptide motif, as depicted in Table I, II or IV, column 7 in the respective same line as the nucleic acid molecule SEQ ID NO.: 3335 or polypeptide SEQ ID NO.: 3336, respectively is increased or generated or if the activity “NADH dehydrogenase (subunit N)” is increased or generated in an plant cell, plant or part thereof an increase in tolerance and/or resistance to environmental stress and an increase biomass production as compared to a corresponding non-transformed wild type plant cell, a plant or a part thereof is conferred. Accordingly, in one embodiment, in case the activity of the Escherichia coli K12 nucleic acid molecule or a polypeptide comprising the nucleic acid SEQ ID NO.: 3401 or polypeptide SEQ ID NO.: 3402, respectively is increased or generated, e.g. if the activity of a nucleic acid molecule or a polypeptide comprising the nucleic acid or polypeptide or the consensus sequence or the polypeptide motif, as depicted in Table I, II or IV, column 7 in the respective same line as the nucleic acid molecule SEQ ID NO.: 3401 or polypeptide SEQ ID NO.: 3402, respectively is increased or generated or if the activity “2,3-dihydroxy-2,3-dihydrophenylpropionatedehydrogenase” is increased or generated in an plant cell, plant or part thereof an increase in tolerance and/or resistance to environmental stress and an increase biomass production as compared to a corresponding non-transformed wild type plant cell, a plant or a part thereof is conferred. Accordingly, in one embodiment, in case the activity of the Escherichia coli K12 nucleic acid molecule or a polypeptide comprising the nucleic acid SEQ ID NO.: 3590 or polypeptide SEQ ID NO.: 3591, respectively is increased or generated, e.g. if the activity of a nucleic acid molecule or a polypeptide comprising the nucleic acid or polypeptide or the consensus sequence or the polypeptide motif, as depicted in Table I, II or IV, column 7 in the respective same line as the nucleic acid molecule SEQ ID NO.: 3590 or polypeptide SEQ ID NO.: 3591, respectively is increased or generated or if the activity “tRNA-specific adenosine deaminase” is increased or generated in an plant cell, plant or part thereof an increase in tolerance and/or resistance to environmental stress and an increase biomass production as compared to a corresponding non-transformed wild type plant cell, a plant or a part thereof is conferred. Accordingly, in one embodiment, in case the activity of the Escherichia coli K12 nucleic acid molecule or a polypeptide comprising the nucleic acid SEQ ID NO.: 3831 or polypeptide SEQ ID NO.: 3832, respectively is increased or generated, e.g. if the activity of a nucleic acid molecule or a polypeptide comprising the nucleic acid or polypeptide or the consensus sequence or the polypeptide motif, as depicted in Table I, II or IV, column 7 in the respective same line as the nucleic acid molecule SEQ ID NO.: 3831 or polypeptide SEQ ID NO.: 3832, respectively is increased or generated or if the activity “predicted outer membrane lipoprotein” is increased or generated in an plant cell, plant or part thereof an increase in tolerance and/or resistance to environmental stress and an increase biomass production as compared to a corresponding non-transformed wild type plant cell, a plant or a part thereof is conferred. Accordingly, in one embodiment, in case the activity of the Escherichia coli K12 nucleic acid molecule or a polypeptide comprising the nucleic acid SEQ ID NO.: 3857 or polypeptide SEQ ID NO.: 3858, respectively is increased or generated, e.g. if the activity of a nucleic acid molecule or a polypeptide comprising the nucleic acid or polypeptide or the consensus sequence or the polypeptide motif, as depicted in Table I, II or IV, column 7 in the respective same line as the nucleic acid molecule SEQ ID NO.: 3857 or polypeptide SEQ ID NO.: 3858, respectively is increased or generated or if the activity “CP4-57 prophage/RNase LS” is increased or generated in an plant cell, plant or part thereof an increase in tolerance and/or resistance to environmental stress and an increase biomass production as compared to a corresponding non-transformed wild type plant cell, a plant or a part thereof is conferred. Accordingly, in one embodiment, in case the activity of the Escherichia coli K12 nucleic acid molecule or a polypeptide comprising the nucleic acid SEQ ID NO.: 3861 or polypeptide SEQ ID NO.: 3862, respectively is increased or generated, e.g. if the activity of a nucleic acid molecule or a polypeptide comprising the nucleic acid or polypeptide or the consensus sequence or the polypeptide motif, as depicted in Table I, II or IV, column 7 in the respective same line as the nucleic acid molecule SEQ ID NO.: 3861 or polypeptide SEQ ID NO.: 3862, respectively is increased or generated or if the activity “glycine betaine transporter subunit protein” is increased or generated in an plant cell, plant or part thereof an increase in tolerance and/or resistance to environmental stress and an increase biomass production as compared to a corresponding non-transformed wild type plant cell, a plant or a part thereof is conferred. Accordingly, in one embodiment, in case the activity of the Escherichia coli K12 nucleic acid molecule or a polypeptide comprising the nucleic acid SEQ ID NO.: 4022 or polypeptide SEQ ID NO.: 4023, respectively is increased or generated, e.g. if the activity of a nucleic acid molecule or a polypeptide comprising the nucleic acid or polypeptide or the consensus sequence or the polypeptide motif, as depicted in Table I, II or IV, column 7 in the respective same line as the nucleic acid molecule SEQ ID NO.: 4022 or polypeptide SEQ ID NO.: 4023, respectively is increased or generated or if the activity “cellobiose/arbutin/salicin-specific PTS enzyme (IIB component/IC component)” is increased or generated in an plant cell, plant or part thereof an increase in tolerance and/or resistance to environmental stress and an increase biomass production as compared to a corresponding non-transformed wild type plant cell, a plant or a part thereof is conferred. Accordingly, in one embodiment, in case the activity of the Escherichia coli K12 nucleic acid molecule or a polypeptide comprising the nucleic acid SEQ ID NO.: 4059 or polypeptide SEQ ID NO.: 4060, respectively is increased or generated, e.g. if the activity of a nucleic acid molecule or a polypeptide comprising the nucleic acid or polypeptide or the consensus sequence or the polypeptide motif, as depicted in Table I, II or IV, column 7 in the respective same line as the nucleic acid molecule SEQ ID NO.: 4059 or polypeptide SEQ ID NO.: 4060, respectively is increased or generated or if the activity “predicted kinase” is increased or generated in an plant cell, plant or part thereof an increase in tolerance and/or resistance to environmental stress and an increase biomass production as compared to a corresponding non-transformed wild type plant cell, a plant or a part thereof is conferred. Accordingly, in one embodiment, in case the activity of the Escherichia coli K12 nucleic acid molecule or a polypeptide comprising the nucleic acid SEQ ID NO.: 4076 or polypeptide SEQ ID NO.: 4077, respectively is increased or generated, e.g. if the activity of a nucleic acid molecule or a polypeptide comprising the nucleic acid or polypeptide or the consensus sequence or the polypeptide motif, as depicted in Table I, II or IV, column 7 in the respective same line as the nucleic acid molecule SEQ ID NO.: 4076 or polypeptide SEQ ID NO.: 4077, respectively is increased or generated or if the activity “tRNA pseudouridine synthase” is increased or generated in an plant cell, plant or part thereof an increase in tolerance and/or resistance to environmental stress and an increase biomass production as compared to a corresponding non-transformed wild type plant cell, a plant or a part thereof is conferred. Accordingly, in one embodiment, in case the activity of the Escherichia coli K12 nucleic acid molecule or a polypeptide comprising the nucleic acid SEQ ID NO.: 4157 or polypeptide SEQ ID NO.: 4158, respectively is increased or generated, e.g. if the activity of a nucleic acid molecule or a polypeptide comprising the nucleic acid or polypeptide or the consensus sequence or the polypeptide motif, as depicted in Table I, II or IV, column 7 in the respective same line as the nucleic acid molecule SEQ ID NO.: 4157 or polypeptide SEQ ID NO.: 4158, respectively is increased or generated or if the activity “predicted ligase” is increased or generated in an plant cell, plant or part thereof an increase in tolerance and/or resistance to environmental stress and an increase biomass production as compared to a corresponding non-transformed wild type plant cell, a plant or a part thereof is conferred. Accordingly, in one embodiment, in case the activity of the Escherichia coli K12 nucleic acid molecule or a polypeptide comprising the nucleic acid SEQ ID NO.: 4260 or polypeptide SEQ ID NO.: 4261, respectively is increased or generated, e.g. if the activity of a nucleic acid molecule or a polypeptide comprising the nucleic acid or polypeptide or the consensus sequence or the polypeptide motif, as depicted in Table I, II or IV, column 7 in the respective same line as the nucleic acid molecule SEQ ID NO.: 4260 or polypeptide SEQ ID NO.: 4261, respectively is increased or generated or if the activity “ornithine decarboxylase” is increased or generated in an plant cell, plant or part thereof an increase in tolerance and/or resistance to environmental stress and an increase biomass production as compared to a corresponding non-transformed wild type plant cell, a plant or a part thereof is conferred. Accordingly, in one embodiment, in case the activity of the Escherichia coli K12 nucleic acid molecule or a polypeptide comprising the nucleic acid SEQ ID NO.: 4350 or polypeptide SEQ ID NO.: 4351, respectively is increased or generated, e.g. if the activity of a nucleic acid molecule or a polypeptide comprising the nucleic acid or polypeptide or the consensus sequence or the polypeptide motif, as depicted in Table I, II or IV, column 7 in the respective same line as the nucleic acid molecule SEQ ID NO.: 4350 or polypeptide SEQ ID NO.: 4351, respectively is increased or generated or if the activity “phosphate transporter” is increased or generated in an plant cell, plant or part thereof an increase in tolerance and/or resistance to environmental stress and an increase biomass production as compared to a corresponding non-transformed wild type plant cell, a plant or a part thereof is conferred. Accordingly, in one embodiment, in case the activity of the Escherichia coli K12 nucleic acid molecule or a polypeptide comprising the nucleic acid SEQ ID NO.: 4350 or polypeptide SEQ ID NO.: 4351, respectively is increased or generated, e.g. if the activity of a nucleic acid molecule or a polypeptide comprising the nucleic acid or polypeptide or the consensus sequence or the polypeptide motif, as depicted in Table I, II or IV, column 7 in the respective same line as the nucleic acid molecule SEQ ID NO.: 4350 or polypeptide SEQ ID NO.: 4351, respectively is increased or generated or if the activity “phosphate transporter” is increased or generated in an plant cell, plant or part thereof an increase in tolerance and/or resistance to environmental stress and an increase biomass production as compared to a corresponding non-transformed wild type plant cell, a plant or a part thereof is conferred. Accordingly, in one embodiment, in case the activity of the Escherichia coli K12 nucleic acid molecule or a polypeptide comprising the nucleic acid SEQ ID NO.: 4459 or polypeptide SEQ ID NO.: 4460, respectively is increased or generated, e.g. if the activity of a nucleic acid molecule or a polypeptide comprising the nucleic acid or polypeptide or the consensus sequence or the polypeptide motif, as depicted in Table I, II or IV, column 7 in the respective same line as the nucleic acid molecule SEQ ID NO.: 4459 or polypeptide SEQ ID NO.: 4460, respectively is increased or generated or if the activity “hexuronate transporter” is increased or generated in an plant cell, plant or part thereof an increase in tolerance and/or resistance to environmental stress and an increase biomass production as compared to a corresponding non-transformed wild type plant cell, a plant or a part thereof is conferred. Accordingly, in one embodiment, in case the activity of the Escherichia coli K12 nucleic acid molecule or a polypeptide comprising the nucleic acid SEQ ID NO.: 4505 or polypeptide SEQ ID NO.: 4506, respectively is increased or generated, e.g. if the activity of a nucleic acid molecule or a polypeptide comprising the nucleic acid or polypeptide or the consensus sequence or the polypeptide motif, as depicted in Table I, II or IV, column 7 in the respective same line as the nucleic acid molecule SEQ ID NO.: 4505 or polypeptide SEQ ID NO.: 4506, respectively is increased or generated or if the activity “peptidyl-prolyl cis-trans isomerase A (rotamase A)” is increased or generated in an plant cell, plant or part thereof an increase in tolerance and/or resistance to environmental stress and an increase biomass production as compared to a corresponding non-transformed wild type plant cell, a plant or a part thereof is conferred. Accordingly, in one embodiment, in case the activity of the Escherichia coli K12 nucleic acid molecule or a polypeptide comprising the nucleic acid SEQ ID NO.: 4640 or polypeptide SEQ ID NO.: 4641, respectively is increased or generated, e.g. if the activity of a nucleic acid molecule or a polypeptide comprising the nucleic acid or polypeptide or the consensus sequence or the polypeptide motif, as depicted in Table I, II or IV, column 7 in the respective same line as the nucleic acid molecule SEQ ID NO.: 4640 or polypeptide SEQ ID NO.: 4641, respectively is increased or generated or if the activity “glycogen synthase” is increased or generated in an plant cell, plant or part thereof an increase in tolerance and/or resistance to environmental stress and an increase biomass production as compared to a corresponding non-transformed wild type plant cell, a plant or a part thereof is conferred. Accordingly, in one embodiment, in case the activity of the Escherichia coli K12 nucleic acid molecule or a polypeptide comprising the nucleic acid SEQ ID NO.: 4806 or polypeptide SEQ ID NO.: 4807, respectively is increased or generated, e.g. if the activity of a nucleic acid molecule or a polypeptide comprising the nucleic acid or polypeptide or the consensus sequence or the polypeptide motif, as depicted in Table I, II or IV, column 7 in the respective same line as the nucleic acid molecule SEQ ID NO.: 4806 or polypeptide SEQ ID NO.: 4807, respectively is increased or generated or if the activity “D-xylose transporter subunit” is increased or generated in an plant cell, plant or part thereof an increase in tolerance and/or resistance to environmental stress and an increase biomass production as compared to a corresponding non-transformed wild type plant cell, a plant or a part thereof is conferred. Accordingly, in one embodiment, in case the activity of the Escherichia coli K12 nucleic acid molecule or a polypeptide comprising the nucleic acid SEQ ID NO.: 5124 or polypeptide SEQ ID NO.: 5125, respectively is increased or generated, e.g. if the activity of a nucleic acid molecule or a polypeptide comprising the nucleic acid or polypeptide or the consensus sequence or the polypeptide motif, as depicted in Table I, II or IV, column 7 in the respective same line as the nucleic acid molecule SEQ ID NO.: 5124 or polypeptide SEQ ID NO.: 5125, respectively is increased or generated or if the activity “L-threonine 3-dehydrogenase” is increased or generated in an plant cell, plant or part thereof an increase in tolerance and/or resistance to environmental stress and an increase biomass production as compared to a corresponding non-transformed wild type plant cell, a plant or a part thereof is conferred. Accordingly, in one embodiment, in case the activity of the Escherichia coli K12 nucleic acid molecule or a polypeptide comprising the nucleic acid SEQ ID NO.: 5124 or polypeptide SEQ ID NO.: 5125, respectively is increased or generated, e.g. if the activity of a nucleic acid molecule or a polypeptide comprising the nucleic acid or polypeptide or the consensus sequence or the polypeptide motif, as depicted in Table I, II or IV, column 7 in the respective same line as the nucleic acid molecule SEQ ID NO.: 5124 or polypeptide SEQ ID NO.: 5125, respectively is increased or generated or if the activity “L-threonine 3-dehydrogenase” is increased or generated in an plant cell, plant or part thereof an increase in tolerance and/or resistance to environmental stress and an increase biomass production as compared to a corresponding non-transformed wild type plant cell, a plant or a part thereof is conferred. Accordingly, in one embodiment, in case the activity of the Escherichia coli K12 nucleic acid molecule or a polypeptide comprising the nucleic acid SEQ ID NO.: 5417 or polypeptide SEQ ID NO.: 5418, respectively is increased or generated, e.g. if the activity of a nucleic acid molecule or a polypeptide comprising the nucleic acid or polypeptide or the consensus sequence or the polypeptide motif, as depicted in Table I, II or IV, column 7 in the respective same line as the nucleic acid molecule SEQ ID NO.: 5417 or polypeptide SEQ ID NO.: 5418, respectively is increased or generated or if the activity “predicted hydrolase” is increased or generated in an plant cell, plant or part thereof an increase in tolerance and/or resistance to environmental stress and an increase biomass production as compared to a corresponding non-transformed wild type plant cell, a plant or a part thereof is conferred. Accordingly, in one embodiment, in case the activity of the Escherichia coli K12 nucleic acid molecule or a polypeptide comprising the nucleic acid SEQ ID NO.: 5495 or polypeptide SEQ ID NO.: 5496, respectively is increased or generated, e.g. if the activity of a nucleic acid molecule or a polypeptide comprising the nucleic acid or polypeptide or the consensus sequence or the polypeptide motif, as depicted in Table I, II or IV, column 7 in the respective same line as the nucleic acid molecule SEQ ID NO.: 5495 or polypeptide SEQ ID NO.: 5496, respectively is increased or generated or if the activity “predicted PTS enzymes (IIB component/IIC component)” is increased or generated in an plant cell, plant or part thereof an increase in tolerance and/or resistance to environmental stress and an increase biomass production as compared to a corresponding non-transformed wild type plant cell, a plant or a part thereof is conferred. Accordingly, in one embodiment, in case the activity of the Escherichia coli K12 nucleic acid molecule or a polypeptide comprising the nucleic acid SEQ ID NO.: 5585 or polypeptide SEQ ID NO.: 5586, respectively is increased or generated, e.g. if the activity of a nucleic acid molecule or a polypeptide comprising the nucleic acid or polypeptide or the consensus sequence or the polypeptide motif, as depicted in Table I, II or IV, column 7 in the respective same line as the nucleic acid molecule SEQ ID NO.: 5585 or polypeptide SEQ ID NO.: 5586, respectively is increased or generated or if the activity “ribonuclease activity regulator protein RraA” is increased or generated in an plant cell, plant or part thereof an increase in tolerance and/or resistance to environmental stress and an increase biomass production as compared to a corresponding non-transformed wild type plant cell, a plant or a part thereof is conferred. Accordingly, in one embodiment, in case the activity of the Escherichia coli K12 nucleic acid molecule or a polypeptide comprising the nucleic acid SEQ ID NO.: 5800 or polypeptide SEQ ID NO.: 5801, respectively is increased or generated, e.g. if the activity of a nucleic acid molecule or a polypeptide comprising the nucleic acid or polypeptide or the consensus sequence or the polypeptide motif, as depicted in Table I, II or IV, column 7 in the respective same line as the nucleic acid molecule SEQ ID NO.: 5800 or polypeptide SEQ ID NO.: 5801, respectively is increased or generated or if the activity “transcriptional repressor protein MetJ” is increased or generated in an plant cell, plant or part thereof an increase in tolerance and/or resistance to environmental stress and an increase biomass production as compared to a corresponding non-transformed wild type plant cell, a plant or a part thereof is conferred. Accordingly, in one embodiment, in case the activity of the Escherichia coli K12 nucleic acid molecule or a polypeptide comprising the nucleic acid SEQ ID NO.: 5850 or polypeptide SEQ ID NO.: 5851, respectively is increased or generated, e.g. if the activity of a nucleic acid molecule or a polypeptide comprising the nucleic acid or polypeptide or the consensus sequence or the polypeptide motif, as depicted in Table I, II or IV, column 7 in the respective same line as the nucleic acid molecule SEQ ID NO.: 5850 or polypeptide SEQ ID NO.: 5851, respectively is increased or generated or if the activity “pantothenate kinase” is increased or generated in an plant cell, plant or part thereof an increase in tolerance and/or resistance to environmental stress and an increase biomass production as compared to a corresponding non-transformed wild type plant cell, a plant or a part thereof is conferred. Accordingly, in one embodiment, in case the activity of the Escherichia coli K12 nucleic acid molecule or a polypeptide comprising the nucleic acid SEQ ID NO.: 5992 or polypeptide SEQ ID NO.: 5993, respectively is increased or generated, e.g. if the activity of a nucleic acid molecule or a polypeptide comprising the nucleic acid or polypeptide or the consensus sequence or the polypeptide motif, as depicted in Table I, II or IV, column 7 in the respective same line as the nucleic acid molecule SEQ ID NO.: 5992 or polypeptide SEQ ID NO.: 5993, respectively is increased or generated or if the activity “heat shock protein” is increased or generated in an plant cell, plant or part thereof an increase in tolerance and/or resistance to environmental stress and an increase biomass production as compared to a corresponding non-transformed wild type plant cell, a plant or a part thereof is conferred. Accordingly, in one embodiment, in case the activity of the Escherichia coli K12 nucleic acid molecule or a polypeptide comprising the nucleic acid SEQ ID NO.: 5999 or polypeptide SEQ ID NO.: 6000, respectively is increased or generated, e.g. if the activity of a nucleic acid molecule or a polypeptide comprising the nucleic acid or polypeptide or the consensus sequence or the polypeptide motif, as depicted in Table I, II or IV, column 7 in the respective same line as the nucleic acid molecule SEQ ID NO.: 5999 or polypeptide SEQ ID NO.: 6000, respectively is increased or generated or if the activity “predicted porin” is increased or generated in an plant cell, plant or part thereof an increase in tolerance and/or resistance to environmental stress and an increase biomass production as compared to a corresponding non-transformed wild type plant cell, a plant or a part thereof is conferred. Accordingly, in one embodiment, in case the activity of the Escherichia coli K12 nucleic acid molecule or a polypeptide comprising the nucleic acid SEQ ID NO.: 6056 or polypeptide SEQ ID NO.: 6057, respectively is increased or generated, e.g. if the activity of a nucleic acid molecule or a polypeptide comprising the nucleic acid or polypeptide or the consensus sequence or the polypeptide motif, as depicted in Table I, II or IV, column 7 in the respective same line as the nucleic acid molecule SEQ ID NO.: 6056 or polypeptide SEQ ID NO.: 6057, respectively is increased or generated or if the activity “aspartate ammonia-lyase” is increased or generated in an plant cell, plant or part thereof an increase in tolerance and/or resistance to environmental stress and an increase biomass production as compared to a corresponding non-transformed wild type plant cell, a plant or a part thereof is conferred. Accordingly, in one embodiment, in case the activity of the Escherichia coli K12 nucleic acid molecule or a polypeptide comprising the nucleic acid SEQ ID NO.: 6500 or polypeptide SEQ ID NO.: 6501, respectively is increased or generated, e.g. if the activity of a nucleic acid molecule or a polypeptide comprising the nucleic acid or polypeptide or the consensus sequence or the polypeptide motif, as depicted in Table I, II or IV, column 7 in the respective same line as the nucleic acid molecule SEQ ID NO.: 6500 or polypeptide SEQ ID NO.: 6501, respectively is increased or generated or if the activity “nicotinamide-nucleotide adenylyltransferase” is increased or generated in an plant cell, plant or part thereof an increase in tolerance and/or resistance to environmental stress and an increase biomass production as compared to a corresponding non-transformed wild type plant cell, a plant or a part thereof is conferred. Accordingly, in one embodiment, in case the activity of the Synechocystis sp. PCC 6803 nucleic acid molecule or a polypeptide comprising the nucleic acid SEQ ID NO.: 6542 or polypeptide SEQ ID NO.: 6543, respectively is increased or generated, e.g. if the activity of a nucleic acid molecule or a polypeptide comprising the nucleic acid or polypeptide or the consensus sequence or the polypeptide motif, as depicted in Table I, II or IV, column 7 in the respective same line as the nucleic acid molecule SEQ ID NO.: 6542 or polypeptide SEQ ID NO.: 6543, respectively is increased or generated or if the activity “polyphosphate kinase” is increased or generated in an plant cell, plant or part thereof an increase in tolerance and/or resistance to environmental stress and an increase biomass production as compared to a corresponding non-transformed wild type plant cell, a plant or a part thereof is conferred. Accordingly, in one embodiment, in case the activity of the Saccharomyces cerevisiae nucleic acid molecule or a polypeptide comprising the nucleic acid SEQ ID NO.: 6823 or polypeptide SEQ ID NO.: 6824, respectively is increased or generated, e.g. if the activity of a nucleic acid molecule or a polypeptide comprising the nucleic acid or polypeptide or the consensus sequence or the polypeptide motif, as depicted in Table I, II or IV, column 7 in the respective same line as the nucleic acid molecule SEQ ID NO.: 6823 or polypeptide SEQ ID NO.: 6824, respectively is increased or generated or if the activity “Ya1049c-protein” is increased or generated in an plant cell, plant or part thereof an increase in tolerance and/or resistance to environmental stress and an increase biomass production as compared to a corresponding non-transformed wild type plant cell, a plant or a part thereof is conferred. Accordingly, in one embodiment, in case the activity of the Saccharomyces cerevisiae nucleic acid molecule or a polypeptide comprising the nucleic acid SEQ ID NO.: 6870 or polypeptide SEQ ID NO.: 6871, respectively is increased or generated, e.g. if the activity of a nucleic acid molecule or a polypeptide comprising the nucleic acid or polypeptide or the consensus sequence or the polypeptide motif, as depicted in Table I, II or IV, column 7 in the respective same line as the nucleic acid molecule SEQ ID NO.: 6870 or polypeptide SEQ ID NO.: 6871, respectively is increased or generated or if the activity “YCR059C-protein” is increased or generated in an plant cell, plant or part thereof an increase in tolerance and/or resistance to environmental stress and an increase biomass production as compared to a corresponding non-transformed wild type plant cell, a plant or a part thereof is conferred. Accordingly, in one embodiment, in case the activity of the Saccharomyces cerevisiae nucleic acid molecule or a polypeptide comprising the nucleic acid SEQ ID NO.: 6910 or polypeptide SEQ ID NO.: 6911, respectively is increased or generated, e.g. if the activity of a nucleic acid molecule or a polypeptide comprising the nucleic acid or polypeptide or the consensus sequence or the polypeptide motif, as depicted in Table I, II or IV, column 7 in the respective same line as the nucleic acid molecule SEQ ID NO.: 6910 or polypeptide SEQ ID NO.: 6911, respectively is increased or generated or if the activity “3-deoxy-D-arabino-heptulosonate-7-phosphate (DAHP) synthase” is increased or generated in an plant cell, plant or part thereof an increase in tolerance and/or resistance to environmental stress and an increase biomass production as compared to a corresponding non-transformed wild type plant cell, a plant or a part thereof is conferred. Accordingly, in one embodiment, in case the activity of the Saccharomyces cerevisiae nucleic acid molecule or a polypeptide comprising the nucleic acid SEQ ID NO.: 7261 or polypeptide SEQ ID NO.: 7262, respectively is increased or generated, e.g. if the activity of a nucleic acid molecule or a polypeptide comprising the nucleic acid or polypeptide or the consensus sequence or the polypeptide motif, as depicted in Table I, II or IV, column 7 in the respective same line as the nucleic acid molecule SEQ ID NO.: 7261 or polypeptide SEQ ID NO.: 7262, respectively is increased or generated or if the activity “YEL005C-protein” is increased or generated in an plant cell, plant or part thereof an increase in tolerance and/or resistance to environmental stress and an increase biomass production as compared to a corresponding non-transformed wild type plant cell, a plant or a part thereof is conferred. Accordingly, in one embodiment, in case the activity of the Saccharomyces cerevisiae nucleic acid molecule or a polypeptide comprising the nucleic acid SEQ ID NO.: 7265 or polypeptide SEQ ID NO.: 7266, respectively is increased or generated, e.g. if the activity of a nucleic acid molecule or a polypeptide comprising the nucleic acid or polypeptide or the consensus sequence or the polypeptide motif, as depicted in Table I, II or IV, column 7 in the respective same line as the nucleic acid molecule SEQ ID NO.: 7265 or polypeptide SEQ ID NO.: 7266, respectively is increased or generated or if the activity “Lsm (Like Sm) protein” is increased or generated in an plant cell, plant or part thereof an increase in tolerance and/or resistance to environmental stress and an increase biomass production as compared to a corresponding non-transformed wild type plant cell, a plant or a part thereof is conferred. Accordingly, in one embodiment, in case the activity of the Saccharomyces cerevisiae nucleic acid molecule or a polypeptide comprising the nucleic acid SEQ ID NO.: 7301 or polypeptide SEQ ID NO.: 7302, respectively is increased or generated, e.g. if the activity of a nucleic acid molecule or a polypeptide comprising the nucleic acid or polypeptide or the consensus sequence or the polypeptide motif, as depicted in Table I, II or IV, column 7 in the respective same line as the nucleic acid molecule SEQ ID NO.: 7301 or polypeptide SEQ ID NO.: 7302, respectively is increased or generated or if the activity “YER156C-protein” is increased or generated in an plant cell, plant or part thereof an increase in tolerance and/or resistance to environmental stress and an increase biomass production as compared to a corresponding non-transformed wild type plant cell, a plant or a part thereof is conferred. Accordingly, in one embodiment, in case the activity of the Saccharomyces cerevisiae nucleic acid molecule or a polypeptide comprising the nucleic acid SEQ ID NO.: 7384 or polypeptide SEQ ID NO.: 7385, respectively is increased or generated, e.g. if the activity of a nucleic acid molecule or a polypeptide comprising the nucleic acid or polypeptide or the consensus sequence or the polypeptide motif, as depicted in Table I, II or IV, column 7 in the respective same line as the nucleic acid molecule SEQ ID NO.: 7384 or polypeptide SEQ ID NO.: 7385, respectively is increased or generated or if the activity “Check-point protein” is increased or generated in an plant cell, plant or part thereof an increase in tolerance and/or resistance to environmental stress and an increase biomass production as compared to a corresponding non-transformed wild type plant cell, a plant or a part thereof is conferred. Accordingly, in one embodiment, in case the activity of the Saccharomyces cerevisiae nucleic acid molecule or a polypeptide comprising the nucleic acid SEQ ID NO.: 7407 or polypeptide SEQ ID NO.: 7408, respectively is increased or generated, e.g. if the activity of a nucleic acid molecule or a polypeptide comprising the nucleic acid or polypeptide or the consensus sequence or the polypeptide motif, as depicted in Table I, II or IV, column 7 in the respective same line as the nucleic acid molecule SEQ ID NO.: 7407 or polypeptide SEQ ID NO.: 7408, respectively is increased or generated or if the activity “YGL045W-protein” is increased or generated in an plant cell, plant or part thereof an increase in tolerance and/or resistance to environmental stress and an increase biomass production as compared to a corresponding non-transformed wild type plant cell, a plant or a part thereof is conferred. Accordingly, in one embodiment, in case the activity of the Saccharomyces cerevisiae nucleic acid molecule or a polypeptide comprising the nucleic acid SEQ ID NO.: 7429 or polypeptide SEQ ID NO.: 7430, respectively is increased or generated, e.g. if the activity of a nucleic acid molecule or a polypeptide comprising the nucleic acid or polypeptide or the consensus sequence or the polypeptide motif, as depicted in Table I, II or IV, column 7 in the respective same line as the nucleic acid molecule SEQ ID NO.: 7429 or polypeptide SEQ ID NO.: 7430, respectively is increased or generated or if the activity “Protein component of the small (40S) ribosomal subunit” is increased or generated in an plant cell, plant or part thereof an increase in tolerance and/or resistance to environmental stress and an increase biomass production as compared to a corresponding non-transformed wild type plant cell, a plant or a part thereof is conferred. Accordingly, in one embodiment, in case the activity of the Saccharomyces cerevisiae nucleic acid molecule or a polypeptide comprising the nucleic acid SEQ ID NO.: 7558 or polypeptide SEQ ID NO.: 7559, respectively is increased or generated, e.g. if the activity of a nucleic acid molecule or a polypeptide comprising the nucleic acid or polypeptide or the consensus sequence or the polypeptide motif, as depicted in Table I, II or IV, column 7 in the respective same line as the nucleic acid molecule SEQ ID NO.: 7558 or polypeptide SEQ ID NO.: 7559, respectively is increased or generated or if the activity “Dihydrouridine synthase” is increased or generated in an plant cell, plant or part thereof an increase in tolerance and/or resistance to environmental stress and an increase biomass production as compared to a corresponding non-transformed wild type plant cell, a plant or a part thereof is conferred. Accordingly, in one embodiment, in case the activity of the Saccharomyces cerevisiae nucleic acid molecule or a polypeptide comprising the nucleic acid SEQ ID NO.: 7606 or polypeptide SEQ ID NO.: 7607, respectively is increased or generated, e.g. if the activity of a nucleic acid molecule or a polypeptide comprising the nucleic acid or polypeptide or the consensus sequence or the polypeptide motif, as depicted in Table I, II or IV, column 7 in the respective same line as the nucleic acid molecule SEQ ID NO.: 7606 or polypeptide SEQ ID NO.: 7607, respectively is increased or generated or if the activity “YOR024w-protein” is increased or generated in an plant cell, plant or part thereof an increase in tolerance and/or resistance to environmental stress and an increase biomass production as compared to a corresponding non-transformed wild type plant cell, a plant or a part thereof is conferred. Accordingly, in one embodiment, in case the activity of the Saccharomyces cerevisiae nucleic acid molecule or a polypeptide comprising the nucleic acid SEQ ID NO.: 7610 or polypeptide SEQ ID NO.: 7611, respectively is increased or generated, e.g. if the activity of a nucleic acid molecule or a polypeptide comprising the nucleic acid or polypeptide or the consensus sequence or the polypeptide motif, as depicted in Table I, II or IV, column 7 in the respective same line as the nucleic acid molecule SEQ ID NO.: 7610 or polypeptide SEQ ID NO.: 7611, respectively is increased or generated or if the activity “Glutamine tRNA synthetase” is increased or generated in an plant cell, plant or part thereof an increase in tolerance and/or resistance to environmental stress and an increase biomass production as compared to a corresponding non-transformed wild type plant cell, a plant or a part thereof is conferred. Accordingly, in one embodiment, in case the activity of the Saccharomyces cerevisiae nucleic acid molecule or a polypeptide comprising the nucleic acid SEQ ID NO.: 7685 or polypeptide SEQ ID NO.: 7686, respectively is increased or generated, e.g. if the activity of a nucleic acid molecule or a polypeptide comprising the nucleic acid or polypeptide or the consensus sequence or the polypeptide motif, as depicted in Table I, II or IV, column 7 in the respective same line as the nucleic acid molecule SEQ ID NO.: 7685 or polypeptide SEQ ID NO.: 7686, respectively is increased or generated or if the activity “Splicing factor” is increased or generated in an plant cell, plant or part thereof an increase in tolerance and/or resistance to environmental stress and an increase biomass production as compared to a corresponding non-transformed wild type plant cell, a plant or a part thereof is conferred. Accordingly, in one embodiment, in case the activity of the Escherichia coli K12 nucleic acid molecule or a polypeptide comprising the nucleic acid SEQ ID NO.: 1201 or polypeptide SEQ ID NO.: 1202, respectively is increased or generated, e.g. if the activity of a nucleic acid molecule or a polypeptide comprising the nucleic acid or polypeptide or the consensus sequence or the polypeptide motif, as depicted in Table I, II or IV, column 7 in the respective same line as the nucleic acid molecule SEQ ID NO.: 1201 or polypeptide SEQ ID NO.: 1202, respectively is increased or generated or if the activity “gamma-Glu-putrescine synthase” is increased or generated in an plant cell, plant or part thereof an increase in tolerance and/or resistance to environmental stress and an increase biomass production as compared to a corresponding non-transformed wild type plant cell, a plant or a part thereof is conferred. Accordingly, in one embodiment, in case the activity of the Escherichia coli K12 nucleic acid molecule or a polypeptide comprising the nucleic acid SEQ ID NO.: 7741 or polypeptide SEQ ID NO.: 7742, respectively is increased or generated, e.g. if the activity of a nucleic acid molecule or a polypeptide comprising the nucleic acid or polypeptide or the consensus sequence or the polypeptide motif, as depicted in Table I, II or IV, column 7 in the respective same line as the nucleic acid molecule SEQ ID NO.: 7741 or polypeptide SEQ ID NO.: 7742, respectively is increased or generated or if the activity “inner membrane protein” is increased or generated in an plant cell, plant or part thereof an increase in tolerance and/or resistance to environmental stress and an increase biomass production as compared to a corresponding non-transformed wild type plant cell, a plant or a part thereof is conferred. Accordingly, in one embodiment, in case the activity of the Escherichia coli K12 nucleic acid molecule or a polypeptide comprising the nucleic acid SEQ ID NO.: 7850 or polypeptide SEQ ID NO.: 7851, respectively is increased or generated, e.g. if the activity of a nucleic acid molecule or a polypeptide comprising the nucleic acid or polypeptide or the consensus sequence or the polypeptide motif, as depicted in Table I, II or IV, column 7 in the respective same line as the nucleic acid molecule SEQ ID NO.: 7850 or polypeptide SEQ ID NO.: 7851, respectively is increased or generated or if the activity “heat shock protein HtpX” is increased or generated in an plant cell, plant or part thereof an increase in tolerance and/or resistance to environmental stress and an increase biomass production as compared to a corresponding non-transformed wild type plant cell, a plant or a part thereof is conferred. Accordingly, in one embodiment, in case the activity of the Escherichia coli K12 nucleic acid molecule or a polypeptide comprising the nucleic acid SEQ ID NO.: 7971 or polypeptide SEQ ID NO.: 7972, respectively is increased or generated, e.g. if the activity of a nucleic acid molecule or a polypeptide comprising the nucleic acid or polypeptide or the consensus sequence or the polypeptide motif, as depicted in Table I, II or IV, column 7 in the respective same line as the nucleic acid molecule SEQ ID NO.: 7971 or polypeptide SEQ ID NO.: 7972, respectively is increased or generated or if the activity “DNA-binding transcriptional dual regulator protein” is increased or generated in an plant cell, plant or part thereof an increase in tolerance and/or resistance to environmental stress and an increase biomass production as compared to a corresponding non-transformed wild type plant cell, a plant or a part thereof is conferred. Accordingly, in one embodiment, in case the activity of the Escherichia coli K12 nucleic acid molecule or a polypeptide comprising the nucleic acid SEQ ID NO.: 8021 or polypeptide SEQ ID NO.: 8022, respectively is increased or generated, e.g. if the activity of a nucleic acid molecule or a polypeptide comprising the nucleic acid or polypeptide or the consensus sequence or the polypeptide motif, as depicted in Table I, II or IV, column 7 in the respective same line as the nucleic acid molecule SEQ ID NO.: 8021 or polypeptide SEQ ID NO.: 8022, respectively is increased or generated or if the activity “predicted serine transporter protein” is increased or generated in an plant cell, plant or part thereof an increase in tolerance and/or resistance to environmental stress and an increase biomass production as compared to a corresponding non-transformed wild type plant cell, a plant or a part thereof is conferred. Accordingly, in one embodiment, in case the activity of the Saccharomyces cerevisiae nucleic acid molecule or a polypeptide comprising the nucleic acid SEQ ID NO.: 8177 or polypeptide SEQ ID NO.: 8178, respectively is increased or generated, e.g. if the activity of a nucleic acid molecule or a polypeptide comprising the nucleic acid or polypeptide or the consensus sequence or the polypeptide motif, as depicted in Table I, II or IV, column 7 in the respective same line as the nucleic acid molecule SEQ ID NO.: 8177 or polypeptide SEQ ID NO.: 8178, respectively is increased or generated or if the activity “glutathione-dependent oxidoreductase” is increased or generated in an plant cell, plant or part thereof an increase in tolerance and/or resistance to environmental stress and an increase biomass production as compared to a corresponding non-transformed wild type plant cell, a plant or a part thereof is conferred. Accordingly, in one embodiment, in case the activity of the Saccharomyces cerevisiae nucleic acid molecule or a polypeptide comprising the nucleic acid SEQ ID NO.: 8272 or polypeptide SEQ ID NO.: 8273, respectively is increased or generated, e.g. if the activity of a nucleic acid molecule or a polypeptide comprising the nucleic acid or polypeptide or the consensus sequence or the polypeptide motif, as depicted in Table I, II or IV, column 7 in the respective same line as the nucleic acid molecule SEQ ID NO.: 8272 or polypeptide SEQ ID NO.: 8273, respectively is increased or generated or if the activity “Yfr042w-protein” is increased or generated in an plant cell, plant or part thereof an increase in tolerance and/or resistance to environmental stress and an increase biomass production as compared to a corresponding non-transformed wild type plant cell, a plant or a part thereof is conferred. Accordingly, in one embodiment, in case the activity of the Saccharomyces cerevisiae nucleic acid molecule or a polypeptide comprising the nucleic acid SEQ ID NO.: 8288 or polypeptide SEQ ID NO.: 8289, respectively is increased or generated, e.g. if the activity of a nucleic acid molecule or a polypeptide comprising the nucleic acid or polypeptide or the consensus sequence or the polypeptide motif, as depicted in Table I, II or IV, column 7 in the respective same line as the nucleic acid molecule SEQ ID NO.: 8288 or polypeptide SEQ ID NO.: 8289, respectively is increased or generated or if the activity “Protein component of the small (40S) ribosomal subunit” is increased or generated in an plant cell, plant or part thereof an increase in tolerance and/or resistance to environmental stress and an increase biomass production as compared to a corresponding non-transformed wild type plant cell, a plant or a part thereof is conferred. Accordingly, in one embodiment, in case the activity of the Escherichia coli K12 nucleic acid molecule or a polypeptide comprising the nucleic acid SEQ ID NO.: 8438 or polypeptide SEQ ID NO.: 8439, respectively is increased or generated, e.g. if the activity of a nucleic acid molecule or a polypeptide comprising the nucleic acid or polypeptide or the consensus sequence or the polypeptide motif, as depicted in Table I, II or IV, column 7 in the respective same line as the nucleic acid molecule SEQ ID NO.: 8438 or polypeptide SEQ ID NO.: 8439, respectively is increased or generated or if the activity “transcriptional regulator protein” is increased or generated in an plant cell, plant or part thereof an increase in tolerance and/or resistance to environmental stress and an increase biomass production as compared to a corresponding non-transformed wild type plant cell, a plant or a part thereof is conferred. Accordingly, in one embodiment, in case the activity of the Escherichia coli K12 nucleic acid molecule or a polypeptide comprising the nucleic acid SEQ ID NO.: 8630 or polypeptide SEQ ID NO.: 8631, respectively is increased or generated, e.g. if the activity of a nucleic acid molecule or a polypeptide comprising the nucleic acid or polypeptide or the consensus sequence or the polypeptide motif, as depicted in Table I, II or IV, column 7 in the respective same line as the nucleic acid molecule SEQ ID NO.: 8630 or polypeptide SEQ ID NO.: 8631, respectively is increased or generated or if the activity “predicted oxidoreductase (flavin:NADH component)” is increased or generated in an plant cell, plant or part thereof an increase in tolerance and/or resistance to environmental stress and an increase biomass production as compared to a corresponding non-transformed wild type plant cell, a plant or a part thereof is conferred. Accordingly, in one embodiment, in case the activity of the Escherichia coli K12 nucleic acid molecule or a polypeptide comprising the nucleic acid SEQ ID NO.: 9268 or polypeptide SEQ ID NO.: 9269, respectively is increased or generated, e.g. if the activity of a nucleic acid molecule or a polypeptide comprising the nucleic acid or polypeptide or the consensus sequence or the polypeptide motif, as depicted in Table I, II or IV, column 7 in the respective same line as the nucleic acid molecule SEQ ID NO.: 9268 or polypeptide SEQ ID NO.: 9269, respectively is increased or generated or if the activity “cellobiose/arbutin/salicin-specific PTS enzyme (IIB component/IC component)” is increased or generated in an plant cell, plant or part thereof an increase in tolerance and/or resistance to environmental stress and an increase biomass production as compared to a corresponding non-transformed wild type plant cell, a plant or a part thereof is conferred. Accordingly, in one embodiment, in case the activity of the Escherichia coli K12 nucleic acid molecule or a polypeptide comprising the nucleic acid SEQ ID NO.: 9444 or polypeptide SEQ ID NO.: 9445, respectively is increased or generated, e.g. if the activity of a nucleic acid molecule or a polypeptide comprising the nucleic acid or polypeptide or the consensus sequence or the polypeptide motif, as depicted in Table I, II or IV, column 7 in the respective same line as the nucleic acid molecule SEQ ID NO.: 9444 or polypeptide SEQ ID NO.: 9445, respectively is increased or generated or if the activity “predicted PTS enzymes (IIB component/IIC component)” is increased or generated in an plant cell, plant or part thereof an increase in tolerance and/or resistance to environmental stress and an increase biomass production as compared to a corresponding non-transformed wild type plant cell, a plant or a part thereof is conferred. Accordingly, in one embodiment, in case the activity of the Escherichia coli K12 nucleic acid molecule or a polypeptide comprising the nucleic acid SEQ ID NO.: 9824 or polypeptide SEQ ID NO.: 9825, respectively is increased or generated, e.g. if the activity of a nucleic acid molecule or a polypeptide comprising the nucleic acid or polypeptide or the consensus sequence or the polypeptide motif, as depicted in Table I, II or IV, column 7 in the respective same line as the nucleic acid molecule SEQ ID NO.: 9824 or polypeptide SEQ ID NO.: 9825, respectively is increased or generated or if the activity “nicotinamide-nucleotide adenylyltransferase” is increased or generated in an plant cell, plant or part thereof an increase in tolerance and/or resistance to environmental stress and an increase biomass production as compared to a corresponding non-transformed wild type plant cell, a plant or a part thereof is conferred. Accordingly, in one embodiment, in case the activity of the Saccharomyces cerevisiae nucleic acid molecule or a polypeptide comprising the nucleic acid SEQ ID NO.: 9905 or polypeptide SEQ ID NO.: 9906, respectively is increased or generated, e.g. if the activity of a nucleic acid molecule or a polypeptide comprising the nucleic acid or polypeptide or the consensus sequence or the polypeptide motif, as depicted in Table I, II or IV, column 7 in the respective same line as the nucleic acid molecule SEQ ID NO.: 9905 or polypeptide SEQ ID NO.: 9906, respectively is increased or generated or if the activity “YGL045W-protein” is increased or generated in an plant cell, plant or part thereof an increase in tolerance and/or resistance to environmental stress and an increase biomass production as compared to a corresponding non-transformed wild type plant cell, a plant or a part thereof is conferred. Accordingly, in one embodiment, in case the activity of the Escherichia coli K12 nucleic acid molecule or a polypeptide comprising the nucleic acid SEQ ID NO.: 9193 or polypeptide SEQ ID NO.: 9194, respectively is increased or generated, e.g. if the activity of a nucleic acid molecule or a polypeptide comprising the nucleic acid or polypeptide or the consensus sequence or the polypeptide motif, as depicted in Table I, II or IV, column 7 in the respective same line as the nucleic acid molecule SEQ ID NO.: 9193 or polypeptide SEQ ID NO.: 9194, respectively is increased or generated or if the activity “DNA-binding transcriptional dual regulator protein” is increased or generated in an plant cell, plant or part thereof an increase in tolerance and/or resistance to environmental stress and an increase biomass production as compared to a corresponding non-transformed wild type plant cell, a plant or a part thereof is conferred. Accordingly, in one embodiment, in case the activity of the Escherichia coli K12 nucleic acid molecule or a polypeptide comprising the nucleic acid SEQ ID NO.: 8497 or polypeptide SEQ ID NO.: 8498, respectively is increased or generated, e.g. if the activity of a nucleic acid molecule or a polypeptide comprising the nucleic acid or polypeptide or the consensus sequence or the polypeptide motif, as depicted in Table I, II or IV, column 7 in the respective same line as the nucleic acid molecule SEQ ID NO.: 8497 or polypeptide SEQ ID NO.: 8498, respectively is increased or generated or if the activity “methylglyoxal synthase” is increased or generated in an plant cell, plant or part thereof an increase in tolerance and/or resistance to environmental stress and an increase biomass production as compared to a corresponding non-transformed wild type plant cell, a plant or a part thereof is conferred. Accordingly, in one embodiment, in case the activity of the Escherichia coli K12 nucleic acid molecule or a polypeptide comprising the nucleic acid SEQ ID NO.: 8742 or polypeptide SEQ ID NO.: 8743, respectively is increased or generated, e.g. if the activity of a nucleic acid molecule or a polypeptide comprising the nucleic acid or polypeptide or the consensus sequence or the polypeptide motif, as depicted in Table I, II or IV, column 7 in the respective same line as the nucleic acid molecule SEQ ID NO.: 8742 or polypeptide SEQ ID NO.: 8743, respectively is increased or generated or if the activity “gamma-Glu-putrescine synthase” is increased or generated in an plant cell, plant or part thereof an increase in tolerance and/or resistance to environmental stress and an increase biomass production as compared to a corresponding non-transformed wild type plant cell, a plant or a part thereof is conferred. Accordingly, in one embodiment, in case the activity of the Escherichia coli K12 nucleic acid molecule or a polypeptide comprising the nucleic acid SEQ ID NO.: 8891 or polypeptide SEQ ID NO.: 8892, respectively is increased or generated, e.g. if the activity of a nucleic acid molecule or a polypeptide comprising the nucleic acid or polypeptide or the consensus sequence or the polypeptide motif, as depicted in Table I, II or IV, column 7 in the respective same line as the nucleic acid molecule SEQ ID NO.: 8891 or polypeptide SEQ ID NO.: 8892, respectively is increased or generated or if the activity “acid shock protein precursor” is increased or generated in an plant cell, plant or part thereof an increase in tolerance and/or resistance to environmental stress and an increase biomass production as compared to a corresponding non-transformed wild type plant cell, a plant or a part thereof is conferred. Accordingly, in one embodiment, in case the activity of the Escherichia coli k12 nucleic acid molecule or a polypeptide comprising the nucleic acid SEQ ID NO.: 9031 or polypeptide SEQ ID NO.: 9032, respectively is increased or generated, e.g. if the activity of a nucleic acid molecule or a polypeptide comprising the nucleic acid or polypeptide or the consensus sequence or the polypeptide motif, as depicted in Table I, II or IV, column 7 in the respective same line as the nucleic acid molecule SEQ ID NO.: 9031 or polypeptide SEQ ID NO.: 9032, respectively is increased or generated or if the activity “regulator of length of O-antigen component of lipopolysaccharide chains” is increased or generated in an plant cell, plant or part thereof an increase in tolerance and/or resistance to environmental stress and an increase biomass production as compared to a corresponding non-transformed wild type plant cell, a plant or a part thereof is conferred. Accordingly, in one embodiment, in case the activity of the Escherichia coli K12 nucleic acid molecule or a polypeptide comprising the nucleic acid SEQ ID NO.: 9315 or polypeptide SEQ ID NO.: 9316, respectively is increased or generated, e.g. if the activity of a nucleic acid molecule or a polypeptide comprising the nucleic acid or polypeptide or the consensus sequence or the polypeptide motif, as depicted in Table I, II or IV, column 7 in the respective same line as the nucleic acid molecule SEQ ID NO.: 9315 or polypeptide SEQ ID NO.: 9316, respectively is increased or generated or if the activity “ornithine decarboxylase” is increased or generated in an plant cell, plant or part thereof an increase in tolerance and/or resistance to environmental stress and an increase biomass production as compared to a corresponding non-transformed wild type plant cell, a plant or a part thereof is conferred. Accordingly, in one embodiment, in case the activity of the Escherichia coli K12 nucleic acid molecule or a polypeptide comprising the nucleic acid SEQ ID NO.: 9529 or polypeptide SEQ ID NO.: 9530, respectively is increased or generated, e.g. if the activity of a nucleic acid molecule or a polypeptide comprising the nucleic acid or polypeptide or the consensus sequence or the polypeptide motif, as depicted in Table I, II or IV, column 7 in the respective same line as the nucleic acid molecule SEQ ID NO.: 9529 or polypeptide SEQ ID NO.: 9530, respectively is increased or generated or if the activity “aspartate ammonia-lyase ” is increased or generated in an plant cell, plant or part thereof an increase in tolerance and/or resistance to environmental stress and an increase biomass production as compared to a corresponding non-transformed wild type plant cell, a plant or a part thereof is conferred. Accordingly, in one embodiment, in case the activity of the Escherichia coli K12 nucleic acid molecule or a polypeptide comprising the nucleic acid SEQ ID NO.: 8462 or polypeptide SEQ ID NO.: 8463, respectively is increased or generated, e.g. if the activity of a nucleic acid molecule or a polypeptide comprising the nucleic acid or polypeptide or the consensus sequence or the polypeptide motif, as depicted in Table I, II or IV, column 7 in the respective same line as the nucleic acid molecule SEQ ID NO.: 8462 or polypeptide SEQ ID NO.: 8463, respectively is increased or generated or if the activity “predicted transporter protein” is increased or generated in an plant cell, plant or part thereof an increase in tolerance and/or resistance to environmental stress and an increase biomass production as compared to a corresponding non-transformed wild type plant cell, a plant or a part thereof is conferred. Accordingly, in one embodiment, in case the activity of the Escherichia coli K12 nucleic acid molecule or a polypeptide comprising the nucleic acid SEQ ID NO.: 8973 or polypeptide SEQ ID NO.: 8974, respectively is increased or generated, e.g. if the activity of a nucleic acid molecule or a polypeptide comprising the nucleic acid or polypeptide or the consensus sequence or the polypeptide motif, as depicted in Table I, II or IV, column 7 in the respective same line as the nucleic acid molecule SEQ ID NO.: 8973 or polypeptide SEQ ID NO.: 8974, respectively is increased or generated or if the activity “L-arabinose transporter subunit” is increased or generated in an plant cell, plant or part thereof an increase in tolerance and/or resistance to environmental stress and an increase biomass production as compared to a corresponding non-transformed wild type plant cell, a plant or a part thereof is conferred. Accordingly, in one embodiment, in case the activity of the Saccharomyces cerevisiae nucleic acid molecule or a polypeptide comprising the nucleic acid SEQ ID NO.: 9883 or polypeptide SEQ ID NO.: 9884, respectively is increased or generated, e.g. if the activity of a nucleic acid molecule or a polypeptide comprising the nucleic acid or polypeptide or the consensus sequence or the polypeptide motif, as depicted in Table I, II or IV, column 7 in the respective same line as the nucleic acid molecule SEQ ID NO.: 9883 or polypeptide SEQ ID NO.: 9884, respectively is increased or generated or if the activity “Lsm (Like Sm) protein” is increased or generated in an plant cell, plant or part thereof an increase in tolerance and/or resistance to environmental stress and an increase biomass production as compared to a corresponding non-transformed wild type plant cell, a plant or a part thereof is conferred. Accordingly, in one embodiment, in case the activity of the Escherichia coli K12 nucleic acid molecule or a polypeptide comprising the nucleic acid SEQ ID NO.: 8934 or polypeptide SEQ ID NO.: 8935, respectively is increased or generated, e.g. if the activity of a nucleic acid molecule or a polypeptide comprising the nucleic acid or polypeptide or the consensus sequence or the polypeptide motif, as depicted in Table I, II or IV, column 7 in the respective same line as the nucleic acid molecule SEQ ID NO.: 8934 or polypeptide SEQ ID NO.: 8935, respectively is increased or generated or if the activity “neutral amino-acid efflux system” is increased or generated in an plant cell, plant or part thereof an increase in tolerance and/or resistance to environmental stress and an increase biomass production as compared to a corresponding non-transformed wild type plant cell, a plant or a part thereof is conferred. Accordingly, in one embodiment, in case the activity of the Escherichia coli K12 nucleic acid molecule or a polypeptide comprising the nucleic acid SEQ ID NO.: 9093 or polypeptide SEQ ID NO.: 9094, respectively is increased or generated, e.g. if the activity of a nucleic acid molecule or a polypeptide comprising the nucleic acid or polypeptide or the consensus sequence or the polypeptide motif, as depicted in Table I, II or IV, column 7 in the respective same line as the nucleic acid molecule SEQ ID NO.: 9093 or polypeptide SEQ ID NO.: 9094, respectively is increased or generated or if the activity “b2226-protein” is increased or generated in an plant cell, plant or part thereof an increase in tolerance and/or resistance to environmental stress and an increase biomass production as compared to a corresponding non-transformed wild type plant cell, a plant or a part thereof is conferred. Accordingly, in one embodiment, in case the activity of the Escherichia coli K12 nucleic acid molecule or a polypeptide comprising the nucleic acid SEQ ID NO.: 9109 or polypeptide SEQ ID NO.: 9110, respectively is increased or generated, e.g. if the activity of a nucleic acid molecule or a polypeptide comprising the nucleic acid or polypeptide or the consensus sequence or the polypeptide motif, as depicted in Table I, II or IV, column 7 in the respective same line as the nucleic acid molecule SEQ ID NO.: 9109 or polypeptide SEQ ID NO.: 9110, respectively is increased or generated or if the activity “sensory histidine kinase in two-component regulatory system with NarP (NarL)” is increased or generated in an plant cell, plant or part thereof an increase in tolerance and/or resistance to environmental stress and an increase biomass production as compared to a corresponding non-transformed wild type plant cell, a plant or a part thereof is conferred. Accordingly, in one embodiment, in case the activity of the Saccharomyces cerevisiae nucleic acid molecule or a polypeptide comprising the nucleic acid SEQ ID NO.: 9931 or polypeptide SEQ ID NO.: 9932, respectively is increased or generated, e.g. if the activity of a nucleic acid molecule or a polypeptide comprising the nucleic acid or polypeptide or the consensus sequence or the polypeptide motif, as depicted in Table I, II or IV, column 7 in the respective same line as the nucleic acid molecule SEQ ID NO.: 9931 or polypeptide SEQ ID NO.: 9932, respectively is increased or generated or if the activity “Glutamine tRNA synthetase” is increased or generated in an plant cell, plant or part thereof an increase in tolerance and/or resistance to environmental stress and an increase biomass production as compared to a corresponding non-transformed wild type plant cell, a plant or a part thereof is conferred. Accordingly, in one embodiment, in case the activity of the Escherichia coli nucleic acid molecule or a polypeptide comprising the nucleic acid SEQ ID NO.: 10096 or polypeptide SEQ ID NO.: 10097, respectively is increased or generated, e.g. if the activity of a nucleic acid molecule or a polypeptide comprising the nucleic acid or polypeptide or the consensus sequence or the polypeptide motif, as depicted in Table I, II or IV, column 7 in the respective same line as the nucleic acid molecule SEQ ID NO.: 10096 or polypeptide SEQ ID NO.: 10097, respectively is increased or generated or if the activity “gluconate transporter” is increased or generated in an plant cell, plant or part thereof an increase in tolerance and/or resistance to environmental stress and an increase biomass production as compared to a corresponding non-transformed wild type plant cell, a plant or a part thereof is conferred.

[0133] For the purposes of the invention, as a rule the plural is intended to encompass the singular and vice versa.

[0134] Unless otherwise specified, the terms “polynucleotides”, “nucleic acid” and “nucleic acid molecule” are interchangeably in the present context. Unless otherwise specified, the terms “peptide”, “polypeptide” and “protein” are interchangeably in the present context. The term “sequence” may relate to polynucleotides, nucleic acids, nucleic acid molecules, peptides, polypeptides and proteins, depending on the context in which the term “sequence” is used. The terms “gene(s)”, “polynucleotide”, “nucleic acid sequence”, “nucleotide sequence”, or “nucleic acid molecule(s)” as used herein refers to a polymeric form of nucleotides of any length, either ribonucleotides or deoxyribonucleotides. The terms refer only to the primary structure of the molecule.

[0135] Thus, the terms “gene(s)”, “polynucleotide”, “nucleic acid sequence”, “nucleotide sequence”, or “nucleic acid molecule(s)” as used herein include double- and single-stranded DNA and/or RNA. They also include known types of modifications, for example, methylation, “caps”, substitutions of one or more of the naturally occurring nucleotides with an analog. Preferably, the DNA or RNA sequence comprises a coding sequence encoding the herein defined polypeptide.

[0136] A “coding sequence” is a nucleotide sequence, which is transcribed into an RNA, e.g. a regulatory RNA, such as a miRNA, a ta-siRNA, cosuppression molecule, an RNAi, a ribozyme, etc. or into a mRNA which is translated into a polypeptide when placed under the control of appropriate regulatory sequences. The boundaries of the coding sequence are determined by a translation start codon at the 5′-terminus and a translation stop codon at the 3′-terminus. A coding sequence can include, but is not limited to mRNA, cDNA, recombinant nucleotide sequences or genomic DNA, while introns may be present as well under certain circumstances.

[0137] As used in the present context a nucleic acid molecule may also encompass the untranslated sequence located at the 3′ and at the 5′ end of the coding gene region, for example at least 500, preferably 200, especially preferably 100, nucleotides of the sequence upstream of the 5′ end of the coding region and at least 100, preferably 50, especially preferably 20, nucleotides of the sequence downstream of the 3′ end of the coding gene region. In the event for example the antisense, RNAi, snRNA, dsRNA, siRNA, miRNA, ta-siRNA, cosuppression molecule, ribozyme etc. technology is used coding regions as well as the 5′- and/or 3′-regions can advantageously be used.

[0138] However, it is often advantageous only to choose the coding region for cloning and expression purposes.

[0139] “Polypeptide” refers to a polymer of amino acid (amino acid sequence) and does not refer to a specific length of the molecule. Thus, peptides and oligopeptides are included within the definition of polypeptide. This term does also refer to or include post-translational modifications of the polypeptide, for example, glycosylations, acetylations, phosphorylations and the like. Included within the definition are, for example, polypeptides containing one or more analogs of an amino acid (including, for example, unnatural amino acids, etc.), polypeptides with substituted linkages, as well as other modifications known in the art, both naturally occurring and non-naturally occurring.

[0140] The term “Table I” used in this specification is to be taken to specify the content of Table I A and Table I B. The term “Table II” used in this specification is to be taken to specify the content of Table II A and Table II B. The term “Table I A” used in this specification is to be taken to specify the content of Table I A. The term “Table I B” used in this specification is to be taken to specify the content of Table I B. The term “Table II A” used in this specification is to be taken to specify the content of Table II A. The term “Table II B” used in this specification is to be taken to specify the content of Table II B. In one preferred embodiment, the term “Table I” means Table I B. In one preferred embodiment, the term “Table II” means Table II B.

[0141] The terms “comprise” or “comprising” and grammatical variations thereof when used in this specification are to be taken to specify the presence of stated features, integers, steps or components or groups thereof, but not to preclude the presence or addition of one or more other features, integers, steps, components or groups thereof.

[0142] In accordance with the invention, a protein or polypeptide has the “activity of an protein as shown in table II, column 3” if its de novo activity, or its increased expression directly or indirectly leads to and confers an increased tolerance and/or resistance to environmental stress and increased biomass production as compared to a corresponding non-transformed wild type plant cell, plant or part thereof and the protein has the above mentioned activities of a protein as shown in table II, column 3. Throughout the specification the activity or preferably the biological activity of such a protein or polypeptide or an nucleic acid molecule or sequence encoding such protein or polypeptide is identical or similar if it still has the biological or enzymatic activity of a protein as shown in table II, column 3, or which has at least 10% of the original enzymatic activity, preferably 20%, particularly preferably 30%, most particularly preferably 40% in comparison to a protein as shown in table II, column 3 of E. coli, Saccharomyces cerevisiae or Synechocystis sp.

[0143] The terms “increased”, “rised”, “extended”, “enhanced”, “improved” or “amplified” relate to a corresponding change of a property in a plant, an organism, a part of an organism such as a tissue, seed, root, leave, flower etc. or in a cell and are interchangeable. Preferably, the overall activity in the volume is increased or enhanced in cases if the increase or enhancement is related to the increase or enhancement of an activity of a gene product, independent whether the amount of gene product or the specific activity of the gene product or both is increased or enhanced or whether the amount, stability or translation efficacy of the nucleic acid sequence or gene encoding for the gene product is increased or enhanced.

[0144] The terms “increase” relate to a corresponding change of a property an organism or in a part of a plant, an organism, such as a tissue, seed, root, leave, flower etc. or in a cell. Preferably, the overall activity in the volume is increased in cases the increase relates to the increase of an activity of a gene product, independent whether the amount of gene product or the specific activity of the gene product or both is increased or generated or whether the amount, stability or translation efficacy of the nucleic acid sequence or gene encoding for the gene product is increased.

[0145] Under “change of a property” it is understood that the activity, expression level or amount of a gene product or the metabolite content is changed in a specific volume relative to a corresponding volume of a control, reference or wild type, including the de novo creation of the activity or expression.

[0146] The terms “increase” include the change of said property in only parts of the subject of the present invention, for example, the modification can be found in compartment of a cell, like a organelle, or in a part of a plant, like tissue, seed, root, leave, flower etc. but is not detectable if the overall subject, i.e. complete cell or plant, is tested.

[0147] Accordingly, the term “increase” means that the specific activity of an enzyme as well as the amount of a compound or metabolite, e.g. of a polypeptide, a nucleic acid molecule of the invention or an encoding mRNA or DNA, can be increased in a volume.

[0148] The terms “wild type”, “control” or “reference” are exchangeable and can be a cell or a part of organisms such as an organelle like a chloroplast or a tissue, or an organism, in particular a plant, which was not modified or treated according to the herein described process according to the invention. Accordingly, the cell or a part of organisms such as an organelle like a chloroplast or a tissue, or an organism, in particular a plant used as wild typ, control or reference corresponds to the cell, organism, plant or part thereof as much as possible and is in any other property but in the result of the process of the invention as identical to the subject matter of the invention as possible. Thus, the wild type, control or reference is treated identically or as identical as possible, saying that only conditions or properties might be different which do not influence the quality of the tested property.

[0149] Preferably, any comparison is carried out under analogous conditions. The term “analogous conditions” means that all conditions such as, for example, culture or growing conditions, water content of the soil, temperature, humidity or surrounding air or soil, assay conditions (such as buffer composition, temperature, substrates, pathogen strain, concentrations and the like) are kept identical between the experiments to be compared.

[0150] The “reference”, “control”, or “wild type” is preferably a subject, e.g. an organelle, a cell, a tissue, an organism, in particular a plant, which was not modified or treated according to the herein described process of the invention and is in any other property as similar to the subject matter of the invention as possible. The reference, control or wild type is in its genome, transcriptome, proteome or metabolome as similar as possible to the subject of the present invention. Preferably, the term “reference-” “control-” or “wild type-”-organelle, -cell, -tissue or -organism, in particular plant, relates to an organelle, cell, tissue or organism, in particular plant, which is nearly genetically identical to the organelle, cell, tissue or organism, in particular plant, of the present invention or a part thereof preferably 95%, more preferred are 98%, even more preferred are 99,00%, in particular 99,10%, 99,30%, 99,50%, 99,70%, 99,90%, 99,99%, 99,999% or more. Most preferable the “reference”, “control”, or “wild type” is a subject, e.g. an organelle, a cell, a tissue, an organism, which is genetically identical to the organism, cell or organelle used according to the process of the invention except that the responsible or activity conferring nucleic acid molecules or the gene product encoded by them are amended, manipulated, exchanged or introduced according to the inventive process.

[0151] In case, a control, reference or wild type differing from the subject of the present invention only by not being subject of the process of the invention can not be provided, a control, reference or wild type can be an organism in which the cause for the modulation of an activity conferring the increased tolerance and/or resistance to environmental stress and increased biomass production as compared to a corresponding non-transformed wild type plant cell, plant or part thereof or expression of the nucleic acid molecule of the invention as described herein has been switched back or off, e.g. by knocking out the expression of responsible gene product, e.g. by antisense inhibition, by inactivation of an activator or agonist, by activation of an inhibitor or antagonist, by inhibition through adding inhibitory antibodies, by adding active compounds as e.g. hormones, by introducing negative dominant mutants, etc. A gene production can for example be knocked out by introducing inactivating point mutations, which lead to an enzymatic activity inhibition or a destabilization or an inhibition of the ability to bind to cofactors etc.

[0152] Accordingly, preferred reference subject is the starting subject of the present process of the invention. Preferably, the reference and the subject matter of the invention are compared after standardization and normalization, e.g. to the amount of total RNA, DNA, or Protein or activity or expression of reference genes, like housekeeping genes, such as ubiquitin, actin or ribosomal proteins.

[0153] The increase or modulation according to this invention can be constitutive, e.g. due to a stable permanent transgenic expression or to a stable mutation in the corresponding endogenous gene encoding the nucleic acid molecule of the invention or to a modulation of the expression or of the behavior of a gene conferring the expression of the polypeptide of the invention, or transient, e.g. due to an transient transformation or temporary addition of a modulator such as a agonist or antagonist or inducible, e.g. after transformation with a inducible construct carrying the nucleic acid molecule of the invention under control of a inducible promoter and adding the inducer, e.g. tetracycline or as described herein below.

[0154] The increase in activity of the polypeptide amounts in a cell, a tissue, a organelle, an organ or an organism or a part thereof preferably to at least 5%, preferably to at least 20% or at to least 50%, especially preferably to at least 70%, 80%, 90% or more, very especially preferably are to at least 200%, 300% or 400%, most preferably are to at least 500% or more in comparison to the control, reference or wild type. In one embodiment the term increase means the increase in amount in relation to the weight of the organism or part thereof (w/w).

[0155] In one embodiments the increase in activity of the polypeptide amounts in an organelle such as a plastid.

[0156] The specific activity of a polypeptide encoded by a nucleic acid molecule of the present invention or of the polypeptide of the present invention can be tested as described in the examples. In particular, the expression of a protein in question in a cell, e.g. a plant cell in comparison to a control is an easy test and can be performed as described in the state of the art.

[0157] The term “increase” includes, that a compound or an activity is introduced into a cell or a subcellular compartment or organelle de novo or that the compound or the activity has not been detectable before, in other words it is “generated”.

[0158] Accordingly, in the following, the term “increasing” also comprises the term “generating” or “stimulating”. The increased activity manifests itself in an increase of the increased tolerance and/or resistance to environmental stress and increased biomass production as compared to a corresponding non-transformed wild type plant cell, plant or part thereof.

[0159] The sequence of B0081 from Escherichia coli K12, e.g. as shown in column 5 of Table I, [sequences from Saccharomyces cerevisiae has been published in Goffeau et al., Science 274 (5287), 546-547, 1996, sequences from Escherichia coli has been published in Blattner et al., Science 277 (5331), 1453-1474 (1997), sequences from Synechocystis sp. has been published in Kaneko and TAbata, Plant Cell Physiology 38 (11), 1997 and its activity is published described as b0081-protein.

[0160] Accordingly, in one embodiment, the process of the present invention comprises increasing or generating the activity of a gene product with the activity of a “b0081-protein” from Escherichia coli K12 or its functional equivalent or its homolog, e.g. the increase of
[0161] (a) a gene product of a gene comprising the nucleic acid molecule as shown in column 5 of Table I and being depicted in the same respective line as said B0081 or a functional equivalent or a homologue thereof as shown depicted in column 7 of Table I, preferably a homologue or functional equivalent as shown depicted in column 7 of Table I B, and being depicted in the same respective line as said B0081; or
[0162] (b) a polypeptide comprising a polypeptide, a consensus sequence or a polypeptide motif as shown depicted in column 5 of Table II, and being depicted in the same respective line as said B0081 or a functional equivalent or a homologue thereof as depicted in column 7 of Table II or IV, preferably a homologue or functional equivalent as depicted in column 7 of Table II B, and being depicted in the same respective line as said B0081,

[0163] as mentioned herein, for the an increased tolerance and/or resistance to environmental stress and increased biomass production as compared to a corresponding non-transformed wild type plant cell, plant or part thereof in plant cell, plant or part thereof, as mentioned.

[0164] Accordingly, in one embodiment, the molecule which activity is to be increased in the process of the invention is the gene product with an activity of described as a “b0081-protein”, preferably it is the molecule of section (a) or (b) of this paragraph.

[0165] In one embodiment, said molecule, which activity is to be increased in the process of the invention and which is the gene product with an activity of described as a “b0081-protein”, is increased non-targeted.

[0166] The sequence of B0445 from Escherichia coli K12, e.g. as shown in column 5 of Table I, [sequences from Saccharomyces cerevisiae has been published in Goffeau et al., Science 274 (5287), 546-547, 1996, sequences from Escherichia coli has been published in Blattner et al., Science 277 (5331), 1453-1474 (1997), sequences from Synechocystis sp. has been published in Kaneko and TAbata, Plant Cell Physiology 38 (11), 1997 and its activity is published described as transporter subunit/periplasmic-binding component of ABC superfamily.

[0167] Accordingly, in one embodiment, the process of the present invention comprises increasing or generating the activity of a gene product with the activity of a “transporter subunit/periplasmic-binding component of ABC superfamily” from Escherichia coli K12 or its functional equivalent or its homolog, e.g. the increase of
[0168] (a) a gene product of a gene comprising the nucleic acid molecule as shown in column 5 of Table I and being depicted in the same respective line as said B0445 or a functional equivalent or a homologue thereof as shown depicted in column 7 of Table I, preferably a homologue or functional equivalent as shown depicted in column 7 of Table I B, and being depicted in the same respective line as said B0445; or
[0169] (b) a polypeptide comprising a polypeptide, a consensus sequence or a polypeptide motif as shown depicted in column 5 of Table II, and being depicted in the same respective line as said B0445 or a functional equivalent or a homologue thereof as depicted in column 7 of Table II or IV, preferably a homologue or functional equivalent as depicted in column 7 of Table II B, and being depicted in the same respective line as said B0445,

[0170] as mentioned herein, for the an increased tolerance and/or resistance to environmental stress and increased biomass production as compared to a corresponding non-transformed wild type plant cell, plant or part thereof in plant cell, plant or part thereof, as mentioned.

[0171] Accordingly, in one embodiment, the molecule which activity is to be increased in the process of the invention is the gene product with an activity of described as a “transporter subunit/periplasmic-binding component of ABC superfamily”, preferably it is the molecule of section (a) or (b) of this paragraph.

[0172] In one embodiment, said molecule, which activity is to be increased in the process of the invention and which is the gene product with an activity of described as a “transporter subunit/periplasmic-binding component of ABC superfamily”, is increased non-targeted.

[0173] The sequence of B0482 from Escherichia coli K12, e.g. as shown in column 5 of Table I, [sequences from Saccharomyces cerevisiae has been published in Goffeau et al., Science 274 (5287), 546-547, 1996, sequences from Escherichia coli has been published in Blattner et al., Science 277 (5331), 1453-1474 (1997), sequences from Synechocystis sp. has been published in Kaneko and TAbata, Plant Cell Physiology 38 (11), 1997 and its activity is published described as b0482-protein.

[0174] Accordingly, in one embodiment, the process of the present invention comprises increasing or generating the activity of a gene product with the activity of a “b0482-protein” from Escherichia coli K12 or its functional equivalent or its homolog, e.g. the increase of
[0175] (a) a gene product of a gene comprising the nucleic acid molecule as shown in column 5 of Table I and being depicted in the same respective line as said B0482 or a functional equivalent or a homologue thereof as shown depicted in column 7 of Table I, preferably a homologue or functional equivalent as shown depicted in column 7 of Table I B, and being depicted in the same respective line as said B0482; or
[0176] (b) a polypeptide comprising a polypeptide, a consensus sequence or a polypeptide motif as shown depicted in column 5 of Table II, and being depicted in the same respective line as said B0482 or a functional equivalent or a homologue thereof as depicted in column 7 of Table II or IV, preferably a homologue or functional equivalent as depicted in column 7 of Table II B, and being depicted in the same respective line as said B0482,

[0177] as mentioned herein, for the an increased tolerance and/or resistance to environmental stress and increased biomass production as compared to a corresponding non-transformed wild type plant cell, plant or part thereof in plant cell, plant or part thereof, as mentioned.

[0178] Accordingly, in one embodiment, the molecule which activity is to be increased in the process of the invention is the gene product with an activity of described as a “b0482-protein”, preferably it is the molecule of section (a) or (b) of this paragraph.

[0179] In one embodiment, said molecule, which activity is to be increased in the process of the invention and which is the gene product with an activity of described as a “b0482-protein”, is increased non-targeted.

[0180] The sequence of B0607 from Escherichia coli K12, e.g. as shown in column 5 of Table I, [sequences from Saccharomyces cerevisiae has been published in Goffeau et al., Science 274 (5287), 546-547, 1996, sequences from Escherichia coli has been published in Blattner et al., Science 277 (5331), 1453-1474 (1997), sequences from Synechocystis sp. has been published in Kaneko and TAbata, Plant Cell Physiology 38 (11), 1997 and its activity is published described as universal stress protein UP12.

[0181] Accordingly, in one embodiment, the process of the present invention comprises increasing or generating the activity of a gene product with the activity of a “universal stress protein UP12” from Escherichia coli K12 or its functional equivalent or its homolog, e.g. the increase of
[0182] (a) a gene product of a gene comprising the nucleic acid molecule as shown in column 5 of Table I and being depicted in the same respective line as said B0607 or a functional equivalent or a homologue thereof as shown depicted in column 7 of Table I, preferably a homologue or functional equivalent as shown depicted in column 7 of Table I B, and being depicted in the same respective line as said B0607; or
[0183] (b) a polypeptide comprising a polypeptide, a consensus sequence or a polypeptide motif as shown depicted in column 5 of Table II, and being depicted in the same respective line as said B0607 or a functional equivalent or a homologue thereof as depicted in column 7 of Table II or IV, preferably a homologue or functional equivalent as depicted in column 7 of Table II B, and being depicted in the same respective line as said B0607,

[0184] as mentioned herein, for the an increased tolerance and/or resistance to environmental stress and increased biomass production as compared to a corresponding non-transformed wild type plant cell, plant or part thereof in plant cell, plant or part thereof, as mentioned.

[0185] Accordingly, in one embodiment, the molecule which activity is to be increased in the process of the invention is the gene product with an activity of described as a “universal stress protein UP12”, preferably it is the molecule of section (a) or (b) of this paragraph.

[0186] In one embodiment, said molecule, which activity is to be increased in the process of the invention and which is the gene product with an activity of described as a “universal stress protein UP12”, is increased non-targeted.

[0187] The sequence of B0629 from Escherichia coli K12, e.g. as shown in column 5 of Table I, [sequences from Saccharomyces cerevisiae has been published in Goffeau et al., Science 274 (5287), 546-547, 1996, sequences from Escherichia coli has been published in Blattner et al., Science 277 (5331), 1453-1474 (1997), sequences from Synechocystis sp. has been published in Kaneko and TAbata, Plant Cell Physiology 38 (11), 1997 and its activity is published described as transcriptional regulator protein.

[0188] Accordingly, in one embodiment, the process of the present invention comprises increasing or generating the activity of a gene product with the activity of a “transcriptional regulator protein” from Escherichia coli K12 or its functional equivalent or its homolog, e.g. the increase of
[0189] (a) a gene product of a gene comprising the nucleic acid molecule as shown in column 5 of Table I and being depicted in the same respective line as said B0629 or a functional equivalent or a homologue thereof as shown depicted in column 7 of Table I, preferably a homologue or functional equivalent as shown depicted in column 7 of Table I B, and being depicted in the same respective line as said B0629; or
[0190] (b) a polypeptide comprising a polypeptide, a consensus sequence or a polypeptide motif as shown depicted in column 5 of Table II, and being depicted in the same respective line as said B0629 or a functional equivalent or a homologue thereof as depicted in column 7 of Table II or IV, preferably a homologue or functional equivalent as depicted in column 7 of Table II B, and being depicted in the same respective line as said B0629,
   as mentioned herein, for the an increased tolerance and/or resistance to environmental stress and increased biomass production as compared to a corresponding non-transformed wild type plant cell, plant or part thereof in plant cell, plant or part thereof, as mentioned.

[0191] Accordingly, in one embodiment, the molecule which activity is to be increased in the process of the invention is the gene product with an activity of described as a “transcriptional regulator protein”, preferably it is the molecule of section (a) or (b) of this paragraph.

[0192] In one embodiment, said molecule, which activity is to be increased in the process of the invention and which is the gene product with an activity of described as a “transcriptional regulator protein”, is increased non-targeted.

[0193] The sequence of B0631 from Escherichia coli K12, e.g. as shown in column 5 of Table I, [sequences from Saccharomyces cerevisiae has been published in Goffeau et al., Science 274 (5287), 546-547, 1996, sequences from Escherichia coli has been published in Blattner et al., Science 277 (5331), 1453-1474 (1997), sequences from Synechocystis sp. has been published in Kaneko and TAbata, Plant Cell Physiology 38 (11), 1997 and its activity is published described as b0631-protein.

[0194] Accordingly, in one embodiment, the process of the present invention comprises increasing or generating the activity of a gene product with the activity of a “b0631-protein” from Escherichia coli K12 or its functional equivalent or its homolog, e.g. the increase of
[0195] (a) a gene product of a gene comprising the nucleic acid molecule as shown in column 5 of Table I and being depicted in the same respective line as said B0631 or a functional equivalent or a homologue thereof as shown depicted in column 7 of Table I, preferably a homologue or functional equivalent as shown depicted in column 7 of Table I B, and being depicted in the same respective line as said B0631; or
[0196] (b) a polypeptide comprising a polypeptide, a consensus sequence or a polypeptide motif as shown depicted in column 5 of Table II, and being depicted in the same respective line as said B0631 or a functional equivalent or a homologue thereof as depicted in column 7 of Table II or IV, preferably a homologue or functional equivalent as depicted in column 7 of Table II B, and being depicted in the same respective line as said B0631,
   as mentioned herein, for the an increased tolerance and/or resistance to environmental stress and increased biomass production as compared to a corresponding non-transformed wild type plant cell, plant or part thereof in plant cell, plant or part thereof, as mentioned.

[0197] Accordingly, in one embodiment, the molecule which activity is to be increased in the process of the invention is the gene product with an activity of described as a “b0631-protein”, preferably it is the molecule of section (a) or (b) of this paragraph.

[0198] In one embodiment, said molecule, which activity is to be increased in the process of the invention and which is the gene product with an activity of described as a “b0631-protein”, is increased non-targeted.

[0199] The sequence of B0697 from Escherichia coli K12, e.g. as shown in column 5 of Table I, [sequences from Saccharomyces cerevisiae has been published in Goffeau et al., Science 274 (5287), 546-547, 1996, sequences from Escherichia coli has been published in Blattner et al., Science 277 (5331), 1453-1474 (1997), sequences from Synechocystis sp. has been published in Kaneko and TAbata, Plant Cell Physiology 38 (11), 1997 and its activity is published described as potassium-transporting ATPase (subunit B).

[0200] Accordingly, in one embodiment, the process of the present invention comprises increasing or generating the activity of a gene product with the activity of a “potassium-transporting ATPase (subunit B)” from Escherichia coli K12 or its functional equivalent or its homolog, e.g. the increase of
[0201] (a) a gene product of a gene comprising the nucleic acid molecule as shown in column 5 of Table I and being depicted in the same respective line as said B0697 or a functional equivalent or a homologue thereof as shown depicted in column 7 of Table I, preferably a homologue or functional equivalent as shown depicted in column 7 of Table I B, and being depicted in the same respective line as said B0697; or
[0202] (b) a polypeptide comprising a polypeptide, a consensus sequence or a polypeptide motif as shown depicted in column 5 of Table II, and being depicted in the same respective line as said B0697 or a functional equivalent or a homologue thereof as depicted in column 7 of Table II or IV, preferably a homologue or functional equivalent as depicted in column 7 of Table II B, and being depicted in the same respective line as said B0697,
   as mentioned herein, for the an increased tolerance and/or resistance to environmental stress and increased biomass production as compared to a corresponding non-transformed wild type plant cell, plant or part thereof in plant cell, plant or part thereof, as mentioned.

[0203] Accordingly, in one embodiment, the molecule which activity is to be increased in the process of the invention is the gene product with an activity of described as a “potassium-transporting ATPase (subunit B)”, preferably it is the molecule of section (a) or (b) of this paragraph.

[0204] In one embodiment, said molecule, which activity is to be increased in the process of the invention and which is the gene product with an activity of described as a “potassium-transporting ATPase (subunit B)”, is increased non-targeted.

[0205] The sequence of B0753 from Escherichia coli K12, e.g. as shown in column 5 of Table I, [sequences from Saccharomyces cerevisiae has been published in Goffeau et al., Science 274 (5287), 546-547, 1996, sequences from Escherichia coli has been published in Blattner et al., Science 277 (5331), 1453-1474 (1997), sequences from Synechocystis sp. has been published in Kaneko and TAbata, Plant Cell Physiology 38 (11), 1997 and its activity is published described as b0753-protein.

[0206] Accordingly, in one embodiment, the process of the present invention comprises increasing or generating the activity of a gene product with the activity of a “b0753-protein” from Escherichia coli K12 or its functional equivalent or its homolog, e.g. the increase of
[0207] (a) a gene product of a gene comprising the nucleic acid molecule as shown in column 5 of Table I and being depicted in the same respective line as said B0753 or a functional equivalent or a homologue thereof as shown depicted in column 7 of Table I, preferably a homologue or functional equivalent as shown depicted in column 7 of Table I B, and being depicted in the same respective line as said B0753; or
[0208] (b) a polypeptide comprising a polypeptide, a consensus sequence or a polypeptide motif as shown depicted in column 5 of Table II, and being depicted in the same respective line as said B0753 or a functional equivalent or a homologue thereof as depicted in column 7 of Table II or IV, preferably a homologue or functional equivalent as depicted in column 7 of Table II B, and being depicted in the same respective line as said B0753,
   as mentioned herein, for the an increased tolerance and/or resistance to environmental stress and increased biomass production as compared to a corresponding non-transformed wild type plant cell, plant or part thereof in plant cell, plant or part thereof, as mentioned.

[0209] Accordingly, in one embodiment, the molecule which activity is to be increased in the process of the invention is the gene product with an activity of described as a “b0753-protein”, preferably it is the molecule of section (a) or (b) of this paragraph.

[0210] In one embodiment, said molecule, which activity is to be increased in the process of the invention and which is the gene product with an activity of described as a “b0753-protein”, is increased non-targeted.

[0211] The sequence of B0813 from Escherichia coli K12, e.g. as shown in column 5 of Table I, [sequences from Saccharomyces cerevisiae has been published in Goffeau et al., Science 274 (5287), 546-547, 1996, sequences from Escherichia coli has been published in Blattner et al., Science 277 (5331), 1453-1474 (1997), sequences from Synechocystis sp. has been published in Kaneko and TAbata, Plant Cell Physiology 38 (11), 1997 and its activity is published described as threonine and homoserine efflux system.

[0212] Accordingly, in one embodiment, the process of the present invention comprises increasing or generating the activity of a gene product with the activity of a “threonine and homoserine efflux system” from Escherichia coli K12 or its functional equivalent or its homolog, e.g. the increase of
[0213] (a) a gene product of a gene comprising the nucleic acid molecule as shown in column 5 of Table I and being depicted in the same respective line as said B0813 or a functional equivalent or a homologue thereof as shown depicted in column 7 of Table I, preferably a homologue or functional equivalent as shown depicted in column 7 of Table I B, and being depicted in the same respective line as said B0813; or
[0214] (b) a polypeptide comprising a polypeptide, a consensus sequence or a polypeptide motif as shown depicted in column 5 of Table II, and being depicted in the same respective line as said B0813 or a functional equivalent or a homologue thereof as depicted in column 7 of Table II or IV, preferably a homologue or functional equivalent as depicted in column 7 of Table II B, and being depicted in the same respective line as said B0813,
   as mentioned herein, for the an increased tolerance and/or resistance to environmental stress and increased biomass production as compared to a corresponding non-transformed wild type plant cell, plant or part thereof in plant cell, plant or part thereof, as mentioned.

[0215] Accordingly, in one embodiment, the molecule which activity is to be increased in the process of the invention is the gene product with an activity of described as a “threonine and homoserine efflux system”, preferably it is the molecule of section (a) or (b) of this paragraph.

[0216] In one embodiment, said molecule, which activity is to be increased in the process of the invention and which is the gene product with an activity of described as a “threonine and homoserine efflux system”, is increased non-targeted.

[0217] The sequence of B0845 from Escherichia coli K12, e.g. as shown in column 5 of Table I, [sequences from Saccharomyces cerevisiae has been published in Goffeau et al., Science 274 (5287), 546-547, 1996, sequences from Escherichia coli has been published in Blattner et al., Science 277 (5331), 1453-1474 (1997), sequences from Synechocystis sp. has been published in Kaneko and TAbata, Plant Cell Physiology 38 (11), 1997 and its activity is published described as predicted transporter protein.

[0218] Accordingly, in one embodiment, the process of the present invention comprises increasing or generating the activity of a gene product with the activity of a “predicted transporter protein” from Escherichia coli K12 or its functional equivalent or its homolog, e.g. the increase of
[0219] (a) a gene product of a gene comprising the nucleic acid molecule as shown in column 5 of Table I and being depicted in the same respective line as said B0845 or a functional equivalent or a homologue thereof as shown depicted in column 7 of Table I, preferably a homologue or functional equivalent as shown depicted in column 7 of Table I B, and being depicted in the same respective line as said B0845; or
[0220] (b) a polypeptide comprising a polypeptide, a consensus sequence or a polypeptide motif as shown depicted in column 5 of Table II, and being depicted in the same respective line as said B0845 or a functional equivalent or a homologue thereof as depicted in column 7 of Table II or IV, preferably a homologue or functional equivalent as depicted in column 7 of Table II B, and being depicted in the same respective line as said B0845,
[0221] as mentioned herein, for the an increased tolerance and/or resistance to environmental stress and increased biomass production as compared to a corresponding non-transformed wild type plant cell, plant or part thereof in plant cell, plant or part thereof, as mentioned.

[0222] Accordingly, in one embodiment, the molecule which activity is to be increased in the process of the invention is the gene product with an activity of described as a “predicted transporter protein”, preferably it is the molecule of section (a) or (b) of this paragraph.

[0223] In one embodiment, said molecule, which activity is to be increased in the process of the invention and which is the gene product with an activity of described as a “predicted transporter protein”, is increased non-targeted.

[0224] The sequence of B0866 from Escherichia coli K12, e.g. as shown in column 5 of Table I, [sequences from Saccharomyces cerevisiae has been published in Goffeau et al., Science 274 (5287), 546-547, 1996, sequences from Escherichia coli has been published in Blattner et al., Science 277 (5331), 1453-1474 (1997), sequences from Synechocystis sp. has been published in Kaneko and TAbata, Plant Cell Physiology 38 (11), 1997 and its activity is published described as b0866-protein.

[0225] Accordingly, in one embodiment, the process of the present invention comprises increasing or generating the activity of a gene product with the activity of a “b0866-protein” from Escherichia coli K12 or its functional equivalent or its homolog, e.g. the increase of
[0226] (a) a gene product of a gene comprising the nucleic acid molecule as shown in column 5 of Table I and being depicted in the same respective line as said B0866 or a functional equivalent or a homologue thereof as shown depicted in column 7 of Table I, preferably a homologue or functional equivalent as shown depicted in column 7 of Table I B, and being depicted in the same respective line as said B0866; or
[0227] (b) a polypeptide comprising a polypeptide, a consensus sequence or a polypeptide motif as shown depicted in column 5 of Table II, and being depicted in the same respective line as said B0866 or a functional equivalent or a homologue thereof as depicted in column 7 of Table II or IV, preferably a homologue or functional equivalent as depicted in column 7 of Table II B, and being depicted in the same respective line as said B0866,
   as mentioned herein, for the an increased tolerance and/or resistance to environmental stress and increased biomass production as compared to a corresponding non-transformed wild type plant cell, plant or part thereof in plant cell, plant or part thereof, as mentioned.

[0228] Accordingly, in one embodiment, the molecule which activity is to be increased in the process of the invention is the gene product with an activity of described as a “b0866-protein”, preferably it is the molecule of section (a) or (b) of this paragraph.

[0229] In one embodiment, said molecule, which activity is to be increased in the process of the invention and which is the gene product with an activity of described as a “b0866-protein”, is increased non-targeted.

[0230] The sequence of B0963 from Escherichia coli K12, e.g. as shown in column 5 of Table I, [sequences from Saccharomyces cerevisiae has been published in Goffeau et al., Science 274 (5287), 546-547, 1996, sequences from Escherichia coli has been published in Blattner et al., Science 277 (5331), 1453-1474 (1997), sequences from Synechocystis sp. has been published in Kaneko and TAbata, Plant Cell Physiology 38 (11), 1997 and its activity is published described as methylglyoxal synthase.

[0231] Accordingly, in one embodiment, the process of the present invention comprises increasing or generating the activity of a gene product with the activity of a “methylglyoxal synthase” from Escherichia coli K12 or its functional equivalent or its homolog, e.g. the increase of
[0232] (a) a gene product of a gene comprising the nucleic acid molecule as shown in column 5 of Table I and being depicted in the same respective line as said B0963 or a functional equivalent or a homologue thereof as shown depicted in column 7 of Table I, preferably a homologue or functional equivalent as shown depicted in column 7 of Table I B, and being depicted in the same respective line as said B0963; or
[0233] (b) a polypeptide comprising a polypeptide, a consensus sequence or a polypeptide motif as shown depicted in column 5 of Table II, and being depicted in the same respective line as said B0963 or a functional equivalent or a homologue thereof as depicted in column 7 of Table II or IV, preferably a homologue or functional equivalent as depicted in column 7 of Table II B, and being depicted in the same respective line as said B0963,
   as mentioned herein, for the an increased tolerance and/or resistance to environmental stress and increased biomass production as compared to a corresponding non-transformed wild type plant cell, plant or part thereof in plant cell, plant or part thereof, as mentioned.

[0234] Accordingly, in one embodiment, the molecule which activity is to be increased in the process of the invention is the gene product with an activity of described as a “methylglyoxal synthase”, preferably it is the molecule of section (a) or (b) of this paragraph.

[0235] In one embodiment, said molecule, which activity is to be increased in the process of the invention and which is the gene product with an activity of described as a “methylglyoxal synthase”, is increased non-targeted.

[0236] The sequence of B0975 from Escherichia coli K12, e.g. as shown in column 5 of Table I, [sequences from Saccharomyces cerevisiae has been published in Goffeau et al., Science 274 (5287), 546-547, 1996, sequences from Escherichia coli has been published in Blattner et al., Science 277 (5331), 1453-1474 (1997), sequences from Synechocystis sp. has been published in Kaneko and TAbata, Plant Cell Physiology 38 (11), 1997 and its activity is published described as HyaA/HyaB-processing protein.

[0237] Accordingly, in one embodiment, the process of the present invention comprises increasing or generating the activity of a gene product with the activity of a “HyaA/HyaB-processing protein” from Escherichia coli K12 or its functional equivalent or its homolog, e.g. the increase of
[0238] (a) a gene product of a gene comprising the nucleic acid molecule as shown in column 5 of Table I and being depicted in the same respective line as said B0975 or a functional equivalent or a homologue thereof as shown depicted in column 7 of Table I, preferably a homologue or functional equivalent as shown depicted in column 7 of Table I B, and being depicted in the same respective line as said B0975; or
[0239] (b) a polypeptide comprising a polypeptide, a consensus sequence or a polypeptide motif as shown depicted in column 5 of Table II, and being depicted in the same respective line as said B0975 or a functional equivalent or a homologue thereof as depicted in column 7 of Table II or IV, preferably a homologue or functional equivalent as depicted in column 7 of Table II B, and being depicted in the same respective line as said B0975,
   as mentioned herein, for the an increased tolerance and/or resistance to environmental stress and increased biomass production as compared to a corresponding non-transformed wild type plant cell, plant or part thereof in plant cell, plant or part thereof, as mentioned.

[0240] Accordingly, in one embodiment, the molecule which activity is to be increased in the process of the invention is the gene product with an activity of described as a “HyaA/HyaB-processing protein”, preferably it is the molecule of section (a) or (b) of this paragraph.

[0241] In one embodiment, said molecule, which activity is to be increased in the process of the invention and which is the gene product with an activity of described as a “HyaA/HyaB-processing protein”, is increased non-targeted.

[0242] The sequence of B1007 from Escherichia coli K12, e.g. as shown in column 5 of Table I, [sequences from Saccharomyces cerevisiae has been published in Goffeau et al., Science 274 (5287), 546-547, 1996, sequences from Escherichia coli has been published in Blattner et al., Science 277 (5331), 1453-1474 (1997), sequences from Synechocystis sp. has been published in Kaneko and TAbata, Plant Cell Physiology 38 (11), 1997 and its activity is published described as predicted oxidoreductase (flavin:NADH component).

[0243] Accordingly, in one embodiment, the process of the present invention comprises increasing or generating the activity of a gene product with the activity of a “predicted oxidoreductase (flavin:NADH component)” from Escherichia coli K12 or its functional equivalent or its homolog, e.g. the increase of
[0244] (a) a gene product of a gene comprising the nucleic acid molecule as shown in column 5 of Table I and being depicted in the same respective line as said B1007 or a functional equivalent or a homologue thereof as shown depicted in column 7 of Table I, preferably a homologue or functional equivalent as shown depicted in column 7 of Table I B, and being depicted in the same respective line as said B1007; or
[0245] (b) a polypeptide comprising a polypeptide, a consensus sequence or a polypeptide motif as shown depicted in column 5 of Table II, and being depicted in the same respective line as said B1007 or a functional equivalent or a homologue thereof as depicted in column 7 of Table II or IV, preferably a homologue or functional equivalent as depicted in column 7 of Table II B, and being depicted in the same respective line as said B1007,
   as mentioned herein, for the an increased tolerance and/or resistance to environmental stress and increased biomass production as compared to a corresponding non-transformed wild type plant cell, plant or part thereof in plant cell, plant or part thereof, as mentioned.

[0246] Accordingly, in one embodiment, the molecule which activity is to be increased in the process of the invention is the gene product with an activity of described as a “predicted oxidoreductase (flavin:NADH component)”, preferably it is the molecule of section (a) or (b) of this paragraph.

[0247] In one embodiment, said molecule, which activity is to be increased in the process of the invention and which is the gene product with an activity of described as a “predicted oxidoreductase (flavin:NADH component)”, is increased non-targeted.

[0248] The sequence of B1052 from Escherichia coli K12, e.g. as shown in column 5 of Table I, [sequences from Saccharomyces cerevisiae has been published in Goffeau et al., Science 274 (5287), 546-547, 1996, sequences from Escherichia coli has been published in Blattner et al., Science 277 (5331), 1453-1474 (1997), sequences from Synechocystis sp. has been published in Kaneko and TAbata, Plant Cell Physiology 38 (11), 1997 and its activity is published described as b1052-protein.

[0249] Accordingly, in one embodiment, the process of the present invention comprises increasing or generating the activity of a gene product with the activity of a “b1052-protein” from Escherichia coli K12 or its functional equivalent or its homolog, e.g. the increase of
[0250] (a) a gene product of a gene comprising the nucleic acid molecule as shown in column 5 of Table I and being depicted in the same respective line as said B1052 or a functional equivalent or a homologue thereof as shown depicted in column 7 of Table I, preferably a homologue or functional equivalent as shown depicted in column 7 of Table I B, and being depicted in the same respective line as said B1052; or
[0251] (b) a polypeptide comprising a polypeptide, a consensus sequence or a polypeptide motif as shown depicted in column 5 of Table II, and being depicted in the same respective line as said B1052 or a functional equivalent or a homologue thereof as depicted in column 7 of Table II or IV, preferably a homologue or functional equivalent as depicted in column 7 of Table II B, and being depicted in the same respective line as said B1052,
   as mentioned herein, for the an increased tolerance and/or resistance to environmental stress and increased biomass production as compared to a corresponding non-transformed wild type plant cell, plant or part thereof in plant cell, plant or part thereof, as mentioned.

[0252] Accordingly, in one embodiment, the molecule which activity is to be increased in the process of the invention is the gene product with an activity of described as a “b1052-protein”, preferably it is the molecule of section (a) or (b) of this paragraph.

[0253] In one embodiment, said molecule, which activity is to be increased in the process of the invention and which is the gene product with an activity of described as a “b1052-protein”, is increased non-targeted.

[0254] The sequence of B1091 from Escherichia coli K12, e.g. as shown in column 5 of Table I, [sequences from Saccharomyces cerevisiae has been published in Goffeau et al., Science 274 (5287), 546-547, 1996, sequences from Escherichia coli has been published in Blattner et al., Science 277 (5331), 1453-1474 (1997), sequences from Synechocystis sp. has been published in Kaneko and TAbata, Plant Cell Physiology 38 (11), 1997 and its activity is published described as 3-oxoacyl-(acyl carrier protein) synthase.

[0255] Accordingly, in one embodiment, the process of the present invention comprises increasing or generating the activity of a gene product with the activity of a “3-oxoacyl-(acyl carrier protein) synthase” from Escherichia coli K12 or its functional equivalent or its homolog, e.g. the increase of
[0256] (a) a gene product of a gene comprising the nucleic acid molecule as shown in column 5 of Table I and being depicted in the same respective line as said B1091 or a functional equivalent or a homologue thereof as shown depicted in column 7 of Table I, preferably a homologue or functional equivalent as shown depicted in column 7 of Table I B, and being depicted in the same respective line as said B1091; or
[0257] (b) a polypeptide comprising a polypeptide, a consensus sequence or a polypeptide motif as shown depicted in column 5 of Table II, and being depicted in the same respective line as said B1091 or a functional equivalent or a homologue thereof as depicted in column 7 of Table II or IV, preferably a homologue or functional equivalent as depicted in column 7 of Table II B, and being depicted in the same respective line as said B1091,
   as mentioned herein, for the an increased tolerance and/or resistance to environmental stress and increased biomass production as compared to a corresponding non-transformed wild type plant cell, plant or part thereof in plant cell, plant or part thereof, as mentioned.

[0258] Accordingly, in one embodiment, the molecule which activity is to be increased in the process of the invention is the gene product with an activity of described as a “3-oxoacyl-(acyl carrier protein) synthase”, preferably it is the molecule of section (a) or (b) of this paragraph.

[0259] In one embodiment, said molecule, which activity is to be increased in the process of the invention and which is the gene product with an activity of described as a “3-oxoacyl-(acyl carrier protein) synthase”, is increased plastidic.

[0260] The sequence of B1161 from Escherichia coli K12, e.g. as shown in column 5 of Table I, [sequences from Saccharomyces cerevisiae has been published in Goffeau et al., Science 274 (5287), 546-547, 1996, sequences from Escherichia coli has been published in Blattner et al., Science 277 (5331), 1453-1474 (1997), sequences from Synechocystis sp. has been published in Kaneko and TAbata, Plant Cell Physiology 38 (11), 1997 and its activity is published described as b1161-protein.

[0261] Accordingly, in one embodiment, the process of the present invention comprises increasing or generating the activity of a gene product with the activity of a “b1161-protein” from Escherichia coli K12 or its functional equivalent or its homolog, e.g. the increase of
[0262] (a) a gene product of a gene comprising the nucleic acid molecule as shown in column 5 of Table I and being depicted in the same respective line as said B1161 or a functional equivalent or a homologue thereof as shown depicted in column 7 of Table I, preferably a homologue or functional equivalent as shown depicted in column 7 of Table I B, and being depicted in the same respective line as said B1161; or
[0263] (b) a polypeptide comprising a polypeptide, a consensus sequence or a polypeptide motif as shown depicted in column 5 of Table II, and being depicted in the same respective line as said B1161 or a functional equivalent or a homologue thereof as depicted in column 7 of Table II or IV, preferably a homologue or functional equivalent as depicted in column 7 of Table II B, and being depicted in the same respective line as said B1161,
   as mentioned herein, for the an increased tolerance and/or resistance to environmental stress and increased biomass production as compared to a corresponding non-transformed wild type plant cell, plant or part thereof in plant cell, plant or part thereof, as mentioned.

[0264] Accordingly, in one embodiment, the molecule which activity is to be increased in the process of the invention is the gene product with an activity of described as a “b1161-protein”, preferably it is the molecule of section (a) or (b) of this paragraph.

[0265] In one embodiment, said molecule, which activity is to be increased in the process of the invention and which is the gene product with an activity of described as a “b1161-protein”, is increased non-targeted.

[0266] The sequence of B1186 from Escherichia coli K12, e.g. as shown in column 5 of Table I, [sequences from Saccharomyces cerevisiae has been published in Goffeau et al., Science 274 (5287), 546-547, 1996, sequences from Escherichia coli has been published in Blattner et al., Science 277 (5331), 1453-1474 (1997), sequences from Synechocystis sp. has been published in Kaneko and TAbata, Plant Cell Physiology 38 (11), 1997 and its activity is published described as sodium/proton antiporter.

[0267] Accordingly, in one embodiment, the process of the present invention comprises increasing or generating the activity of a gene product with the activity of a “sodium/proton antiporter” from Escherichia coli K12 or its functional equivalent or its homolog, e.g. the increase of
[0268] (a) a gene product of a gene comprising the nucleic acid molecule as shown in column 5 of Table I and being depicted in the same respective line as said B1186 or a functional equivalent or a homologue thereof as shown depicted in column 7 of Table I, preferably a homologue or functional equivalent as shown depicted in column 7 of Table I B, and being depicted in the same respective line as said B1186; or
[0269] (b) a polypeptide comprising a polypeptide, a consensus sequence or a polypeptide motif as shown depicted in column 5 of Table II, and being depicted in the same respective line as said B1186 or a functional equivalent or a homologue thereof as depicted in column 7 of Table II or IV, preferably a homologue or functional equivalent as depicted in column 7 of Table II B, and being depicted in the same respective line as said B1186,
   as mentioned herein, for the an increased tolerance and/or resistance to environmental stress and increased biomass production as compared to a corresponding non-transformed wild type plant cell, plant or part thereof in plant cell, plant or part thereof, as mentioned.

[0270] Accordingly, in one embodiment, the molecule which activity is to be increased in the process of the invention is the gene product with an activity of described as a “sodium/proton antiporter”, preferably it is the molecule of section (a) or (b) of this paragraph.

[0271] In one embodiment, said molecule, which activity is to be increased in the process of the invention and which is the gene product with an activity of described as a “sodium/proton antiporter”, is increased non-targeted.

[0272] The sequence of B1291 from Escherichia coli K12, e.g. as shown in column 5 of Table I, [sequences from Saccharomyces cerevisiae has been published in Goffeau et al., Science 274 (5287), 546-547, 1996, sequences from Escherichia coli has been published in Blattner et al., Science 277 (5331), 1453-1474 (1997), sequences from Synechocystis sp. has been published in Kaneko and TAbata, Plant Cell Physiology 38 (11), 1997 and its activity is published described as predicted antimicrobial peptide transporter subunit.

[0273] Accordingly, in one embodiment, the process of the present invention comprises increasing or generating the activity of a gene product with the activity of a “predicted antimicrobial peptide transporter subunit” from Escherichia coli K12 or its functional equivalent or its homolog, e.g. the increase of
[0274] (a) a gene product of a gene comprising the nucleic acid molecule as shown in column 5 of Table I and being depicted in the same respective line as said B1291 or a functional equivalent or a homologue thereof as shown depicted in column 7 of Table I, preferably a homologue or functional equivalent as shown depicted in column 7 of Table I B, and being depicted in the same respective line as said B1291; or
[0275] (b) a polypeptide comprising a polypeptide, a consensus sequence or a polypeptide motif as shown depicted in column 5 of Table II, and being depicted in the same respective line as said B1291 or a functional equivalent or a homologue thereof as depicted in column 7 of Table II or IV, preferably a homologue or functional equivalent as depicted in column 7 of Table II B, and being depicted in the same respective line as said B1291,
   as mentioned herein, for the an increased tolerance and/or resistance to environmental stress and increased biomass production as compared to a corresponding non-transformed wild type plant cell, plant or part thereof in plant cell, plant or part thereof, as mentioned.

[0276] Accordingly, in one embodiment, the molecule which activity is to be increased in the process of the invention is the gene product with an activity of described as a “predicted antimicrobial peptide transporter subunit”, preferably it is the molecule of section (a) or (b) of this paragraph.

[0277] In one embodiment, said molecule, which activity is to be increased in the process of the invention and which is the gene product with an activity of described as a “predicted antimicrobial peptide transporter subunit”, is increased plastidic.

[0278] The sequence of B1294 from Escherichia coli K12, e.g. as shown in column 5 of Table

[0279] I, [sequences from Saccharomyces cerevisiae has been published in Goffeau et al., Science 274 (5287), 546-547, 1996, sequences from Escherichia coli has been published in Blattner et al., Science 277 (5331), 1453-1474 (1997), sequences from Synechocystis sp. has been published in Kaneko and TAbata, Plant Cell Physiology 38 (11), 1997 and its activity is published described as predicted antimicrobial peptide transporter subunit.

[0280] Accordingly, in one embodiment, the process of the present invention comprises increasing or generating the activity of a gene product with the activity of a “predicted antimicrobial peptide transporter subunit” from Escherichia coli K12 or its functional equivalent or its homolog, e.g. the increase of
[0281] (a) a gene product of a gene comprising the nucleic acid molecule as shown in column 5 of Table I and being depicted in the same respective line as said B1294 or a functional equivalent or a homologue thereof as shown depicted in column 7 of Table I, preferably a homologue or functional equivalent as shown depicted in column 7 of Table I B, and being depicted in the same respective line as said B1294; or
[0282] (b) a polypeptide comprising a polypeptide, a consensus sequence or a polypeptide motif as shown depicted in column 5 of Table II, and being depicted in the same respective line as said B1294 or a functional equivalent or a homologue thereof as depicted in column 7 of Table II or IV, preferably a homologue or functional equivalent as depicted in column 7 of Table II B, and being depicted in the same respective line as said B1294,
   as mentioned herein, for the an increased tolerance and/or resistance to environmental stress and increased biomass production as compared to a corresponding non-transformed wild type plant cell, plant or part thereof in plant cell, plant or part thereof, as mentioned.

[0283] Accordingly, in one embodiment, the molecule which activity is to be increased in the process of the invention is the gene product with an activity of described as a “predicted antimicrobial peptide transporter subunit”, preferably it is the molecule of section (a) or (b) of this paragraph.

[0284] In one embodiment, said molecule, which activity is to be increased in the process of the invention and which is the gene product with an activity of described as a “predicted antimicrobial peptide transporter subunit”, is increased plastidic.

[0285] The sequence of B1423 from Escherichia coli K12, e.g. as shown in column 5 of Table

[0286] I, [sequences from Saccharomyces cerevisiae has been published in Goffeau et al., Science 274 (5287), 546-547, 1996, sequences from Escherichia coli has been published in Blattner et al., Science 277 (5331), 1453-1474 (1997), sequences from Synechocystis sp. has been published in Kaneko and TAbata, Plant Cell Physiology 38 (11), 1997 and its activity is published described as b1423-protein.

[0287] Accordingly, in one embodiment, the process of the present invention comprises increasing or generating the activity of a gene product with the activity of a “b1423-protein” from Escherichia coli K12 or its functional equivalent or its homolog, e.g. the increase of
[0288] (a) a gene product of a gene comprising the nucleic acid molecule as shown in column 5 of Table I and being depicted in the same respective line as said B1423 or a functional equivalent or a homologue thereof as shown depicted in column 7 of Table I, preferably a homologue or functional equivalent as shown depicted in column 7 of Table I B, and being depicted in the same respective line as said B1423; or
[0289] (b) a polypeptide comprising a polypeptide, a consensus sequence or a polypeptide motif as shown depicted in column 5 of Table II, and being depicted in the same respective line as said B1423 or a functional equivalent or a homologue thereof as depicted in column 7 of Table II or IV, preferably a homologue or functional equivalent as depicted in column 7 of Table II B, and being depicted in the same respective line as said B1423,
   as mentioned herein, for the an increased tolerance and/or resistance to environmental stress and increased biomass production as compared to a corresponding non-transformed wild type plant cell, plant or part thereof in plant cell, plant or part thereof, as mentioned.

[0290] Accordingly, in one embodiment, the molecule which activity is to be increased in the process of the invention is the gene product with an activity of described as a “b1423-protein”, preferably it is the molecule of section (a) or (b) of this paragraph.

[0291] In one embodiment, said molecule, which activity is to be increased in the process of the invention and which is the gene product with an activity of described as a “b1423-protein”, is increased non-targeted.

[0292] The sequence of B1597 from Escherichia coli K12, e.g. as shown in column 5 of Table I, [sequences from Saccharomyces cerevisiae has been published in Goffeau et al., Science 274 (5287), 546-547, 1996, sequences from Escherichia coli has been published in Blattner et al., Science 277 (5331), 1453-1474 (1997), sequences from Synechocystis sp. has been published in Kaneko and TAbata, Plant Cell Physiology 38 (11), 1997 and its activity is published described as acid shock protein precursor.

[0293] Accordingly, in one embodiment, the process of the present invention comprises increasing or generating the activity of a gene product with the activity of a “acid shock protein precursor” from Escherichia coli K12 or its functional equivalent or its homolog, e.g. the increase of
[0294] (a) a gene product of a gene comprising the nucleic acid molecule as shown in column 5 of Table I and being depicted in the same respective line as said B1597 or a functional equivalent or a homologue thereof as shown depicted in column 7 of Table I, preferably a homologue or functional equivalent as shown depicted in column 7 of Table I B, and being depicted in the same respective line as said B1597; or
[0295] (b) a polypeptide comprising a polypeptide, a consensus sequence or a polypeptide motif as shown depicted in column 5 of Table II, and being depicted in the same respective line as said B1597 or a functional equivalent or a homologue thereof as depicted in column 7 of Table II or IV, preferably a homologue or functional equivalent as depicted in column 7 of Table II B, and being depicted in the same respective line as said B1597,
   as mentioned herein, for the an increased tolerance and/or resistance to environmental stress and increased biomass production as compared to a corresponding nontransformed wild type plant cell, plant or part thereof in plant cell, plant or part thereof, as mentioned.

[0296] Accordingly, in one embodiment, the molecule which activity is to be increased in the process of the invention is the gene product with an activity of described as a “acid shock protein precursor”, preferably it is the molecule of section (a) or (b) of this paragraph.

[0297] In one embodiment, said molecule, which activity is to be increased in the process of the invention and which is the gene product with an activity of described as a “acid shock protein precursor”, is increased non-targeted.

[0298] The sequence of B1605 from Escherichia coli K12, e.g. as shown in column 5 of Table I, [sequences from Saccharomyces cerevisiae has been published in Goffeau et al., Science 274 (5287), 546-547, 1996, sequences from Escherichia coli has been published in Blattner et al., Science 277 (5331), 1453-1474 (1997), sequences from Synechocystis sp. has been published in Kaneko and TAbata, Plant Cell Physiology 38 (11), 1997 and its activity is published described as predicted arginine/ornithine transporter.

[0299] Accordingly, in one embodiment, the process of the present invention comprises increasing or generating the activity of a gene product with the activity of a “predicted arginine/ornithine transporter” from Escherichia coli K12 or its functional equivalent or its homolog, e.g. the increase of
[0300] (a) a gene product of a gene comprising the nucleic acid molecule as shown in column 5 of Table I and being depicted in the same respective line as said B1605 or a functional equivalent or a homologue thereof as shown depicted in column 7 of Table I, preferably a homologue or functional equivalent as shown depicted in column 7 of Table I B, and being depicted in the same respective line as said B1605; or
[0301] (b) a polypeptide comprising a polypeptide, a consensus sequence or a polypeptide motif as shown depicted in column 5 of Table II, and being depicted in the same respective line as said B1605 or a functional equivalent or a homologue thereof as depicted in column 7 of Table II or IV, preferably a homologue or functional equivalent as depicted in column 7 of Table II B, and being depicted in the same respective line as said B1605,
   as mentioned herein, for the an increased tolerance and/or resistance to environmental stress and increased biomass production as compared to a corresponding non-transformed wild type plant cell, plant or part thereof in plant cell, plant or part thereof, as mentioned.

[0302] Accordingly, in one embodiment, the molecule which activity is to be increased in the process of the invention is the gene product with an activity of described as a “predicted arginine/ornithine transporter”, preferably it is the molecule of section (a) or (b) of this paragraph.

[0303] In one embodiment, said molecule, which activity is to be increased in the process of the invention and which is the gene product with an activity of described as a “predicted arginine/ornithine transporter”, is increased non-targeted.

[0304] The sequence of B1704 from Escherichia coli K12, e.g. as shown in column 5 of Table I, [sequences from Saccharomyces cerevisiae has been published in Goffeau et al., Science 274 (5287), 546-547, 1996, sequences from Escherichia coli has been published in Blattner et al., Science 277 (5331), 1453-1474 (1997), sequences from Synechocystis sp. has been published in Kaneko and TAbata, Plant Cell Physiology 38 (11), 1997 and its activity is published described as 3-deoxy-D-arabino-heptulosonate-7-phosphatesynthase.

[0305] Accordingly, in one embodiment, the process of the present invention comprises increasing or generating the activity of a gene product with the activity of a “3-deoxy-D-arabino-heptulosonate-7-phosphatesynthase” from Escherichia coli K12 or its functional equivalent or its homolog, e.g. the increase of
[0306] (a) a gene product of a gene comprising the nucleic acid molecule as shown in column 5 of Table I and being depicted in the same respective line as said B1704 or a functional equivalent or a homologue thereof as shown depicted in column 7 of Table I, preferably a homologue or functional equivalent as shown depicted in column 7 of Table I B, and being depicted in the same respective line as said B1704; or
[0307] (b) a polypeptide comprising a polypeptide, a consensus sequence or a polypeptide motif as shown depicted in column 5 of Table II, and being depicted in the same respective line as said B1704 or a functional equivalent or a homologue thereof as depicted in column 7 of Table II or IV, preferably a homologue or functional equivalent as depicted in column 7 of Table II B, and being depicted in the same respective line as said B1704,
   as mentioned herein, for the an increased tolerance and/or resistance to environmental stress and increased biomass production as compared to a corresponding non-transformed wild type plant cell, plant or part thereof in plant cell, plant or part thereof, as mentioned.

[0308] Accordingly, in one embodiment, the molecule which activity is to be increased in the process of the invention is the gene product with an activity of described as a “3-deoxy-D-arabino-heptulosonate-7-phosphatesynthase”, preferably it is the molecule of section (a) or (b) of this paragraph.

[0309] In one embodiment, said molecule, which activity is to be increased in the process of the invention and which is the gene product with an activity of described as a “3-deoxy-D-arabino-heptulosonate-7-phosphatesynthase”, is increased non-targeted.

[0310] The sequence of B1736 from Escherichia coli K12, e.g. as shown in column 5 of Table I, [sequences from Saccharomyces cerevisiae has been published in Goffeau et al., Science 274 (5287), 546-547, 1996, sequences from Escherichia coli has been published in Blattner et al., Science 277 (5331), 1453-1474 (1997), sequences from Synechocystis sp. has been published in Kaneko and TAbata, Plant Cell Physiology 38 (11), 1997 and its activity is published described as N,N′-diacetylchitobiose-specific enzyme IIA component of PTS.

[0311] Accordingly, in one embodiment, the process of the present invention comprises increasing or generating the activity of a gene product with the activity of a “N,N′-diacetylchitobiose-specific enzyme IIA component of PTS” from Escherichia coli K12 or its functional equivalent or its homolog, e.g. the increase of
[0312] (a) a gene product of a gene comprising the nucleic acid molecule as shown in column 5 of Table I and being depicted in the same respective line as said B1736 or a functional equivalent or a homologue thereof as shown depicted in column 7 of Table I, preferably a homologue or functional equivalent as shown depicted in column 7 of Table I B, and being depicted in the same respective line as said B1736; or
[0313] (b) a polypeptide comprising a polypeptide, a consensus sequence or a polypeptide motif as shown depicted in column 5 of Table II, and being depicted in the same respective line as said B1736 or a functional equivalent or a homologue thereof as depicted in column 7 of Table II or IV, preferably a homologue or functional equivalent as depicted in column 7 of Table II B, and being depicted in the same respective line as said B1736,
   as mentioned herein, for the an increased tolerance and/or resistance to environmental stress and increased biomass production as compared to a corresponding non-transformed wild type plant cell, plant or part thereof in plant cell, plant or part thereof, as mentioned.

[0314] Accordingly, in one embodiment, the molecule which activity is to be increased in the process of the invention is the gene product with an activity of described as a “N,N′-diacetylchitobiose-specific enzyme IIA component of PTS”, preferably it is the molecule of section (a) or (b) of this paragraph.

[0315] In one embodiment, said molecule, which activity is to be increased in the process of the invention and which is the gene product with an activity of described as a “N,N′-diacetylchitobiose-specific enzyme IIA component of PTS”, is increased plastidic.

[0316] The sequence of B1798 from Escherichia coli K12, e.g. as shown in column 5 of Table I, [sequences from Saccharomyces cerevisiae has been published in Goffeau et al., Science 274 (5287), 546-547, 1996, sequences from Escherichia coli has been published in Blattner et al., Science 277 (5331), 1453-1474 (1997), sequences from Synechocystis sp. has been published in Kaneko and TAbata, Plant Cell Physiology 38 (11), 1997 and its activity is published described as neutral amino-acid efflux system.

[0317] Accordingly, in one embodiment, the process of the present invention comprises increasing or generating the activity of a gene product with the activity of a “neutral amino-acid efflux system” from Escherichia coli K12 or its functional equivalent or its homolog, e.g. the increase of
[0318] (a) a gene product of a gene comprising the nucleic acid molecule as shown in column 5 of Table I and being depicted in the same respective line as said B1798 or a functional equivalent or a homologue thereof as shown depicted in column 7 of Table I, preferably a homologue or functional equivalent as shown depicted in column 7 of Table I B, and being depicted in the same respective line as said B1798; or
[0319] (b) a polypeptide comprising a polypeptide, a consensus sequence or a polypeptide motif as shown depicted in column 5 of Table II, and being depicted in the same respective line as said B1798 or a functional equivalent or a homologue thereof as depicted in column 7 of Table II or IV, preferably a homologue or functional equivalent as depicted in column 7 of Table II B, and being depicted in the same respective line as said B1798,
   as mentioned herein, for the an increased tolerance and/or resistance to environmental stress and increased biomass production as compared to a corresponding non-transformed wild type plant cell, plant or part thereof in plant cell, plant or part thereof, as mentioned.

[0320] Accordingly, in one embodiment, the molecule which activity is to be increased in the process of the invention is the gene product with an activity of described as a “neutral amino-acid efflux system”, preferably it is the molecule of section (a) or (b) of this paragraph.

[0321] In one embodiment, said molecule, which activity is to be increased in the process of the invention and which is the gene product with an activity of described as a “neutral amino-acid efflux system”, is increased non-targeted.

[0322] The sequence of B1878 from Escherichia coli K12, e.g. as shown in column 5 of Table I, [sequences from Saccharomyces cerevisiae has been published in Goffeau et al., Science 274 (5287), 546-547, 1996, sequences from Escherichia coli has been published in Blattner et al., Science 277 (5331), 1453-1474 (1997), sequences from Synechocystis sp. has been published in Kaneko and TAbata, Plant Cell Physiology 38 (11), 1997 and its activity is published described as b1878-protein.

[0323] Accordingly, in one embodiment, the process of the present invention comprises increasing or generating the activity of a gene product with the activity of a “b1878-protein” from Escherichia coli K12 or its functional equivalent or its homolog, e.g. the increase of
[0324] (a) a gene product of a gene comprising the nucleic acid molecule as shown in column 5 of Table I and being depicted in the same respective line as said B1878 or a functional equivalent or a homologue thereof as shown depicted in column 7 of Table I, preferably a homologue or functional equivalent as shown depicted in column 7 of Table I B, and being depicted in the same respective line as said B1878; or
[0325] (b) a polypeptide comprising a polypeptide, a consensus sequence or a polypeptide motif as shown depicted in column 5 of Table II, and being depicted in the same respective line as said B1878 or a functional equivalent or a homologue thereof as depicted in column 7 of Table II or IV, preferably a homologue or functional equivalent as depicted in column 7 of Table II B, and being depicted in the same respective line as said B1878,
   as mentioned herein, for the an increased tolerance and/or resistance to environmental stress and increased biomass production as compared to a corresponding non-transformed wild type plant cell, plant or part thereof in plant cell, plant or part thereof, as mentioned.

[0326] Accordingly, in one embodiment, the molecule which activity is to be increased in the process of the invention is the gene product with an activity of described as a “b1878-protein”, preferably it is the molecule of section (a) or (b) of this paragraph.

[0327] In one embodiment, said molecule, which activity is to be increased in the process of the invention and which is the gene product with an activity of described as a “b1878-protein”, is increased non-targeted.

[0328] The sequence of B1901 from Escherichia coli K12, e.g. as shown in column 5 of Table

[0329] I, [sequences from Saccharomyces cerevisiae has been published in Goffeau et al., Science 274 (5287), 546-547, 1996, sequences from Escherichia coli has been published in Blattner et al., Science 277 (5331), 1453-1474 (1997), sequences from Synechocystis sp. has been published in Kaneko and TAbata, Plant Cell Physiology 38 (11), 1997 and its activity is published described as L-arabinose transporter subunit.

[0330] Accordingly, in one embodiment, the process of the present invention comprises increasing or generating the activity of a gene product with the activity of a “L-arabinose transporter subunit” from Escherichia coli K12 or its functional equivalent or its homolog, e.g. the increase of
[0331] (a) a gene product of a gene comprising the nucleic acid molecule as shown in column 5 of Table I and being depicted in the same respective line as said B1901 or a functional equivalent or a homologue thereof as shown depicted in column 7 of Table I, preferably a homologue or functional equivalent as shown depicted in column 7 of Table I B, and being depicted in the same respective line as said B1901; or
[0332] (b) a polypeptide comprising a polypeptide, a consensus sequence or a polypeptide motif as shown depicted in column 5 of Table II, and being depicted in the same respective line as said B1901 or a functional equivalent or a homologue thereof as depicted in column 7 of Table II or IV, preferably a homologue or functional equivalent as depicted in column 7 of Table II B, and being depicted in the same respective line as said B1901,
   as mentioned herein, for the an increased tolerance and/or resistance to environmental stress and increased biomass production as compared to a corresponding non-transformed wild type plant cell, plant or part thereof in plant cell, plant or part thereof, as mentioned.

[0333] Accordingly, in one embodiment, the molecule which activity is to be increased in the process of the invention is the gene product with an activity of described as a “L-arabinose transporter subunit”, preferably it is the molecule of section (a) or (b) of this paragraph.

[0334] In one embodiment, said molecule, which activity is to be increased in the process of the invention and which is the gene product with an activity of described as a “L-arabinose transporter subunit”, is increased plastidic.

[0335] The sequence of B1912 from Escherichia coli K12, e.g. as shown in column 5 of Table I, [sequences from Saccharomyces cerevisiae has been published in Goffeau et al., Science 274 (5287), 546-547, 1996, sequences from Escherichia coli has been published in Blattner et al., Science 277 (5331), 1453-1474 (1997), sequences from Synechocystis sp. has been published in Kaneko and TAbata, Plant Cell Physiology 38 (11), 1997 and its activity is published described as phosphatidylglycerophosphate synthetase.

[0336] Accordingly, in one embodiment, the process of the present invention comprises increasing or generating the activity of a gene product with the activity of a “phosphatidylglycerophosphate synthetase” from Escherichia coli K12 or its functional equivalent or its homolog, e.g. the increase of
[0337] (a) a gene product of a gene comprising the nucleic acid molecule as shown in column 5 of Table I and being depicted in the same respective line as said B1912 or a functional equivalent or a homologue thereof as shown depicted in column 7 of Table I, preferably a homologue or functional equivalent as shown depicted in column 7 of Table I B, and being depicted in the same respective line as said B1912; or
[0338] (b) a polypeptide comprising a polypeptide, a consensus sequence or a polypeptide motif as shown depicted in column 5 of Table II, and being depicted in the same respective line as said B1912 or a functional equivalent or a homologue thereof as depicted in column 7 of Table II or IV, preferably a homologue or functional equivalent as depicted in column 7 of Table II B, and being depicted in the same respective line as said B1912,
   as mentioned herein, for the an increased tolerance and/or resistance to environmental stress and increased biomass production as compared to a corresponding non-transformed wild type plant cell, plant or part thereof in plant cell, plant or part thereof, as mentioned.

[0339] Accordingly, in one embodiment, the molecule which activity is to be increased in the process of the invention is the gene product with an activity of described as a “phosphatidylglycerophosphate synthetase”, preferably it is the molecule of section (a) or (b) of this paragraph.

[0340] In one embodiment, said molecule, which activity is to be increased in the process of the invention and which is the gene product with an activity of described as a “phosphatidylglycerophosphate synthetase”, is increased plastidic.

[0341] The sequence of B2027 from Escherichia coli K12, e.g. as shown in column 5 of Table I, [sequences from Saccharomyces cerevisiae has been published in Goffeau et al., Science 274 (5287), 546-547, 1996, sequences from Escherichia coli has been published in Blattner et al., Science 277 (5331), 1453-1474 (1997), sequences from Synechocystis sp. has been published in Kaneko and TAbata, Plant Cell Physiology 38 (11), 1997 and its activity is published described as regulator of length of O-antigen component of lipopolysaccharide chains.

[0342] Accordingly, in one embodiment, the process of the present invention comprises increasing or generating the activity of a gene product with the activity of a “regulator of length of O-antigen component of lipopolysaccharide chains” from Escherichia coli K12 or its functional equivalent or its homolog, e.g. the increase of
[0343] (a) a gene product of a gene comprising the nucleic acid molecule as shown in column 5 of Table I and being depicted in the same respective line as said B2027 or a functional equivalent or a homologue thereof as shown depicted in column 7 of Table I, preferably a homologue or functional equivalent as shown depicted in column 7 of Table I B, and being depicted in the same respective line as said B2027; or
[0344] (b) a polypeptide comprising a polypeptide, a consensus sequence or a polypeptide motif as shown depicted in column 5 of Table II, and being depicted in the same respective line as said B2027 or a functional equivalent or a homologue thereof as depicted in column 7 of Table II or IV, preferably a homologue or functional equivalent as depicted in column 7 of Table II B, and being depicted in the same respective line as said B2027,
   as mentioned herein, for the an increased tolerance and/or resistance to environmental stress and increased biomass production as compared to a corresponding non-transformed wild type plant cell, plant or part thereof in plant cell, plant or part thereof, as mentioned.

[0345] Accordingly, in one embodiment, the molecule which activity is to be increased in the process of the invention is the gene product with an activity of described as a “regulator of length of O-antigen component of lipopolysaccharide chains”, preferably it is the molecule of section (a) or (b) of this paragraph.

[0346] In one embodiment, said molecule, which activity is to be increased in the process of the invention and which is the gene product with an activity of described as a “regulator of length of O-antigen component of lipopolysaccharide chains”, is increased non-targeted.

[0347] The sequence of B2039 from Escherichia coli K12, e.g. as shown in column 5 of Table I, [sequences from Saccharomyces cerevisiae has been published in Goffeau et al., Science 274 (5287), 546-547, 1996, sequences from Escherichia coli has been published in Blattner et al., Science 277 (5331), 1453-1474 (1997), sequences from Synechocystis sp. has been published in Kaneko and TAbata, Plant Cell Physiology 38 (11), 1997 and its activity is published described as glucose-1-phosphate thymidylyltransferase.

[0348] Accordingly, in one embodiment, the process of the present invention comprises increasing or generating the activity of a gene product with the activity of a “glucose-1-phosphate thymidylyltransferase” from Escherichia coli K12 or its functional equivalent or its homolog, e.g. the increase of
[0349] (a) a gene product of a gene comprising the nucleic acid molecule as shown in column 5 of Table I and being depicted in the same respective line as said B2039 or a functional equivalent or a homologue thereof as shown depicted in column 7 of Table I, preferably a homologue or functional equivalent as shown depicted in column 7 of Table I B, and being depicted in the same respective line as said B2039; or
[0350] (b) a polypeptide comprising a polypeptide, a consensus sequence or a polypeptide motif as shown depicted in column 5 of Table II, and being depicted in the same respective line as said B2039 or a functional equivalent or a homologue thereof as depicted in column 7 of Table II or IV, preferably a homologue or functional equivalent as depicted in column 7 of Table II B, and being depicted in the same respective line as said B2039,
   as mentioned herein, for the an increased tolerance and/or resistance to environmental stress and increased biomass production as compared to a corresponding non-transformed wild type plant cell, plant or part thereof in plant cell, plant or part thereof, as mentioned.

[0351] Accordingly, in one embodiment, the molecule which activity is to be increased in the process of the invention is the gene product with an activity of described as a “glucose-1-phosphate thymidylyltransferase”, preferably it is the molecule of section (a) or (b) of this paragraph.

[0352] In one embodiment, said molecule, which activity is to be increased in the process of the invention and which is the gene product with an activity of described as a “glucose-1-phosphate thymidylyltransferase”, is increased non-targeted.

[0353] The sequence of B2075 from Escherichia coli K12, e.g. as shown in column 5 of Table I, [sequences from Saccharomyces cerevisiae has been published in Goffeau et al., Science 274 (5287), 546-547, 1996, sequences from Escherichia coli has been published in Blattner et al., Science 277 (5331), 1453-1474 (1997), sequences from Synechocystis sp. has been published in Kaneko and TAbata, Plant Cell Physiology 38 (11), 1997 and its activity is published described as multidrug efflux system (subunit B).

[0354] Accordingly, in one embodiment, the process of the present invention comprises increasing or generating the activity of a gene product with the activity of a “multidrug efflux system (subunit B)” from Escherichia coli K12 or its functional equivalent or its homolog, e.g. the increase of
[0355] (a) a gene product of a gene comprising the nucleic acid molecule as shown in column 5 of Table I and being depicted in the same respective line as said B2075 or a functional equivalent or a homologue thereof as shown depicted in column 7 of Table I, preferably a homologue or functional equivalent as shown depicted in column 7 of Table I B, and being depicted in the same respective line as said B2075; or
[0356] (b) a polypeptide comprising a polypeptide, a consensus sequence or a polypeptide motif as shown depicted in column 5 of Table II, and being depicted in the same respective line as said B2075 or a functional equivalent or a homologue thereof as depicted in column 7 of Table II or IV, preferably a homologue or functional equivalent as depicted in column 7 of Table II B, and being depicted in the same respective line as said B2075,
   as mentioned herein, for the an increased tolerance and/or resistance to environmental stress and increased biomass production as compared to a corresponding non-transformed wild type plant cell, plant or part thereof in plant cell, plant or part thereof, as mentioned.

[0357] Accordingly, in one embodiment, the molecule which activity is to be increased in the process of the invention is the gene product with an activity of described as a “multidrug efflux system (subunit B)”, preferably it is the molecule of section (a) or (b) of this paragraph.

[0358] In one embodiment, said molecule, which activity is to be increased in the process of the invention and which is the gene product with an activity of described as a “multidrug efflux system (subunit B)”, is increased non-targeted.

[0359] The sequence of B2153 from Escherichia coli K12, e.g. as shown in column 5 of Table I, [sequences from Saccharomyces cerevisiae has been published in Goffeau et al., Science 274 (5287), 546-547, 1996, sequences from Escherichia coli has been published in Blattner et al., Science 277 (5331), 1453-1474 (1997), sequences from Synechocystis sp. has been published in Kaneko and TAbata, Plant Cell Physiology 38 (11), 1997 and its activity is published described as GTP cyclohydrolase I.

[0360] Accordingly, in one embodiment, the process of the present invention comprises increasing or generating the activity of a gene product with the activity of a “GTP cyclohydrolase I” from Escherichia coli K12 or its functional equivalent or its homolog, e.g. the increase of
[0361] (a) a gene product of a gene comprising the nucleic acid molecule as shown in column 5 of Table I and being depicted in the same respective line as said B2153 or a functional equivalent or a homologue thereof as shown depicted in column 7 of Table I, preferably a homologue or functional equivalent as shown depicted in column 7 of Table I B, and being depicted in the same respective line as said B2153; or
[0362] (b) a polypeptide comprising a polypeptide, a consensus sequence or a polypeptide motif as shown depicted in column 5 of Table II, and being depicted in the same respective line as said B2153 or a functional equivalent or a homologue thereof as depicted in column 7 of Table II or IV, preferably a homologue or functional equivalent as depicted in column 7 of Table II B, and being depicted in the same respective line as said B2153,
   as mentioned herein, for the an increased tolerance and/or resistance to environmental stress and increased biomass production as compared to a corresponding non-transformed wild type plant cell, plant or part thereof in plant cell, plant or part thereof, as mentioned.

[0363] Accordingly, in one embodiment, the molecule which activity is to be increased in the process of the invention is the gene product with an activity of described as a “GTP cyclohydrolase I”, preferably it is the molecule of section (a) or (b) of this paragraph.

[0364] In one embodiment, said molecule, which activity is to be increased in the process of the invention and which is the gene product with an activity of described as a “GTP cyclohydrolase I”, is increased plastidic.

[0365] The sequence of B2194 from Escherichia coli K12, e.g. as shown in column 5 of Table I, [sequences from Saccharomyces cerevisiae has been published in Goffeau et al., Science 274 (5287), 546-547, 1996, sequences from Escherichia coli has been published in Blattner et al., Science 277 (5331), 1453-1474 (1997), sequences from Synechocystis sp. has been published in Kaneko and TAbata, Plant Cell Physiology 38 (11), 1997 and its activity is published described as heme lyase (CcmH subunit).

[0366] Accordingly, in one embodiment, the process of the present invention comprises increasing or generating the activity of a gene product with the activity of a “heme lyase (CcmH subunit)” from Escherichia coli K12 or its functional equivalent or its homolog, e.g. the increase of
[0367] (a) a gene product of a gene comprising the nucleic acid molecule as shown in column 5 of Table I and being depicted in the same respective line as said B2194 or a functional equivalent or a homologue thereof as shown depicted in column 7 of Table I, preferably a homologue or functional equivalent as shown depicted in column 7 of Table I B, and being depicted in the same respective line as said B2194; or
[0368] (b) a polypeptide comprising a polypeptide, a consensus sequence or a polypeptide motif as shown depicted in column 5 of Table II, and being depicted in the same respective line as said B2194 or a functional equivalent or a homologue thereof as depicted in column 7 of Table II or IV, preferably a homologue or functional equivalent as depicted in column 7 of Table II B, and being depicted in the same respective line as said B2194,
   as mentioned herein, for the an increased tolerance and/or resistance to environmental stress and increased biomass production as compared to a corresponding non-transformed wild type plant cell, plant or part thereof in plant cell, plant or part thereof, as mentioned.

[0369] Accordingly, in one embodiment, the molecule which activity is to be increased in the process of the invention is the gene product with an activity of described as a “heme lyase (CcmH subunit)”, preferably it is the molecule of section (a) or (b) of this paragraph.

[0370] In one embodiment, said molecule, which activity is to be increased in the process of the invention and which is the gene product with an activity of described as a “heme lyase (CcmH subunit)”, is increased non-targeted.

[0371] The sequence of B2226 from Escherichia coli K12, e.g. as shown in column 5 of Table

[0372] I, [sequences from Saccharomyces cerevisiae has been published in Goffeau et al., Science 274 (5287), 546-547, 1996, sequences from Escherichia coli has been published in Blattner et al., Science 277 (5331), 1453-1474 (1997), sequences from Synechocystis sp. has been published in Kaneko and TAbata, Plant Cell Physiology 38 (11), 1997 and its activity is published described as b2226-protein.

[0373] Accordingly, in one embodiment, the process of the present invention comprises increasing or generating the activity of a gene product with the activity of a “b2226-protein” from Escherichia coli K12 or its functional equivalent or its homolog, e.g. the increase of
[0374] (a) a gene product of a gene comprising the nucleic acid molecule as shown in column 5 of Table I and being depicted in the same respective line as said B2226 or a functional equivalent or a homologue thereof as shown depicted in column 7 of Table I, preferably a homologue or functional equivalent as shown depicted in column 7 of Table I B, and being depicted in the same respective line as said B2226; or
[0375] (b) a polypeptide comprising a polypeptide, a consensus sequence or a polypeptide motif as shown depicted in column 5 of Table II, and being depicted in the same respective line as said B2226 or a functional equivalent or a homologue thereof as depicted in column 7 of Table II or IV, preferably a homologue or functional equivalent as depicted in column 7 of Table II B, and being depicted in the same respective line as said B2226,
   as mentioned herein, for the an increased tolerance and/or resistance to environmental stress and increased biomass production as compared to a corresponding non-transformed wild type plant cell, plant or part thereof in plant cell, plant or part thereof, as mentioned.

[0376] Accordingly, in one embodiment, the molecule which activity is to be increased in the process of the invention is the gene product with an activity of described as a “b2226-protein”, preferably it is the molecule of section (a) or (b) of this paragraph.

[0377] In one embodiment, said molecule, which activity is to be increased in the process of the invention and which is the gene product with an activity of described as a “b2226-protein”, is increased non-targeted.

[0378] The sequence of B2309 from Escherichia coli K12, e.g. as shown in column 5 of Table I, [sequences from Saccharomyces cerevisiae has been published in Goffeau et al., Science 274 (5287), 546-547, 1996, sequences from Escherichia coli has been published in Blattner et al., Science 277 (5331), 1453-1474 (1997), sequences from Synechocystis sp. has been published in Kaneko and TAbata, Plant Cell Physiology 38 (11), 1997 and its activity is published described as histidine/lysine/arginine/ornithine transporter subunit protein.

[0379] Accordingly, in one embodiment, the process of the present invention comprises increasing or generating the activity of a gene product with the activity of a “histidine/lysine/arginine/ornithine transporter subunit protein” from Escherichia coli K12 or its functional equivalent or its homolog, e.g. the increase of
[0380] (a) a gene product of a gene comprising the nucleic acid molecule as shown in column 5 of Table I and being depicted in the same respective line as said B2309 or a functional equivalent or a homologue thereof as shown depicted in column 7 of Table I, preferably a homologue or functional equivalent as shown depicted in column 7 of Table I B, and being depicted in the same respective line as said B2309; or
[0381] (b) a polypeptide comprising a polypeptide, a consensus sequence or a polypeptide motif as shown depicted in column 5 of Table II, and being depicted in the same respective line as said B2309 or a functional equivalent or a homologue thereof as depicted in column 7 of Table II or IV, preferably a homologue or functional equivalent as depicted in column 7 of Table II B, and being depicted in the same respective line as said B2309,
   as mentioned herein, for the an increased tolerance and/or resistance to environmental stress and increased biomass production as compared to a corresponding non-transformed wild type plant cell, plant or part thereof in plant cell, plant or part thereof, as mentioned.

[0382] Accordingly, in one embodiment, the molecule which activity is to be increased in the process of the invention is the gene product with an activity of described as a “histidine/lysine/arginine/ornithine transporter subunit protein”, preferably it is the molecule of section (a) or (b) of this paragraph.

[0383] In one embodiment, said molecule, which activity is to be increased in the process of the invention and which is the gene product with an activity of described as a “histidine/lysine/arginine/ornithine transporter subunit protein”, is increased plastidic.

[0384] The sequence of B2469 from Escherichia coli K12, e.g. as shown in column 5 of Table I, [sequences from Saccharomyces cerevisiae has been published in Goffeau et al., Science 274 (5287), 546-547, 1996, sequences from Escherichia coli has been published in Blattner et al., Science 277 (5331), 1453-1474 (1997), sequences from Synechocystis sp. has been published in Kaneko and TAbata, Plant Cell Physiology 38 (11), 1997 and its activity is published described as sensory histidine kinase in two-component regulatory system with NarP (NarL).

[0385] Accordingly, in one embodiment, the process of the present invention comprises increasing or generating the activity of a gene product with the activity of a “sensory histidine kinase in two-component regulatory system with NarP (NarL)” from Escherichia coli K12 or its functional equivalent or its homolog, e.g. the increase of
[0386] (a) a gene product of a gene comprising the nucleic acid molecule as shown in column 5 of Table I and being depicted in the same respective line as said B2469 or a functional equivalent or a homologue thereof as shown depicted in column 7 of Table I, preferably a homologue or functional equivalent as shown depicted in column 7 of Table I B, and being depicted in the same respective line as said B2469; or
[0387] (b) a polypeptide comprising a polypeptide, a consensus sequence or a polypeptide motif as shown depicted in column 5 of Table II, and being depicted in the same respective line as said B2469 or a functional equivalent or a homologue thereof as depicted in column 7 of Table II or IV, preferably a homologue or functional equivalent as depicted in column 7 of Table II B, and being depicted in the same respective line as said B2469,
   as mentioned herein, for the an increased tolerance and/or resistance to environmental stress and increased biomass production as compared to a corresponding non-transformed wild type plant cell, plant or part thereof in plant cell, plant or part thereof, as mentioned.

[0388] Accordingly, in one embodiment, the molecule which activity is to be increased in the process of the invention is the gene product with an activity of described as a “sensory histidine kinase in two-component regulatory system with NarP (NarL)”, preferably it is the molecule of section (a) or (b) of this paragraph.

[0389] In one embodiment, said molecule, which activity is to be increased in the process of the invention and which is the gene product with an activity of described as a “sensory histidine kinase in two-component regulatory system with NarP (NarL)”, is increased non-targeted.

[0390] The sequence of B2475 from Escherichia coli K12, e.g. as shown in column 5 of Table I, [sequences from Saccharomyces cerevisiae has been published in Goffeau et al., Science 274 (5287), 546-547, 1996, sequences from Escherichia coli has been published in Blattner et al., Science 277 (5331), 1453-1474 (1997), sequences from Synechocystis sp. has been published in Kaneko and TAbata, Plant Cell Physiology 38 (11), 1997 and its activity is published described as b2475-protein.

[0391] Accordingly, in one embodiment, the process of the present invention comprises increasing or generating the activity of a gene product with the activity of a “b2475-protein” from Escherichia coli K12 or its functional equivalent or its homolog, e.g. the increase of
[0392] (a) a gene product of a gene comprising the nucleic acid molecule as shown in column 5 of Table I and being depicted in the same respective line as said B2475 or a functional equivalent or a homologue thereof as shown depicted in column 7 of Table I, preferably a homologue or functional equivalent as shown depicted in column 7 of Table I B, and being depicted in the same respective line as said B2475; or
[0393] (b) a polypeptide comprising a polypeptide, a consensus sequence or a polypeptide motif as shown depicted in column 5 of Table II, and being depicted in the same respective line as said B2475 or a functional equivalent or a homologue thereof as depicted in column 7 of Table II or IV, preferably a homologue or functional equivalent as depicted in column 7 of Table II B, and being depicted in the same respective line as said B2475,
[0394] as mentioned herein, for the an increased tolerance and/or resistance to environmental stress and increased biomass production as compared to a corresponding non-transformed wild type plant cell, plant or part thereof in plant cell, plant or part thereof, as mentioned.

[0395] Accordingly, in one embodiment, the molecule which activity is to be increased in the process of the invention is the gene product with an activity of described as a “b2475-protein”, preferably it is the molecule of section (a) or (b) of this paragraph.

[0396] In one embodiment, said molecule, which activity is to be increased in the process of the invention and which is the gene product with an activity of described as a “b2475-protein”, is increased non-targeted.

[0397] The sequence of B2482 from Escherichia coli K12, e.g. as shown in column 5 of Table I, [sequences from Saccharomyces cerevisiae has been published in Goffeau et al., Science 274 (5287), 546-547, 1996, sequences from Escherichia coli has been published in Blattner et al., Science 277 (5331), 1453-1474 (1997), sequences from Synechocystis sp. has been published in Kaneko and TAbata, Plant Cell Physiology 38 (11), 1997 and its activity is published described as NADH dehydrogenase (subunit N).

[0398] Accordingly, in one embodiment, the process of the present invention comprises increasing or generating the activity of a gene product with the activity of a “NADH dehydrogenase (subunit N)” from Escherichia coli K12 or its functional equivalent or its homolog, e.g. the increase of
[0399] (a) a gene product of a gene comprising the nucleic acid molecule as shown in column 5 of Table I and being depicted in the same respective line as said B2482 or a functional equivalent or a homologue thereof as shown depicted in column 7 of Table I, preferably a homologue or functional equivalent as shown depicted in column 7 of Table I B, and being depicted in the same respective line as said B2482; or
[0400] (b) a polypeptide comprising a polypeptide, a consensus sequence or a polypeptide motif as shown depicted in column 5 of Table II, and being depicted in the same respective line as said B2482 or a functional equivalent or a homologue thereof as depicted in column 7 of Table II or IV, preferably a homologue or functional equivalent as depicted in column 7 of Table II B, and being depicted in the same respective line as said B2482,
   as mentioned herein, for the an increased tolerance and/or resistance to environmental stress and increased biomass production as compared to a corresponding non-transformed wild type plant cell, plant or part thereof in plant cell, plant or part thereof, as mentioned.

[0401] Accordingly, in one embodiment, the molecule which activity is to be increased in the process of the invention is the gene product with an activity of described as a “NADH dehydrogenase (subunit N)”, preferably it is the molecule of section (a) or (b) of this paragraph.

[0402] In one embodiment, said molecule, which activity is to be increased in the process of the invention and which is the gene product with an activity of described as a “NADH dehydrogenase (subunit N)”, is increased non-targeted.

[0403] The sequence of B2541 from Escherichia coli K12, e.g. as shown in column 5 of Table I, [sequences from Saccharomyces cerevisiae has been published in Goffeau et al., Science 274 (5287), 546-547, 1996, sequences from Escherichia coli has been published in Blattner et al., Science 277 (5331), 1453-1474 (1997), sequences from Synechocystis sp. has been published in Kaneko and TAbata, Plant Cell Physiology 38 (11), 1997 and its activity is published described as 2,3-dihydroxy-2,3-dihydrophenylpropionatedehydrogenase.

[0404] Accordingly, in one embodiment, the process of the present invention comprises increasing or generating the activity of a gene product with the activity of a “2,3-dihydroxy-2,3-dihydrophenylpropionatedehydrogenase” from Escherichia coli K12 or its functional equivalent or its homolog, e.g. the increase of
[0405] (a) a gene product of a gene comprising the nucleic acid molecule as shown in column 5 of Table I and being depicted in the same respective line as said B2541 or a functional equivalent or a homologue thereof as shown depicted in column 7 of Table I, preferably a homologue or functional equivalent as shown depicted in column 7 of Table I B, and being depicted in the same respective line as said B2541; or
[0406] (b) a polypeptide comprising a polypeptide, a consensus sequence or a polypeptide motif as shown depicted in column 5 of Table II, and being depicted in the same respective line as said B2541 or a functional equivalent or a homologue thereof as depicted in column 7 of Table II or IV, preferably a homologue or functional equivalent as depicted in column 7 of Table II B, and being depicted in the same respective line as said B2541,
   as mentioned herein, for the an increased tolerance and/or resistance to environmental stress and increased biomass production as compared to a corresponding non-transformed wild type plant cell, plant or part thereof in plant cell, plant or part thereof, as mentioned.

[0407] Accordingly, in one embodiment, the molecule which activity is to be increased in the process of the invention is the gene product with an activity of described as a “2,3-dihydroxy-2,3-dihydrophenylpropionatedehydrogenase”, preferably it is the molecule of section (a) or (b) of this paragraph.

[0408] In one embodiment, said molecule, which activity is to be increased in the process of the invention and which is the gene product with an activity of described as a “2,3-dihydroxy-2,3-dihydrophenylpropionatedehydrogenase”, is increased non-targeted.

[0409] The sequence of B2559 from Escherichia coli K12, e.g. as shown in column 5 of Table I, [sequences from Saccharomyces cerevisiae has been published in Goffeau et al., Science 274 (5287), 546-547, 1996, sequences from Escherichia coli has been published in Blattner et al., Science 277 (5331), 1453-1474 (1997), sequences from Synechocystis sp. has been published in Kaneko and TAbata, Plant Cell Physiology 38 (11), 1997 and its activity is published described as tRNA-specific adenosine deaminase.

[0410] Accordingly, in one embodiment, the process of the present invention comprises increasing or generating the activity of a gene product with the activity of a “tRNA-specific adenosine deaminase” from Escherichia coli K12 or its functional equivalent or its homolog, e.g. the increase of
[0411] (a) a gene product of a gene comprising the nucleic acid molecule as shown in column 5 of Table I and being depicted in the same respective line as said B2559 or a functional equivalent or a homologue thereof as shown depicted in column 7 of Table I, preferably a homologue or functional equivalent as shown depicted in column 7 of Table I B, and being depicted in the same respective line as said B2559; or
[0412] (b) a polypeptide comprising a polypeptide, a consensus sequence or a polypeptide motif as shown depicted in column 5 of Table II, and being depicted in the same respective line as said B2559 or a functional equivalent or a homologue thereof as depicted in column 7 of Table II or IV, preferably a homologue or functional equivalent as depicted in column 7 of Table II B, and being depicted in the same respective line as said B2559,
   as mentioned herein, for the an increased tolerance and/or resistance to environmental stress and increased biomass production as compared to a corresponding non-transformed wild type plant cell, plant or part thereof in plant cell, plant or part thereof, as mentioned.

[0413] Accordingly, in one embodiment, the molecule which activity is to be increased in the process of the invention is the gene product with an activity of described as a “tRNA-specific adenosine deaminase”, preferably it is the molecule of section (a) or (b) of this paragraph.

[0414] In one embodiment, said molecule, which activity is to be increased in the process of the invention and which is the gene product with an activity of described as a “tRNA-specific adenosine deaminase”, is increased plastidic.

[0415] The sequence of B2605 from Escherichia coli K12, e.g. as shown in column 5 of Table I, [sequences from Saccharomyces cerevisiae has been published in Goffeau et al., Science 274 (5287), 546-547, 1996, sequences from Escherichia coli has been published in Blattner et al., Science 277 (5331), 1453-1474 (1997), sequences from Synechocystis sp. has been published in Kaneko and TAbata, Plant Cell Physiology 38 (11), 1997 and its activity is published described as predicted outer membrane lipoprotein.

[0416] Accordingly, in one embodiment, the process of the present invention comprises increasing or generating the activity of a gene product with the activity of a “predicted outer membrane lipoprotein” from Escherichia coli K12 or its functional equivalent or its homolog, e.g. the increase of
[0417] (a) a gene product of a gene comprising the nucleic acid molecule as shown in column 5 of Table I and being depicted in the same respective line as said B2605 or a functional equivalent or a homologue thereof as shown depicted in column 7 of Table I, preferably a homologue or functional equivalent as shown depicted in column 7 of Table I B, and being depicted in the same respective line as said B2605; or
[0418] (b) a polypeptide comprising a polypeptide, a consensus sequence or a polypeptide motif as shown depicted in column 5 of Table II, and being depicted in the same respective line as said B2605 or a functional equivalent or a homologue thereof as depicted in column 7 of Table II or IV, preferably a homologue or functional equivalent as depicted in column 7 of Table II B, and being depicted in the same respective line as said B2605,
   as mentioned herein, for the an increased tolerance and/or resistance to environmental stress and increased biomass production as compared to a corresponding non-transformed wild type plant cell, plant or part thereof in plant cell, plant or part thereof, as mentioned.

[0419] Accordingly, in one embodiment, the molecule which activity is to be increased in the process of the invention is the gene product with an activity of described as a “predicted outer membrane lipoprotein”, preferably it is the molecule of section (a) or (b) of this paragraph.

[0420] In one embodiment, said molecule, which activity is to be increased in the process of the invention and which is the gene product with an activity of described as a “predicted outer membrane lipoprotein”, is increased non-targeted.

[0421] The sequence of B2630 from Escherichia coli K12, e.g. as shown in column 5 of Table I, [sequences from Saccharomyces cerevisiae has been published in Goffeau et al., Science 274 (5287), 546-547, 1996, sequences from Escherichia coli has been published in Blattner et al., Science 277 (5331), 1453-1474 (1997), sequences from Synechocystis sp. has been published in Kaneko and TAbata, Plant Cell Physiology 38 (11), 1997 and its activity is published described as CP4-57 prophage/RNase LS.

[0422] Accordingly, in one embodiment, the process of the present invention comprises increasing or generating the activity of a gene product with the activity of a “CP4-57 pro-phage/RNase LS” from Escherichia coli K12 or its functional equivalent or its homolog, e.g. the increase of
[0423] (a) a gene product of a gene comprising the nucleic acid molecule as shown in column 5 of Table I and being depicted in the same respective line as said B2630 or a functional equivalent or a homologue thereof as shown depicted in column 7 of Table I, preferably a homologue or functional equivalent as shown depicted in column 7 of Table I B, and being depicted in the same respective line as said B2630; or
[0424] (b) a polypeptide comprising a polypeptide, a consensus sequence or a polypeptide motif as shown depicted in column 5 of Table II, and being depicted in the same respective line as said B2630 or a functional equivalent or a homologue thereof as depicted in column 7 of Table II or IV, preferably a homologue or functional equivalent as depicted in column 7 of Table II B, and being depicted in the same respective line as said B2630,
   as mentioned herein, for the an increased tolerance and/or resistance to environmental stress and increased biomass production as compared to a corresponding non-transformed wild type plant cell, plant or part thereof in plant cell, plant or part thereof, as mentioned.

[0425] Accordingly, in one embodiment, the molecule which activity is to be increased in the process of the invention is the gene product with an activity of described as a “CP4-57 prophage/RNase LS”, preferably it is the molecule of section (a) or (b) of this paragraph.

[0426] In one embodiment, said molecule, which activity is to be increased in the process of the invention and which is the gene product with an activity of described as a “CP4-57 prophage/RNase LS”, is increased non-targeted.

[0427] The sequence of B2678 from Escherichia coli K12, e.g. as shown in column 5 of Table I, [sequences from Saccharomyces cerevisiae has been published in Goffeau et al., Science 274 (5287), 546-547, 1996, sequences from Escherichia coli has been published in Blattner et al., Science 277 (5331), 1453-1474 (1997), sequences from Synechocystis sp. has been published in Kaneko and TAbata, Plant Cell Physiology 38 (11), 1997 and its activity is published described as glycine betaine transporter subunit protein.

[0428] Accordingly, in one embodiment, the process of the present invention comprises increasing or generating the activity of a gene product with the activity of a “glycine betaine transporter subunit protein” from Escherichia coli K12 or its functional equivalent or its homolog, e.g. the increase of
[0429] (a) a gene product of a gene comprising the nucleic acid molecule as shown in column 5 of Table I and being depicted in the same respective line as said B2678 or a functional equivalent or a homologue thereof as shown depicted in column 7 of Table I, preferably a homologue or functional equivalent as shown depicted in column 7 of Table I B, and being depicted in the same respective line as said B2678; or
[0430] (b) a polypeptide comprising a polypeptide, a consensus sequence or a polypeptide motif as shown depicted in column 5 of Table II, and being depicted in the same respective line as said B2678 or a functional equivalent or a homologue thereof as depicted in column 7 of Table II or IV, preferably a homologue or functional equivalent as depicted in column 7 of Table II B, and being depicted in the same respective line as said B2678,
   as mentioned herein, for the an increased tolerance and/or resistance to environmental stress and increased biomass production as compared to a corresponding non-transformed wild type plant cell, plant or part thereof in plant cell, plant or part thereof, as mentioned.

[0431] Accordingly, in one embodiment, the molecule which activity is to be increased in the process of the invention is the gene product with an activity of described as a “glycine betaine transporter subunit protein”, preferably it is the molecule of section (a) or (b) of this paragraph.

[0432] In one embodiment, said molecule, which activity is to be increased in the process of the invention and which is the gene product with an activity of described as a “glycine betaine transporter subunit protein”, is increased plastidic.

[0433] The sequence of B2715 from Escherichia coli K12, e.g. as shown in column 5 of Table I, [sequences from Saccharomyces cerevisiae has been published in Goffeau et al., Science 274 (5287), 546-547, 1996, sequences from Escherichia coli has been published in Blattner et al., Science 277 (5331), 1453-1474 (1997), sequences from Synechocystis sp. has been published in Kaneko and TAbata, Plant Cell Physiology 38 (11), 1997 and its activity is published described as cellobiose/arbutin/salicin-specific PTS enzyme (IIB component/IC component).

[0434] Accordingly, in one embodiment, the process of the present invention comprises increasing or generating the activity of a gene product with the activity of a “cellobiose/arbutin/salicin-specific PTS enzyme (IIB component/IC component)” from Escherichia coli K12 or its functional equivalent or its homolog, e.g. the increase of
[0435] (a) a gene product of a gene comprising the nucleic acid molecule as shown in column 5 of Table I and being depicted in the same respective line as said B2715 or a functional equivalent or a homologue thereof as shown depicted in column 7 of Table I, preferably a homologue or functional equivalent as shown depicted in column 7 of Table I B, and being depicted in the same respective line as said B2715; or
[0436] (b) a polypeptide comprising a polypeptide, a consensus sequence or a polypeptide motif as shown depicted in column 5 of Table II, and being depicted in the same respective line as said B2715 or a functional equivalent or a homologue thereof as depicted in column 7 of Table II or IV, preferably a homologue or functional equivalent as depicted in column 7 of Table II B, and being depicted in the same respective line as said B2715,
   as mentioned herein, for the an increased tolerance and/or resistance to environmental stress and increased biomass production as compared to a corresponding non-transformed wild type plant cell, plant or part thereof in plant cell, plant or part thereof, as mentioned.

[0437] Accordingly, in one embodiment, the molecule which activity is to be increased in the process of the invention is the gene product with an activity of described as a “cellobiose/arbutin/salicin-specific PTS enzyme (IIB component/IC component)”, preferably it is the molecule of section (a) or (b) of this paragraph.

[0438] In one embodiment, said molecule, which activity is to be increased in the process of the invention and which is the gene product with an activity of described as a “cellobiose/arbutin/salicin-specific PTS enzyme (IIB component/IC component)”, is increased plastidic.

[0439] The sequence of B2776 from Escherichia coli K12, e.g. as shown in column 5 of Table I, [sequences from Saccharomyces cerevisiae has been published in Goffeau et al., Science 274 (5287), 546-547, 1996, sequences from Escherichia coli has been published in Blattner et al., Science 277 (5331), 1453-1474 (1997), sequences from Synechocystis sp. has been published in Kaneko and TAbata, Plant Cell Physiology 38 (11), 1997 and its activity is published described as predicted kinase.

[0440] Accordingly, in one embodiment, the process of the present invention comprises increasing or generating the activity of a gene product with the activity of a “predicted kinase” from Escherichia coli K12 or its functional equivalent or its homolog, e.g. the increase of
[0441] (a) a gene product of a gene comprising the nucleic acid molecule as shown in column 5 of Table I and being depicted in the same respective line as said B2776 or a functional equivalent or a homologue thereof as shown depicted in column 7 of Table I, preferably a homologue or functional equivalent as shown depicted in column 7 of Table I B, and being depicted in the same respective line as said B2776; or
[0442] (b) a polypeptide comprising a polypeptide, a consensus sequence or a polypeptide motif as shown depicted in column 5 of Table II, and being depicted in the same respective line as said B2776 or a functional equivalent or a homologue thereof as depicted in column 7 of Table II or IV, preferably a homologue or functional equivalent as depicted in column 7 of Table II B, and being depicted in the same respective line as said B2776,
   as mentioned herein, for the an increased tolerance and/or resistance to environmental stress and increased biomass production as compared to a corresponding non-transformed wild type plant cell, plant or part thereof in plant cell, plant or part thereof, as mentioned.

[0443] Accordingly, in one embodiment, the molecule which activity is to be increased in the process of the invention is the gene product with an activity of described as a “predicted kinase”, preferably it is the molecule of section (a) or (b) of this paragraph.

[0444] In one embodiment, said molecule, which activity is to be increased in the process of the invention and which is the gene product with an activity of described as a “predicted kinase”, is increased non-targeted.

[0445] The sequence of B2791 from Escherichia coli K12, e.g. as shown in column 5 of Table I, [sequences from Saccharomyces cerevisiae has been published in Goffeau et al., Science 274 (5287), 546-547, 1996, sequences from Escherichia coli has been published in Blattner et al., Science 277 (5331), 1453-1474 (1997), sequences from Synechocystis sp. has been published in Kaneko and TAbata, Plant Cell Physiology 38 (11), 1997 and its activity is published described as tRNA pseudouridine synthase.

[0446] Accordingly, in one embodiment, the process of the present invention comprises increasing or generating the activity of a gene product with the activity of a “tRNA pseudouridine synthase” from Escherichia coli K12 or its functional equivalent or its homolog, e.g. the increase of
[0447] (a) a gene product of a gene comprising the nucleic acid molecule as shown in column 5 of Table I and being depicted in the same respective line as said B2791 or a functional equivalent or a homologue thereof as shown depicted in column 7 of Table I, preferably a homologue or functional equivalent as shown depicted in column 7 of Table I B, and being depicted in the same respective line as said B2791; or
[0448] (b) a polypeptide comprising a polypeptide, a consensus sequence or a polypeptide motif as shown depicted in column 5 of Table II, and being depicted in the same respective line as said B2791 or a functional equivalent or a homologue thereof as depicted in column 7 of Table II or IV, preferably a homologue or functional equivalent as depicted in column 7 of Table II B, and being depicted in the same respective line as said B2791,
   as mentioned herein, for the an increased tolerance and/or resistance to environmental stress and increased biomass production as compared to a corresponding non-transformed wild type plant cell, plant or part thereof in plant cell, plant or part thereof, as mentioned.

[0449] Accordingly, in one embodiment, the molecule which activity is to be increased in the process of the invention is the gene product with an activity of described as a “tRNA pseudouridine synthase”, preferably it is the molecule of section (a) or (b) of this paragraph.

[0450] In one embodiment, said molecule, which activity is to be increased in the process of the invention and which is the gene product with an activity of described as a “tRNA pseudouridine synthase”, is increased non-targeted.

[0451] The sequence of B2912 from Escherichia coli K12, e.g. as shown in column 5 of Table I, [sequences from Saccharomyces cerevisiae has been published in Goffeau et al., Science 274 (5287), 546-547, 1996, sequences from Escherichia coli has been published in Blattner et al., Science 277 (5331), 1453-1474 (1997), sequences from Synechocystis sp. has been published in Kaneko and TAbata, Plant Cell Physiology 38 (11), 1997 and its activity is published described as predicted ligase.

[0452] Accordingly, in one embodiment, the process of the present invention comprises increasing or generating the activity of a gene product with the activity of a “predicted ligase” from Escherichia coli K12 or its functional equivalent or its homolog, e.g. the increase of
[0453] (a) a gene product of a gene comprising the nucleic acid molecule as shown in column 5 of Table I and being depicted in the same respective line as said B2912 or a functional equivalent or a homologue thereof as shown depicted in column 7 of Table I, preferably a homologue or functional equivalent as shown depicted in column 7 of Table I B, and being depicted in the same respective line as said B2912; or
[0454] (b) a polypeptide comprising a polypeptide, a consensus sequence or a polypeptide motif as shown depicted in column 5 of Table II, and being depicted in the same respective line as said B2912 or a functional equivalent or a homologue thereof as depicted in column 7 of Table II or IV, preferably a homologue or functional equivalent as depicted in column 7 of Table II B, and being depicted in the same respective line as said B2912,
   as mentioned herein, for the an increased tolerance and/or resistance to environmental stress and increased biomass production as compared to a corresponding non-transformed wild type plant cell, plant or part thereof in plant cell, plant or part thereof, as mentioned.

[0455] Accordingly, in one embodiment, the molecule which activity is to be increased in the process of the invention is the gene product with an activity of described as a “predicted ligase”, preferably it is the molecule of section (a) or (b) of this paragraph.

[0456] In one embodiment, said molecule, which activity is to be increased in the process of the invention and which is the gene product with an activity of described as a “predicted ligase”, is increased non-targeted.

[0457] The sequence of B2965 from Escherichia coli K12, e.g. as shown in column 5 of Table I, [sequences from Saccharomyces cerevisiae has been published in Goffeau et al., Science 274 (5287), 546-547, 1996, sequences from Escherichia coli has been published in Blattner et al., Science 277 (5331), 1453-1474 (1997), sequences from Synechocystis sp. has been published in Kaneko and TAbata, Plant Cell Physiology 38 (11), 1997 and its activity is published described as ornithine decarboxylase.

[0458] Accordingly, in one embodiment, the process of the present invention comprises increasing or generating the activity of a gene product with the activity of a “ornithine decarboxylase” from Escherichia coli K12 or its functional equivalent or its homolog, e.g. the increase of
[0459] (a) a gene product of a gene comprising the nucleic acid molecule as shown in column 5 of Table I and being depicted in the same respective line as said B2965 or a functional equivalent or a homologue thereof as shown depicted in column 7 of Table I, preferably a homologue or functional equivalent as shown depicted in column 7 of Table I B, and being depicted in the same respective line as said B2965; or
[0460] (b) a polypeptide comprising a polypeptide, a consensus sequence or a polypeptide motif as shown depicted in column 5 of Table II, and being depicted in the same respective line as said B2965 or a functional equivalent or a homologue thereof as depicted in column 7 of Table II or IV, preferably a homologue or functional equivalent as depicted in column 7 of Table II B, and being depicted in the same respective line as said B2965,
   as mentioned herein, for the an increased tolerance and/or resistance to environmental stress and increased biomass production as compared to a corresponding non-transformed wild type plant cell, plant or part thereof in plant cell, plant or part thereof, as mentioned.

[0461] Accordingly, in one embodiment, the molecule which activity is to be increased in the process of the invention is the gene product with an activity of described as a “ornithine decarboxylase”, preferably it is the molecule of section (a) or (b) of this paragraph.

[0462] In one embodiment, said molecule, which activity is to be increased in the process of the invention and which is the gene product with an activity of described as a “ornithine decarboxylase”, is increased plastidic.

[0463] The sequence of B2987 from Escherichia coli K12, e.g. as shown in column 5 of Table I, [sequences from Saccharomyces cerevisiae has been published in Goffeau et al., Science 274 (5287), 546-547, 1996, sequences from Escherichia coli has been published in Blattner et al., Science 277 (5331), 1453-1474 (1997), sequences from Synechocystis sp. has been published in Kaneko and TAbata, Plant Cell Physiology 38 (11), 1997 and its activity is published described as phosphate transporter.

[0464] Accordingly, in one embodiment, the process of the present invention comprises increasing or generating the activity of a gene product with the activity of a “phosphate transporter” from Escherichia coli K12 or its functional equivalent or its homolog, e.g. the increase of
[0465] (a) a gene product of a gene comprising the nucleic acid molecule as shown in column 5 of Table I and being depicted in the same respective line as said B2987 or a functional equivalent or a homologue thereof as shown depicted in column 7 of Table I, preferably a homologue or functional equivalent as shown depicted in column 7 of Table I B, and being depicted in the same respective line as said B2987; or
[0466] (b) a polypeptide comprising a polypeptide, a consensus sequence or a polypeptide motif as shown depicted in column 5 of Table II, and being depicted in the same respective line as said B2987 or a functional equivalent or a homologue thereof as depicted in column 7 of Table II or IV, preferably a homologue or functional equivalent as depicted in column 7 of Table II B, and being depicted in the same respective line as said B2987,
   as mentioned herein, for the an increased tolerance and/or resistance to environmental stress and increased biomass production as compared to a corresponding non-transformed wild type plant cell, plant or part thereof in plant cell, plant or part thereof, as mentioned.

[0467] Accordingly, in one embodiment, the molecule which activity is to be increased in the process of the invention is the gene product with an activity of described as a “phosphate transporter”, preferably it is the molecule of section (a) or (b) of this paragraph.

[0468] In one embodiment, said molecule, which activity is to be increased in the process of the invention and which is the gene product with an activity of described as a “phosphate transporter”, is increased plastidic.

[0469] The sequence of B2987 from Escherichia coli K12, e.g. as shown in column 5 of Table I, [sequences from Saccharomyces cerevisiae has been published in Goffeau et al., Science 274 (5287), 546-547, 1996, sequences from Escherichia coli has been published in Blattner et al., Science 277 (5331), 1453-1474 (1997), sequences from Synechocystis sp. has been published in Kaneko and TAbata, Plant Cell Physiology 38 (11), 1997 and its activity is published described as phosphate transporter.

[0470] Accordingly, in one embodiment, the process of the present invention comprises increasing or generating the activity of a gene product with the activity of a “phosphate transporter” from Escherichia coli K12 or its functional equivalent or its homolog, e.g. the increase of
[0471] (a) a gene product of a gene comprising the nucleic acid molecule as shown in column 5 of Table I and being depicted in the same respective line as said B2987 or a functional equivalent or a homologue thereof as shown depicted in column 7 of Table I, preferably a homologue or functional equivalent as shown depicted in column 7 of Table I B, and being depicted in the same respective line as said B2987; or
[0472] (b) a polypeptide comprising a polypeptide, a consensus sequence or a polypeptide motif as shown depicted in column 5 of Table II, and being depicted in the same respective line as said B2987 or a functional equivalent or a homologue thereof as depicted in column 7 of Table II or IV, preferably a homologue or functional equivalent as depicted in column 7 of Table II B, and being depicted in the same respective line as said B2987,
   as mentioned herein, for the an increased tolerance and/or resistance to environmental stress and increased biomass production as compared to a corresponding non-transformed wild type plant cell, plant or part thereof in plant cell, plant or part thereof, as mentioned.

[0473] Accordingly, in one embodiment, the molecule which activity is to be increased in the process of the invention is the gene product with an activity of described as a “phosphate transporter”, preferably it is the molecule of section (a) or (b) of this paragraph.

[0474] In one embodiment, said molecule, which activity is to be increased in the process of the invention and which is the gene product with an activity of described as a “phosphate transporter”, is increased non-targeted.

[0475] The sequence of B3093 from Escherichia coli K12, e.g. as shown in column 5 of Table I, [sequences from Saccharomyces cerevisiae has been published in Goffeau et al., Science 274 (5287), 546-547, 1996, sequences from Escherichia coli has been published in Blattner et al., Science 277 (5331), 1453-1474 (1997), sequences from Synechocystis sp. has been published in Kaneko and TAbata, Plant Cell Physiology 38 (11), 1997 and its activity is published described as hexuronate transporter.

[0476] Accordingly, in one embodiment, the process of the present invention comprises increasing or generating the activity of a gene product with the activity of a “hexuronate transporter” from Escherichia coli K12 or its functional equivalent or its homolog, e.g. the increase of
[0477] (a) a gene product of a gene comprising the nucleic acid molecule as shown in column 5 of Table I and being depicted in the same respective line as said B3093 or a functional equivalent or a homologue thereof as shown depicted in column 7 of Table I, preferably a homologue or functional equivalent as shown depicted in column 7 of Table I B, and being depicted in the same respective line as said B3093; or
[0478] (b) a polypeptide comprising a polypeptide, a consensus sequence or a polypeptide motif as shown depicted in column 5 of Table II, and being depicted in the same respective line as said B3093 or a functional equivalent or a homologue thereof as depicted in column 7 of Table II or IV, preferably a homologue or functional equivalent as depicted in column 7 of Table II B, and being depicted in the same respective line as said B3093,
   as mentioned herein, for the an increased tolerance and/or resistance to environmental stress and increased biomass production as compared to a corresponding non-transformed wild type plant cell, plant or part thereof in plant cell, plant or part thereof, as mentioned.

[0479] Accordingly, in one embodiment, the molecule which activity is to be increased in the process of the invention is the gene product with an activity of described as a “hexuronate transporter”, preferably it is the molecule of section (a) or (b) of this paragraph.

[0480] In one embodiment, said molecule, which activity is to be increased in the process of the invention and which is the gene product with an activity of described as a “hexuronate transporter”, is increased plastidic.

[0481] The sequence of B3363 from Escherichia coli K12, e.g. as shown in column 5 of Table I, [sequences from Saccharomyces cerevisiae has been published in Goffeau et al., Science 274 (5287), 546-547, 1996, sequences from Escherichia coli has been published in Blattner et al., Science 277 (5331), 1453-1474 (1997), sequences from Synechocystis sp. has been published in Kaneko and TAbata, Plant Cell Physiology 38 (11), 1997 and its activity is published described as peptidyl-prolyl cis-trans isomerase A (rotamase A).

[0482] Accordingly, in one embodiment, the process of the present invention comprises increasing or generating the activity of a gene product with the activity of a “peptidylprolyl cis-trans isomerase A (rotamase A)” from Escherichia coli K12 or its functional equivalent or its homolog, e.g. the increase of
[0483] (a) a gene product of a gene comprising the nucleic acid molecule as shown in column 5 of Table I and being depicted in the same respective line as said B3363 or a functional equivalent or a homologue thereof as shown depicted in column 7 of Table I, preferably a homologue or functional equivalent as shown depicted in column 7 of Table I B, and being depicted in the same respective line as said B3363; or
[0484] (b) a polypeptide comprising a polypeptide, a consensus sequence or a polypeptide motif as shown depicted in column 5 of Table II, and being depicted in the same respective line as said B3363 or a functional equivalent or a homologue thereof as depicted in column 7 of Table II or IV, preferably a homologue or functional equivalent as depicted in column 7 of Table II B, and being depicted in the same respective line as said B3363,
   as mentioned herein, for the an increased tolerance and/or resistance to environmental stress and increased biomass production as compared to a corresponding non-transformed wild type plant cell, plant or part thereof in plant cell, plant or part thereof, as mentioned.

[0485] Accordingly, in one embodiment, the molecule which activity is to be increased in the process of the invention is the gene product with an activity of described as a “peptidylprolyl cis-trans isomerase A (rotamase A)”, preferably it is the molecule of section (a) or (b) of this paragraph.

[0486] In one embodiment, said molecule, which activity is to be increased in the process of the invention and which is the gene product with an activity of described as a “peptidylprolyl cis-trans isomerase A (rotamase A)”, is increased plastidic.

[0487] The sequence of B3429 from Escherichia coli K12, e.g. as shown in column 5 of Table I, [sequences from Saccharomyces cerevisiae has been published in Goffeau et al., Science 274 (5287), 546-547, 1996, sequences from Escherichia coli has been published in Blattner et al., Science 277 (5331), 1453-1474 (1997), sequences from Synechocystis sp. has been published in Kaneko and TAbata, Plant Cell Physiology 38 (11), 1997 and its activity is published described as glycogen synthase.

[0488] Accordingly, in one embodiment, the process of the present invention comprises increasing or generating the activity of a gene product with the activity of a “glycogen synthase” from Escherichia coli K12 or its functional equivalent or its homolog, e.g. the increase of
[0489] (a) a gene product of a gene comprising the nucleic acid molecule as shown in column 5 of Table I and being depicted in the same respective line as said B3429 or a functional equivalent or a homologue thereof as shown depicted in column 7 of Table I, preferably a homologue or functional equivalent as shown depicted in column 7 of Table I B, and being depicted in the same respective line as said B3429; or
[0490] (b) a polypeptide comprising a polypeptide, a consensus sequence or a polypeptide motif as shown depicted in column 5 of Table II, and being depicted in the same respective line as said B3429 or a functional equivalent or a homologue thereof as depicted in column 7 of Table II or IV, preferably a homologue or functional equivalent as depicted in column 7 of Table II B, and being depicted in the same respective line as said B3429,
   as mentioned herein, for the an increased tolerance and/or resistance to environmental stress and increased biomass production as compared to a corresponding non-transformed wild type plant cell, plant or part thereof in plant cell, plant or part thereof, as mentioned.

[0491] Accordingly, in one embodiment, the molecule which activity is to be increased in the process of the invention is the gene product with an activity of described as a “glycogen synthase”, preferably it is the molecule of section (a) or (b) of this paragraph.

[0492] In one embodiment, said molecule, which activity is to be increased in the process of the invention and which is the gene product with an activity of described as a “glycogen synthase”, is increased plastidic.

[0493] The sequence of B3568 from Escherichia coli K12, e.g. as shown in column 5 of Table I, [sequences from Saccharomyces cerevisiae has been published in Goffeau et al., Science 274 (5287), 546-547, 1996, sequences from Escherichia coli has been published in Blattner et al., Science 277 (5331), 1453-1474 (1997), sequences from Synechocystis sp. has been published in Kaneko and TAbata, Plant Cell Physiology 38 (11), 1997 and its activity is published described as D-xylose transporter subunit.

[0494] Accordingly, in one embodiment, the process of the present invention comprises increasing or generating the activity of a gene product with the activity of a “D-xylose transporter subunit” from Escherichia coli K12 or its functional equivalent or its homolog, e.g. the increase of
[0495] (a) a gene product of a gene comprising the nucleic acid molecule as shown in column 5 of Table I and being depicted in the same respective line as said B3568 or a functional equivalent or a homologue thereof as shown depicted in column 7 of Table I, preferably a homologue or functional equivalent as shown depicted in column 7 of Table I B, and being depicted in the same respective line as said B3568; or
[0496] (b) a polypeptide comprising a polypeptide, a consensus sequence or a polypeptide motif as shown depicted in column 5 of Table II, and being depicted in the same respective line as said B3568 or a functional equivalent or a homologue thereof as depicted in column 7 of Table II or IV, preferably a homologue or functional equivalent as depicted in column 7 of Table II B, and being depicted in the same respective line as said B3568,
   as mentioned herein, for the an increased tolerance and/or resistance to environmental stress and increased biomass production as compared to a corresponding non-transformed wild type plant cell, plant or part thereof in plant cell, plant or part thereof, as mentioned.

[0497] Accordingly, in one embodiment, the molecule which activity is to be increased in the process of the invention is the gene product with an activity of described as a “D-xylose transporter subunit”, preferably it is the molecule of section (a) or (b) of this paragraph.

[0498] In one embodiment, said molecule, which activity is to be increased in the process of the invention and which is the gene product with an activity of described as a “D-xylose transporter subunit”, is increased plastidic.

[0499] The sequence of B3616 from Escherichia coli K12, e.g. as shown in column 5 of Table I, [sequences from Saccharomyces cerevisiae has been published in Goffeau et al., Science 274 (5287), 546-547, 1996, sequences from Escherichia coli has been published in Blattner et al., Science 277 (5331), 1453-1474 (1997), sequences from Synechocystis sp. has been published in Kaneko and TAbata, Plant Cell Physiology 38 (11), 1997 and its activity is published described as L-threonine 3-dehydrogenase.

[0500] Accordingly, in one embodiment, the process of the present invention comprises increasing or generating the activity of a gene product with the activity of a “L-threonine 3-dehydrogenase” from Escherichia coli K12 or its functional equivalent or its homolog, e.g. the increase of
[0501] (a) a gene product of a gene comprising the nucleic acid molecule as shown in column 5 of Table I and being depicted in the same respective line as said B3616 or a functional equivalent or a homologue thereof as shown depicted in column 7 of Table I, preferably a homologue or functional equivalent as shown depicted in column 7 of Table I B, and being depicted in the same respective line as said B3616; or
[0502] (b) a polypeptide comprising a polypeptide, a consensus sequence or a polypeptide motif as shown depicted in column 5 of Table II, and being depicted in the same respective line as said B3616 or a functional equivalent or a homologue thereof as depicted in column 7 of Table II or IV, preferably a homologue or functional equivalent as depicted in column 7 of Table II B, and being depicted in the same respective line as said B3616,
   as mentioned herein, for the an increased tolerance and/or resistance to environmental stress and increased biomass production as compared to a corresponding non-transformed wild type plant cell, plant or part thereof in plant cell, plant or part thereof, as mentioned.

[0503] Accordingly, in one embodiment, the molecule which activity is to be increased in the process of the invention is the gene product with an activity of described as a “L-threonine 3-dehydrogenase”, preferably it is the molecule of section (a) or (b) of this paragraph.

[0504] In one embodiment, said molecule, which activity is to be increased in the process of the invention and which is the gene product with an activity of described as a “L-threonine 3-dehydrogenase”, is increased plastidic.

[0505] The sequence of B3616 from Escherichia coli K12, e.g. as shown in column 5 of Table I, [sequences from Saccharomyces cerevisiae has been published in Goffeau et al., Science 274 (5287), 546-547, 1996, sequences from Escherichia coli has been published in Blattner et al., Science 277 (5331), 1453-1474 (1997), sequences from Synechocystis sp. has been published in Kaneko and TAbata, Plant Cell Physiology 38 (11), 1997 and its activity is published described as L-threonine 3-dehydrogenase.

[0506] Accordingly, in one embodiment, the process of the present invention comprises increasing or generating the activity of a gene product with the activity of a “L-threonine 3-dehydrogenase” from Escherichia coli K12 or its functional equivalent or its homolog, e.g. the increase of
[0507] (a) a gene product of a gene comprising the nucleic acid molecule as shown in column 5 of Table I and being depicted in the same respective line as said B3616 or a functional equivalent or a homologue thereof as shown depicted in column 7 of Table I, preferably a homologue or functional equivalent as shown depicted in column 7 of Table I B, and being depicted in the same respective line as said B3616; or
[0508] (b) a polypeptide comprising a polypeptide, a consensus sequence or a polypeptide motif as shown depicted in column 5 of Table II, and being depicted in the same respective line as said B3616 or a functional equivalent or a homologue thereof as depicted in column 7 of Table II or IV, preferably a homologue or functional equivalent as depicted in column 7 of Table II B, and being depicted in the same respective line as said B3616,
   as mentioned herein, for the an increased tolerance and/or resistance to environmental stress and increased biomass production as compared to a corresponding non-transformed wild type plant cell, plant or part thereof in plant cell, plant or part thereof, as mentioned.

[0509] Accordingly, in one embodiment, the molecule which activity is to be increased in the process of the invention is the gene product with an activity of described as a “L-threonine 3-dehydrogenase”, preferably it is the molecule of section (a) or (b) of this paragraph.

[0510] In one embodiment, said molecule, which activity is to be increased in the process of the invention and which is the gene product with an activity of described as a “L-threonine 3-dehydrogenase”, is increased non-targeted.

[0511] The sequence of B3812 from Escherichia coli K12, e.g. as shown in column 5 of Table I, [sequences from Saccharomyces cerevisiae has been published in Goffeau et al., Science 274 (5287), 546-547, 1996, sequences from Escherichia coli has been published in Blattner et al., Science 277 (5331), 1453-1474 (1997), sequences from Synechocystis sp. has been published in Kaneko and TAbata, Plant Cell Physiology 38 (11), 1997 and its activity is published described as predicted hydrolase.

[0512] Accordingly, in one embodiment, the process of the present invention comprises increasing or generating the activity of a gene product with the activity of a “predicted hydrolase” from Escherichia coli K12 or its functional equivalent or its homolog, e.g. the increase of
[0513] (a) a gene product of a gene comprising the nucleic acid molecule as shown in column 5 of Table I and being depicted in the same respective line as said B3812 or a functional equivalent or a homologue thereof as shown depicted in column 7 of Table I, preferably a homologue or functional equivalent as shown depicted in column 7 of Table I B, and being depicted in the same respective line as said B3812; or
[0514] (b) a polypeptide comprising a polypeptide, a consensus sequence or a polypeptide motif as shown depicted in column 5 of Table II, and being depicted in the same respective line as said B3812 or a functional equivalent or a homologue thereof as depicted in column 7 of Table II or IV, preferably a homologue or functional equivalent as depicted in column 7 of Table II B, and being depicted in the same respective line as said B3812,
   as mentioned herein, for the an increased tolerance and/or resistance to environmental stress and increased biomass production as compared to a corresponding non-transformed wild type plant cell, plant or part thereof in plant cell, plant or part thereof, as mentioned.

[0515] Accordingly, in one embodiment, the molecule which activity is to be increased in the process of the invention is the gene product with an activity of described as a “predicted hydrolase”, preferably it is the molecule of section (a) or (b) of this paragraph.

[0516] In one embodiment, said molecule, which activity is to be increased in the process of the invention and which is the gene product with an activity of described as a “predicted hydrolase”, is increased non-targeted.

[0517] The sequence of B3899 from Escherichia coli K12, e.g. as shown in column 5 of Table I, [sequences from Saccharomyces cerevisiae has been published in Goffeau et al., Science 274 (5287), 546-547, 1996, sequences from Escherichia coli has been published in Blattner et al., Science 277 (5331), 1453-1474 (1997), sequences from Synechocystis sp. has been published in Kaneko and TAbata, Plant Cell Physiology 38 (11), 1997 and its activity is published described as predicted PTS enzymes (IIB component/IIC component).

[0518] Accordingly, in one embodiment, the process of the present invention comprises increasing or generating the activity of a gene product with the activity of a “predicted PTS enzymes (IIB component/IIC component)” from Escherichia coli K12 or its functional equivalent or its homolog, e.g. the increase of
[0519] (a) a gene product of a gene comprising the nucleic acid molecule as shown in column 5 of Table I and being depicted in the same respective line as said B3899 or a functional equivalent or a homologue thereof as shown depicted in column 7 of Table I, preferably a homologue or functional equivalent as shown depicted in column 7 of Table I B, and being depicted in the same respective line as said B3899; or
[0520] (b) a polypeptide comprising a polypeptide, a consensus sequence or a polypeptide motif as shown depicted in column 5 of Table II, and being depicted in the same respective line as said B3899 or a functional equivalent or a homologue thereof as depicted in column 7 of Table II or IV, preferably a homologue or functional equivalent as depicted in column 7 of Table II B, and being depicted in the same respective line as said B3899,
   as mentioned herein, for the an increased tolerance and/or resistance to environmental stress and increased biomass production as compared to a corresponding non-transformed wild type plant cell, plant or part thereof in plant cell, plant or part thereof, as mentioned.

[0521] Accordingly, in one embodiment, the molecule which activity is to be increased in the process of the invention is the gene product with an activity of described as a “predicted PTS enzymes (IIB component/IIC component)”, preferably it is the molecule of section (a) or (b) of this paragraph.

[0522] In one embodiment, said molecule, which activity is to be increased in the process of the invention and which is the gene product with an activity of described as a “predicted PTS enzymes (IIB component/IIC component)”, is increased non-targeted.

[0523] The sequence of B3929 from Escherichia coli K12, e.g. as shown in column 5 of Table I, [sequences from Saccharomyces cerevisiae has been published in Goffeau et al., Science 274 (5287), 546-547, 1996, sequences from Escherichia coli has been published in Blattner et al., Science 277 (5331), 1453-1474 (1997), sequences from Synechocystis sp. has been published in Kaneko and TAbata, Plant Cell Physiology 38 (11), 1997 and its activity is published described as ribonuclease activity regulator protein RraA.

[0524] Accordingly, in one embodiment, the process of the present invention comprises increasing or generating the activity of a gene product with the activity of a “ribonuclease activity regulator protein RraA” from Escherichia coli K12 or its functional equivalent or its homolog, e.g. the increase of
[0525] (a) a gene product of a gene comprising the nucleic acid molecule as shown in column 5 of Table I and being depicted in the same respective line as said B3929 or a functional equivalent or a homologue thereof as shown depicted in column 7 of Table I, preferably a homologue or functional equivalent as shown depicted in column 7 of Table I B, and being depicted in the same respective line as said B3929; or
[0526] (b) a polypeptide comprising a polypeptide, a consensus sequence or a polypeptide motif as shown depicted in column 5 of Table II, and being depicted in the same respective line as said B3929 or a functional equivalent or a homologue thereof as depicted in column 7 of Table II or IV, preferably a homologue or functional equivalent as depicted in column 7 of Table II B, and being depicted in the same respective line as said B3929,
   as mentioned herein, for the an increased tolerance and/or resistance to environmental stress and increased biomass production as compared to a corresponding non-transformed wild type plant cell, plant or part thereof in plant cell, plant or part thereof, as mentioned.

[0527] Accordingly, in one embodiment, the molecule which activity is to be increased in the process of the invention is the gene product with an activity of described as a “ribonuclease activity regulator protein RraA”, preferably it is the molecule of section (a) or (b) of this paragraph.

[0528] In one embodiment, said molecule, which activity is to be increased in the process of the invention and which is the gene product with an activity of described as a “ribonuclease activity regulator protein RraA”, is increased plastidic.

[0529] The sequence of B3938 from Escherichia coli K12, e.g. as shown in column 5 of Table I, [sequences from Saccharomyces cerevisiae has been published in Goffeau et al., Science 274 (5287), 546-547, 1996, sequences from Escherichia coli has been published in Blattner et al., Science 277 (5331), 1453-1474 (1997), sequences from Synechocystis sp. has been published in Kaneko and TAbata, Plant Cell Physiology 38 (11), 1997 and its activity is published described as transcriptional repressor protein MetJ.

[0530] Accordingly, in one embodiment, the process of the present invention comprises increasing or generating the activity of a gene product with the activity of a “transcriptional repressor protein MetJ” from Escherichia coli K12 or its functional equivalent or its homolog, e.g. the increase of
[0531] (a) a gene product of a gene comprising the nucleic acid molecule as shown in column 5 of Table I and being depicted in the same respective line as said B3938 or a functional equivalent or a homologue thereof as shown depicted in column 7 of Table I, preferably a homologue or functional equivalent as shown depicted in column 7 of Table I B, and being depicted in the same respective line as said B3938; or
[0532] (b) a polypeptide comprising a polypeptide, a consensus sequence or a polypeptide motif as shown depicted in column 5 of Table II, and being depicted in the same respective line as said B3938 or a functional equivalent or a homologue thereof as depicted in column 7 of Table II or IV, preferably a homologue or functional equivalent as depicted in column 7 of Table II B, and being depicted in the same respective line as said B3938,
   as mentioned herein, for the an increased tolerance and/or resistance to environmental stress and increased biomass production as compared to a corresponding non-transformed wild type plant cell, plant or part thereof in plant cell, plant or part thereof, as mentioned.

[0533] Accordingly, in one embodiment, the molecule which activity is to be increased in the process of the invention is the gene product with an activity of described as a “transcriptional repressor protein MetJ”, preferably it is the molecule of section (a) or (b) of this paragraph.

[0534] In one embodiment, said molecule, which activity is to be increased in the process of the invention and which is the gene product with an activity of described as a “transcriptional repressor protein MetJ”, is increased non-targeted.

[0535] The sequence of B3974 from Escherichia coli K12, e.g. as shown in column 5 of Table I, [sequences from Saccharomyces cerevisiae has been published in Goffeau et al., Science 274 (5287), 546-547, 1996, sequences from Escherichia coli has been published in Blattner et al., Science 277 (5331), 1453-1474 (1997), sequences from Synechocystis sp. has been published in Kaneko and TAbata, Plant Cell Physiology 38 (11), 1997 and its activity is published described as pantothenate kinase.

[0536] Accordingly, in one embodiment, the process of the present invention comprises increasing or generating the activity of a gene product with the activity of a “pantothenate kinase” from Escherichia coli K12 or its functional equivalent or its homolog, e.g. the increase of
[0537] (a) a gene product of a gene comprising the nucleic acid molecule as shown in column 5 of Table I and being depicted in the same respective line as said B3974 or a functional equivalent or a homologue thereof as shown depicted in column 7 of Table I, preferably a homologue or functional equivalent as shown depicted in column 7 of Table I B, and being depicted in the same respective line as said B3974; or
[0538] (b) a polypeptide comprising a polypeptide, a consensus sequence or a polypeptide motif as shown depicted in column 5 of Table II, and being depicted in the same respective line as said B3974 or a functional equivalent or a homologue thereof as depicted in column 7 of Table II or IV, preferably a homologue or functional equivalent as depicted in column 7 of Table II B, and being depicted in the same respective line as said B3974,
   as mentioned herein, for the an increased tolerance and/or resistance to environmental stress and increased biomass production as compared to a corresponding non-transformed wild type plant cell, plant or part thereof in plant cell, plant or part thereof, as mentioned.

[0539] Accordingly, in one embodiment, the molecule which activity is to be increased in the process of the invention is the gene product with an activity of described as a “pantothenate kinase”, preferably it is the molecule of section (a) or (b) of this paragraph.

[0540] In one embodiment, said molecule, which activity is to be increased in the process of the invention and which is the gene product with an activity of described as a “pantothenate kinase”, is increased non-targeted.

[0541] The sequence of B3989 from Escherichia coli K12, e.g. as shown in column 5 of Table I, [sequences from Saccharomyces cerevisiae has been published in Goffeau et al., Science 274 (5287), 546-547, 1996, sequences from Escherichia coli has been published in Blattner et al., Science 277 (5331), 1453-1474 (1997), sequences from Synechocystis sp. has been published in Kaneko and TAbata, Plant Cell Physiology 38 (11), 1997 and its activity is published described as heat shock protein.

[0542] Accordingly, in one embodiment, the process of the present invention comprises increasing or generating the activity of a gene product with the activity of a “heat shock protein” from Escherichia coli K12 or its functional equivalent or its homolog, e.g. the increase of
[0543] (a) a gene product of a gene comprising the nucleic acid molecule as shown in column 5 of Table I and being depicted in the same respective line as said B3989 or a functional equivalent or a homologue thereof as shown depicted in column 7 of Table I, preferably a homologue or functional equivalent as shown depicted in column 7 of Table I B, and being depicted in the same respective line as said B3989; or
[0544] (b) a polypeptide comprising a polypeptide, a consensus sequence or a polypeptide motif as shown depicted in column 5 of Table II, and being depicted in the same respective line as said B3989 or a functional equivalent or a homologue thereof as depicted in column 7 of Table II or IV, preferably a homologue or functional equivalent as depicted in column 7 of Table II B, and being depicted in the same respective line as said B3989,
   as mentioned herein, for the an increased tolerance and/or resistance to environmental stress and increased biomass production as compared to a corresponding non-transformed wild type plant cell, plant or part thereof in plant cell, plant or part thereof, as mentioned.

[0545] Accordingly, in one embodiment, the molecule which activity is to be increased in the process of the invention is the gene product with an activity of described as a “heat shock protein”, preferably it is the molecule of section (a) or (b) of this paragraph.

[0546] In one embodiment, said molecule, which activity is to be increased in the process of the invention and which is the gene product with an activity of described as a “heat shock protein”, is increased non-targeted.

[0547] The sequence of B4029 from Escherichia coli K12, e.g. as shown in column 5 of Table I, [sequences from Saccharomyces cerevisiae has been published in Goffeau et al., Science 274 (5287), 546-547, 1996, sequences from Escherichia coli has been published in Blattner et al., Science 277 (5331), 1453-1474 (1997), sequences from Synechocystis sp. has been published in Kaneko and TAbata, Plant Cell Physiology 38 (11), 1997 and its activity is published described as predicted porin.

[0548] Accordingly, in one embodiment, the process of the present invention comprises increasing or generating the activity of a gene product with the activity of a “predicted porin” from Escherichia coli K12 or its functional equivalent or its homolog, e.g. the increase of
[0549] (a) a gene product of a gene comprising the nucleic acid molecule as shown in column 5 of Table I and being depicted in the same respective line as said B4029 or a functional equivalent or a homologue thereof as shown depicted in column 7 of Table I, preferably a homologue or functional equivalent as shown depicted in column 7 of Table I B, and being depicted in the same respective line as said B4029; or
[0550] (b) a polypeptide comprising a polypeptide, a consensus sequence or a polypeptide motif as shown depicted in column 5 of Table II, and being depicted in the same respective line as said B4029 or a functional equivalent or a homologue thereof as depicted in column 7 of Table II or IV, preferably a homologue or functional equivalent as depicted in column 7 of Table II B, and being depicted in the same respective line as said B4029,
   as mentioned herein, for the an increased tolerance and/or resistance to environmental stress and increased biomass production as compared to a corresponding non-transformed wild type plant cell, plant or part thereof in plant cell, plant or part thereof, as mentioned.

[0551] Accordingly, in one embodiment, the molecule which activity is to be increased in the process of the invention is the gene product with an activity of described as a “predicted porin”, preferably it is the molecule of section (a) or (b) of this paragraph.

[0552] In one embodiment, said molecule, which activity is to be increased in the process of the invention and which is the gene product with an activity of described as a “predicted porin”, is increased non-targeted.

[0553] The sequence of B4139 from Escherichia coli K12, e.g. as shown in column 5 of Table I, [sequences from Saccharomyces cerevisiae has been published in Goffeau et al., Science 274 (5287), 546-547, 1996, sequences from Escherichia coli has been published in Blattner et al., Science 277 (5331), 1453-1474 (1997), sequences from Synechocystis sp. has been published in Kaneko and TAbata, Plant Cell Physiology 38 (11), 1997 and its activity is published described as aspartate ammonia-lyase.

[0554] Accordingly, in one embodiment, the process of the present invention comprises increasing or generating the activity of a gene product with the activity of a “aspartate ammonia-lyase” from Escherichia coli K12 or its functional equivalent or its homolog, e.g. the increase of
[0555] (a) a gene product of a gene comprising the nucleic acid molecule as shown in column 5 of Table I and being depicted in the same respective line as said B4139 or a functional equivalent or a homologue thereof as shown depicted in column 7 of Table I, preferably a homologue or functional equivalent as shown depicted in column 7 of Table I B, and being depicted in the same respective line as said B4139; or
[0556] (b) a polypeptide comprising a polypeptide, a consensus sequence or a polypeptide motif as shown depicted in column 5 of Table II, and being depicted in the same respective line as said B4139 or a functional equivalent or a homologue thereof as depicted in column 7 of Table II or IV, preferably a homologue or functional equivalent as depicted in column 7 of Table II B, and being depicted in the same respective line as said B4139,
   as mentioned herein, for the an increased tolerance and/or resistance to environmental stress and increased biomass production as compared to a corresponding non-transformed wild type plant cell, plant or part thereof in plant cell, plant or part thereof, as mentioned.

[0557] Accordingly, in one embodiment, the molecule which activity is to be increased in the process of the invention is the gene product with an activity of described as a “aspartate ammonia-lyase”, preferably it is the molecule of section (a) or (b) of this paragraph.

[0558] In one embodiment, said molecule, which activity is to be increased in the process of the invention and which is the gene product with an activity of described as a “aspartate ammonia-lyase”, is increased plastidic.

[0559] The sequence of B4390 from Escherichia coli K12, e.g. as shown in column 5 of Table I, [sequences from Saccharomyces cerevisiae has been published in Goffeau et al., Science 274 (5287), 546-547, 1996, sequences from Escherichia coli has been published in Blattner et al., Science 277 (5331), 1453-1474 (1997), sequences from Synechocystis sp. has been published in Kaneko and TAbata, Plant Cell Physiology 38 (11), 1997 and its activity is published described as nicotinamide-nucleotide adenylyltransferase.

[0560] Accordingly, in one embodiment, the process of the present invention comprises increasing or generating the activity of a gene product with the activity of a “nicotinamide-nucleotide adenylyltransferase” from Escherichia coli K12 or its functional equivalent or its homolog, e.g. the increase of
[0561] (a) a gene product of a gene comprising the nucleic acid molecule as shown in column 5 of Table I and being depicted in the same respective line as said B4390 or a functional equivalent or a homologue thereof as shown depicted in column 7 of Table I, preferably a homologue or functional equivalent as shown depicted in column 7 of Table I B, and being depicted in the same respective line as said B4390; or
[0562] (b) a polypeptide comprising a polypeptide, a consensus sequence or a polypeptide motif as shown depicted in column 5 of Table II, and being depicted in the same respective line as said B4390 or a functional equivalent or a homologue thereof as depicted in column 7 of Table II or IV, preferably a homologue or functional equivalent as depicted in column 7 of Table II B, and being depicted in the same respective line as said B4390,
   as mentioned herein, for the an increased tolerance and/or resistance to environmental stress and increased biomass production as compared to a corresponding non-transformed wild type plant cell, plant or part thereof in plant cell, plant or part thereof, as mentioned.

[0563] Accordingly, in one embodiment, the molecule which activity is to be increased in the process of the invention is the gene product with an activity of described as a “nicotinamide-nucleotide adenylyltransferase”, preferably it is the molecule of section (a) or (b) of this paragraph.

[0564] In one embodiment, said molecule, which activity is to be increased in the process of the invention and which is the gene product with an activity of described as a “nicotinamide-nucleotide adenylyltransferase”, is increased non-targeted.

[0565] The sequence of SII0290 from Synechocystis sp. PCC 6803, e.g. as shown in column 5 of Table I, [sequences from Saccharomyces cerevisiae has been published in Goffeau et al., Science 274 (5287), 546-547, 1996, sequences from Escherichia coli has been published in Blattner et al., Science 277 (5331), 1453-1474 (1997), sequences from Synechocystis sp. has been published in Kaneko and TAbata, Plant Cell Physiology 38 (11), 1997 and its activity is published described as polyphosphate kinase.

[0566] Accordingly, in one embodiment, the process of the present invention comprises increasing or generating the activity of a gene product with the activity of a “polyphosphate kinase” from Synechocystis sp. PCC 6803 or its functional equivalent or its homolog, e.g. the increase of
[0567] (a) a gene product of a gene comprising the nucleic acid molecule as shown in column 5 of Table I and being depicted in the same respective line as said SII0290 or a functional equivalent or a homologue thereof as shown depicted in column 7 of Table I, preferably a homologue or functional equivalent as shown depicted in column 7 of Table I B, and being depicted in the same respective line as said SII0290; or
[0568] (b) a polypeptide comprising a polypeptide, a consensus sequence or a polypeptide motif as shown depicted in column 5 of Table II, and being depicted in the same respective line as said SII0290 or a functional equivalent or a homologue thereof as depicted in column 7 of Table II or IV, preferably a homologue or functional equivalent as depicted in column 7 of Table II B, and being depicted in the same respective line as said SII0290,
   as mentioned herein, for the an increased tolerance and/or resistance to environmental stress and increased biomass production as compared to a corresponding non-transformed wild type plant cell, plant or part thereof in plant cell, plant or part thereof, as mentioned.

[0569] Accordingly, in one embodiment, the molecule which activity is to be increased in the process of the invention is the gene product with an activity of described as a “polyphosphate kinase”, preferably it is the molecule of section (a) or (b) of this paragraph.

[0570] In one embodiment, said molecule, which activity is to be increased in the process of the invention and which is the gene product with an activity of described as a “polyphosphate kinase”, is increased non-targeted.

[0571] The sequence of YAL049C from Saccharomyces cerevisiae, e.g. as shown in column 5 of Table I, [sequences from Saccharomyces cerevisiae has been published in Goffeau et al., Science 274 (5287), 546-547, 1996, sequences from Escherichia coli has been published in Blattner et al., Science 277 (5331), 1453-1474 (1997), sequences from Synechocystis sp. has been published in Kaneko and TAbata, Plant Cell Physiology 38 (11), 1997 and its activity is published described as Yal049c-protein.

[0572] Accordingly, in one embodiment, the process of the present invention comprises increasing or generating the activity of a gene product with the activity of a “Yal049c-protein” from Saccharomyces cerevisiae or its functional equivalent or its homolog, e.g. the increase of
[0573] (a) a gene product of a gene comprising the nucleic acid molecule as shown in column 5 of Table I and being depicted in the same respective line as said YAL049C or a functional equivalent or a homologue thereof as shown depicted in column 7 of Table I, preferably a homologue or functional equivalent as shown depicted in column 7 of Table I B, and being depicted in the same respective line as said Y-AL049C; or
[0574] (b) a polypeptide comprising a polypeptide, a consensus sequence or a polypeptide motif as shown depicted in column 5 of Table II, and being depicted in the same respective line as said YAL049C or a functional equivalent or a homologue thereof as depicted in column 7 of Table II or IV, preferably a homologue or functional equivalent as depicted in column 7 of Table II B, and being depicted in the same respective line as said YAL049C,
   as mentioned herein, for the an increased tolerance and/or resistance to environmental stress and increased biomass production as compared to a corresponding non-transformed wild type plant cell, plant or part thereof in plant cell, plant or part thereof, as mentioned.

[0575] Accordingly, in one embodiment, the molecule which activity is to be increased in the process of the invention is the gene product with an activity of described as a “Yal049c-protein”, preferably it is the molecule of section (a) or (b) of this paragraph.

[0576] In one embodiment, said molecule, which activity is to be increased in the process of the invention and which is the gene product with an activity of described as a “Yal049c-protein”, is increased non-targeted.

[0577] The sequence of YCR059C from Saccharomyces cerevisiae, e.g. as shown in column 5 of Table I, [sequences from Saccharomyces cerevisiae has been published in Goffeau et al., Science 274 (5287), 546-547, 1996, sequences from Escherichia coli has been published in Blattner et al., Science 277 (5331), 1453-1474 (1997), sequences from Synechocystis sp. has been published in Kaneko and TAbata, Plant Cell Physiology 38 (11), 1997 and its activity is published described as YCR059C-protein.

[0578] Accordingly, in one embodiment, the process of the present invention comprises increasing or generating the activity of a gene product with the activity of a “YCR059C-protein” from Saccharomyces cerevisiae or its functional equivalent or its homolog, e.g. the increase of
[0579] (a) a gene product of a gene comprising the nucleic acid molecule as shown in column 5 of Table I and being depicted in the same respective line as said YCR059C or a functional equivalent or a homologue thereof as shown depicted in column 7 of Table I, preferably a homologue or functional equivalent as shown depicted in column 7 of Table I B, and being depicted in the same respective line as said YCR059C; or
[0580] (b) a polypeptide comprising a polypeptide, a consensus sequence or a polypeptide motif as shown depicted in column 5 of Table II, and being depicted in the same respective line as said YCR059C or a functional equivalent or a homologue thereof as depicted in column 7 of Table II or IV, preferably a homologue or functional equivalent as depicted in column 7 of Table II B, and being depicted in the same respective line as said YCR059C,
   as mentioned herein, for the an increased tolerance and/or resistance to environmental stress and increased biomass production as compared to a corresponding non-transformed wild type plant cell, plant or part thereof in plant cell, plant or part thereof, as mentioned.

[0581] Accordingly, in one embodiment, the molecule which activity is to be increased in the process of the invention is the gene product with an activity of described as a “YCR059C-protein”, preferably it is the molecule of section (a) or (b) of this paragraph.

[0582] In one embodiment, said molecule, which activity is to be increased in the process of the invention and which is the gene product with an activity of described as a “YCR059C-protein”, is increased non-targeted.

[0583] The sequence of YDR035W from Saccharomyces cerevisiae, e.g. as shown in column 5 of Table I, [sequences from Saccharomyces cerevisiae has been published in Goffeau et al., Science 274 (5287), 546-547, 1996, sequences from Escherichia coli has been published in Blattner et al., Science 277 (5331), 1453-1474 (1997), sequences from Synechocystis sp. has been published in Kaneko and TAbata, Plant Cell Physiology 38 (11), 1997 and its activity is published described as 3-deoxy-D-arabino-heptulosonate-7-phosphate (DAHP) synthase.

[0584] Accordingly, in one embodiment, the process of the present invention comprises increasing or generating the activity of a gene product with the activity of a “3-deoxy-D-arabino-heptulosonate-7-phosphate (DAHP) synthase” from Saccharomyces cerevisiae or its functional equivalent or its homolog, e.g. the increase of
[0585] (a) a gene product of a gene comprising the nucleic acid molecule as shown in column 5 of Table I and being depicted in the same respective line as said YDR035W or a functional equivalent or a homologue thereof as shown depicted in column 7 of Table I, preferably a homologue or functional equivalent as shown depicted in column 7 of Table I B, and being depicted in the same respective line as said YDR035W; or
[0586] (b) a polypeptide comprising a polypeptide, a consensus sequence or a polypeptide motif as shown depicted in column 5 of Table II, and being depicted in the same respective line as said YDR035W or a functional equivalent or a homologue thereof as depicted in column 7 of Table II or IV, preferably a homologue or functional equivalent as depicted in column 7 of Table II B, and being depicted in the same respective line as said YDR035W,
   as mentioned herein, for the an increased tolerance and/or resistance to environmental stress and increased biomass production as compared to a corresponding non-transformed wild type plant cell, plant or part thereof in plant cell, plant or part thereof, as mentioned.

[0587] Accordingly, in one embodiment, the molecule which activity is to be increased in the process of the invention is the gene product with an activity of described as a “3-deoxy-D-arabino-heptulosonate-7-phosphate (DAHP) synthase”, preferably it is the molecule of section (a) or (b) of this paragraph.

[0588] In one embodiment, said molecule, which activity is to be increased in the process of the invention and which is the gene product with an activity of described as a “3-deoxy-D-arabino-heptulosonate-7-phosphate (DAHP) synthase”, is increased plastidic.

[0589] The sequence of YEL005C from Saccharomyces cerevisiae, e.g. as shown in column 5 of Table I, [sequences from Saccharomyces cerevisiae has been published in Goffeau et al., Science 274 (5287), 546-547, 1996, sequences from Escherichia coli has been published in Blattner et al., Science 277 (5331), 1453-1474 (1997), sequences from Synechocystis sp. has been published in Kaneko and TAbata, Plant Cell Physiology 38 (11), 1997 and its activity is published described as YEL005C-protein.

[0590] Accordingly, in one embodiment, the process of the present invention comprises increasing or generating the activity of a gene product with the activity of a “YEL005C-protein” from Saccharomyces cerevisiae or its functional equivalent or its homolog, e.g. the increase of
[0591] (a) a gene product of a gene comprising the nucleic acid molecule as shown in column 5 of Table I and being depicted in the same respective line as said YEL005C or a functional equivalent or a homologue thereof as shown depicted in column 7 of Table I, preferably a homologue or functional equivalent as shown depicted in column 7 of Table I B, and being depicted in the same respective line as said Y-EL005C; or
[0592] (b) a polypeptide comprising a polypeptide, a consensus sequence or a polypeptide motif as shown depicted in column 5 of Table II, and being depicted in the same respective line as said YEL005C or a functional equivalent or a homologue thereof as depicted in column 7 of Table II or IV, preferably a homologue or functional equivalent as depicted in column 7 of Table II B, and being depicted in the same respective line as said YEL005C,
   as mentioned herein, for the an increased tolerance and/or resistance to environmental stress and increased biomass production as compared to a corresponding non-transformed wild type plant cell, plant or part thereof in plant cell, plant or part thereof, as mentioned.

[0593] Accordingly, in one embodiment, the molecule which activity is to be increased in the process of the invention is the gene product with an activity of described as a “Y-EL005C-protein”, preferably it is the molecule of section (a) or (b) of this paragraph.

[0594] In one embodiment, said molecule, which activity is to be increased in the process of the invention and which is the gene product with an activity of described as a “Y-EL005C-protein”, is increased non-targeted.

[0595] The sequence of YER112W from Saccharomyces cerevisiae, e.g. as shown in column 5 of Table I, [sequences from Saccharomyces cerevisiae has been published in Goffeau et al., Science 274 (5287), 546-547, 1996, sequences from Escherichia coli has been published in Blattner et al., Science 277 (5331), 1453-1474 (1997), sequences from Synechocystis sp. has been published in Kaneko and TAbata, Plant Cell Physiology 38 (11), 1997 and its activity is published described as Lsm (Like Sm) protein.

[0596] Accordingly, in one embodiment, the process of the present invention comprises increasing or generating the activity of a gene product with the activity of a “Lsm (Like Sm) protein” from Saccharomyces cerevisiae or its functional equivalent or its homolog, e.g. the increase of
[0597] (a) a gene product of a gene comprising the nucleic acid molecule as shown in column 5 of Table I and being depicted in the same respective line as said YER112W or a functional equivalent or a homologue thereof as shown depicted in column 7 of Table I, preferably a homologue or functional equivalent as shown depicted in column 7 of Table I B, and being depicted in the same respective line as said YER112W; or
[0598] (b) a polypeptide comprising a polypeptide, a consensus sequence or a polypeptide motif as shown depicted in column 5 of Table II, and being depicted in the same respective line as said YER112W or a functional equivalent or a homologue thereof as depicted in column 7 of Table II or IV, preferably a homologue or functional equivalent as depicted in column 7 of Table II B, and being depicted in the same respective line as said YER112W,
   as mentioned herein, for the an increased tolerance and/or resistance to environmental stress and increased biomass production as compared to a corresponding non-transformed wild type plant cell, plant or part thereof in plant cell, plant or part thereof, as mentioned.

[0599] Accordingly, in one embodiment, the molecule which activity is to be increased in the process of the invention is the gene product with an activity of described as a “Lsm (Like Sm) protein”, preferably it is the molecule of section (a) or (b) of this paragraph.

[0600] In one embodiment, said molecule, which activity is to be increased in the process of the invention and which is the gene product with an activity of described as a “Lsm (Like Sm) protein”, is increased non-targeted.

[0601] The sequence of YER1560 from Saccharomyces cerevisiae, e.g. as shown in column 5 of Table I, [sequences from Saccharomyces cerevisiae has been published in Goffeau et al., Science 274 (5287), 546-547, 1996, sequences from Escherichia coli has been published in Blattner et al., Science 277 (5331), 1453-1474 (1997), sequences from Synechocystis sp. has been published in Kaneko and TAbata, Plant Cell Physiology 38 (11), 1997 and its activity is published described as YER156C-protein.

[0602] Accordingly, in one embodiment, the process of the present invention comprises increasing or generating the activity of a gene product with the activity of a “YER156C-protein” from Saccharomyces cerevisiae or its functional equivalent or its homolog, e.g. the increase of
[0603] (a) a gene product of a gene comprising the nucleic acid molecule as shown in column 5 of Table I and being depicted in the same respective line as said YER156C or a functional equivalent or a homologue thereof as shown depicted in column 7 of Table I, preferably a homologue or functional equivalent as shown depicted in column 7 of Table I B, and being depicted in the same respective line as said YER156C; or
[0604] (b) a polypeptide comprising a polypeptide, a consensus sequence or a polypeptide motif as shown depicted in column 5 of Table II, and being depicted in the same respective line as said YER156C or a functional equivalent or a homologue thereof as depicted in column 7 of Table II or IV, preferably a homologue or functional equivalent as depicted in column 7 of Table II B, and being depicted in the same respective line as said YER156C,
   as mentioned herein, for the an increased tolerance and/or resistance to environmental stress and increased biomass production as compared to a corresponding non-transformed wild type plant cell, plant or part thereof in plant cell, plant or part thereof, as mentioned.

[0605] Accordingly, in one embodiment, the molecule which activity is to be increased in the process of the invention is the gene product with an activity of described as a “YER156C-protein”, preferably it is the molecule of section (a) or (b) of this paragraph.

[0606] In one embodiment, said molecule, which activity is to be increased in the process of the invention and which is the gene product with an activity of described as a “Y-ER156C-protein”, is increased non-targeted.

[0607] The sequence of YER173W from Saccharomyces cerevisiae, e.g. as shown in column 5 of Table I, [sequences from Saccharomyces cerevisiae has been published in Goffeau et al., Science 274 (5287), 546-547, 1996, sequences from Escherichia coli has been published in Blattner et al., Science 277 (5331), 1453-1474 (1997), sequences from Synechocystis sp. has been published in Kaneko and TAbata, Plant Cell Physiology 38 (11), 1997 and its activity is published described as Checkpoint protein.

[0608] Accordingly, in one embodiment, the process of the present invention comprises increasing or generating the activity of a gene product with the activity of a “Checkpoint protein” from Saccharomyces cerevisiae or its functional equivalent or its homolog, e.g. the increase of
[0609] (a) a gene product of a gene comprising the nucleic acid molecule as shown in column 5 of Table I and being depicted in the same respective line as said Y-ER173W or a functional equivalent or a homologue thereof as shown depicted in column 7 of Table I, preferably a homologue or functional equivalent as shown depicted in column 7 of Table I B, and being depicted in the same respective line as said YER173W; or
[0610] (b) a polypeptide comprising a polypeptide, a consensus sequence or a polypeptide motif as shown depicted in column 5 of Table II, and being depicted in the same respective line as said YER173W or a functional equivalent or a homologue thereof as depicted in column 7 of Table II or IV, preferably a homologue or functional equivalent as depicted in column 7 of Table II B, and being depicted in the same respective line as said YER173W,
   as mentioned herein, for the an increased tolerance and/or resistance to environmental stress and increased biomass production as compared to a corresponding non-transformed wild type plant cell, plant or part thereof in plant cell, plant or part thereof, as mentioned.

[0611] Accordingly, in one embodiment, the molecule which activity is to be increased in the process of the invention is the gene product with an activity of described as a “Check-point protein”, preferably it is the molecule of section (a) or (b) of this paragraph.

[0612] In one embodiment, said molecule, which activity is to be increased in the process of the invention and which is the gene product with an activity of described as a “Check-point protein”, is increased non-targeted.

[0613] The sequence of YGL045W from Saccharomyces cerevisiae, e.g. as shown in column 5 of Table I, [sequences from Saccharomyces cerevisiae has been published in Goffeau et al., Science 274 (5287), 546-547, 1996, sequences from Escherichia coli has been published in Blattner et al., Science 277 (5331), 1453-1474 (1997), sequences from Synechocystis sp. has been published in Kaneko and TAbata, Plant Cell Physiology 38 (11), 1997 and its activity is published described as YGL045W-protein.

[0614] Accordingly, in one embodiment, the process of the present invention comprises increasing or generating the activity of a gene product with the activity of a “YGL045W-protein” from Saccharomyces cerevisiae or its functional equivalent or its homolog, e.g. the increase of
[0615] (a) a gene product of a gene comprising the nucleic acid molecule as shown in column 5 of Table I and being depicted in the same respective line as said YGL045W or a functional equivalent or a homologue thereof as shown depicted in column 7 of Table I, preferably a homologue or functional equivalent as shown depicted in column 7 of Table I B, and being depicted in the same respective line as said YGL045W; or
[0616] (b) a polypeptide comprising a polypeptide, a consensus sequence or a polypeptide motif as shown depicted in column 5 of Table II, and being depicted in the same respective line as said YGL045W or a functional equivalent or a homologue thereof as depicted in column 7 of Table II or IV, preferably a homologue or functional equivalent as depicted in column 7 of Table II B, and being depicted in the same respective line as said YGL045W,
   as mentioned herein, for the an increased tolerance and/or resistance to environmental stress and increased biomass production as compared to a corresponding non-transformed wild type plant cell, plant or part thereof in plant cell, plant or part thereof, as mentioned.

[0617] Accordingly, in one embodiment, the molecule which activity is to be increased in the process of the invention is the gene product with an activity of described as a “YGL045W-protein”, preferably it is the molecule of section (a) or (b) of this paragraph.

[0618] In one embodiment, said molecule, which activity is to be increased in the process of the invention and which is the gene product with an activity of described as a “YGL045W-protein”, is increased non-targeted.

[0619] The sequence of YGL189C from Saccharomyces cerevisiae, e.g. as shown in column 5 of Table I, [sequences from Saccharomyces cerevisiae has been published in Goffeau et al., Science 274 (5287), 546-547, 1996, sequences from Escherichia coli has been published in Blattner et al., Science 277 (5331), 1453-1474 (1997), sequences from Synechocystis sp. has been published in Kaneko and TAbata, Plant Cell Physiology 38 (11), 1997 and its activity is published described as Protein component of the small (40S) ribosomal subunit.

[0620] Accordingly, in one embodiment, the process of the present invention comprises increasing or generating the activity of a gene product with the activity of a “Protein component of the small (40S) ribosomal subunit” from Saccharomyces cerevisiae or its functional equivalent or its homolog, e.g. the increase of
[0621] (a) a gene product of a gene comprising the nucleic acid molecule as shown in column 5 of Table I and being depicted in the same respective line as said YGL189C or a functional equivalent or a homologue thereof as shown depicted in column 7 of Table I, preferably a homologue or functional equivalent as shown depicted in column 7 of Table I B, and being depicted in the same respective line as said YGL189C; or
[0622] (b) a polypeptide comprising a polypeptide, a consensus sequence or a polypeptide motif as shown depicted in column 5 of Table II, and being depicted in the same respective line as said YGL189C or a functional equivalent or a homologue thereof as depicted in column 7 of Table II or IV, preferably a homologue or functional equivalent as depicted in column 7 of Table II B, and being depicted in the same respective line as said YGL189C,
   as mentioned herein, for the an increased tolerance and/or resistance to environmental stress and increased biomass production as compared to a corresponding non-transformed wild type plant cell, plant or part thereof in plant cell, plant or part thereof, as mentioned.

[0623] Accordingly, in one embodiment, the molecule which activity is to be increased in the process of the invention is the gene product with an activity of described as a “Protein component of the small (40S) ribosomal subunit”, preferably it is the molecule of section (a) or (b) of this paragraph.

[0624] In one embodiment, said molecule, which activity is to be increased in the process of the invention and which is the gene product with an activity of described as a “Protein component of the small (40S) ribosomal subunit”, is increased non-targeted.

[0625] The sequence of YNR015W from Saccharomyces cerevisiae, e.g. as shown in column 5 of Table I, [sequences from Saccharomyces cerevisiae has been published in Goffeau et al., Science 274 (5287), 546-547, 1996, sequences from Escherichia coli has been published in Blattner et al., Science 277 (5331), 1453-1474 (1997), sequences from Synechocystis sp. has been published in Kaneko and TAbata, Plant Cell Physiology 38 (11), 1997 and its activity is published described as Dihydrouridine synthase.

[0626] Accordingly, in one embodiment, the process of the present invention comprises increasing or generating the activity of a gene product with the activity of a “Dihydrouridine synthase” from Saccharomyces cerevisiae or its functional equivalent or its homolog, e.g. the increase of
[0627] (a) a gene product of a gene comprising the nucleic acid molecule as shown in column 5 of Table I and being depicted in the same respective line as said YNR015W or a functional equivalent or a homologue thereof as shown depicted in column 7 of Table I, preferably a homologue or functional equivalent as shown depicted in column 7 of Table I B, and being depicted in the same respective line as said YNR015W; or
[0628] (b) a polypeptide comprising a polypeptide, a consensus sequence or a polypeptide motif as shown depicted in column 5 of Table II, and being depicted in the same respective line as said YNR015W or a functional equivalent or a homologue thereof as depicted in column 7 of Table II or IV, preferably a homologue or functional equivalent as depicted in column 7 of Table II B, and being depicted in the same respective line as said YNR015W,
   as mentioned herein, for the an increased tolerance and/or resistance to environmental stress and increased biomass production as compared to a corresponding non-transformed wild type plant cell, plant or part thereof in plant cell, plant or part thereof, as mentioned.

[0629] Accordingly, in one embodiment, the molecule which activity is to be increased in the process of the invention is the gene product with an activity of described as a “Dihydrouridine synthase”, preferably it is the molecule of section (a) or (b) of this paragraph.

[0630] In one embodiment, said molecule, which activity is to be increased in the process of the invention and which is the gene product with an activity of described as a “Dihydrouridine synthase”, is increased non-targeted.

[0631] The sequence of YOR024W from Saccharomyces cerevisiae, e.g. as shown in column 5 of Table I, [sequences from Saccharomyces cerevisiae has been published in Goffeau et al., Science 274 (5287), 546-547, 1996, sequences from Escherichia coli has been published in Blattner et al., Science 277 (5331), 1453-1474 (1997), sequences from Synechocystis sp. has been published in Kaneko and TAbata, Plant Cell Physiology 38 (11), 1997 and its activity is published described as YOR024w-protein.

[0632] Accordingly, in one embodiment, the process of the present invention comprises increasing or generating the activity of a gene product with the activity of a “YOR024w-protein” from Saccharomyces cerevisiae or its functional equivalent or its homolog, e.g. the increase of
[0633] (a) a gene product of a gene comprising the nucleic acid molecule as shown in column 5 of Table I and being depicted in the same respective line as said Y-OR024W or a functional equivalent or a homologue thereof as shown depicted in column 7 of Table I, preferably a homologue or functional equivalent as shown depicted in column 7 of Table I B, and being depicted in the same respective line as said YOR024W; or
[0634] (b) a polypeptide comprising a polypeptide, a consensus sequence or a polypeptide motif as shown depicted in column 5 of Table II, and being depicted in the same respective line as said YOR024W or a functional equivalent or a homologue thereof as depicted in column 7 of Table II or IV, preferably a homologue or functional equivalent as depicted in column 7 of Table II B, and being depicted in the same respective line as said YOR024W,
   as mentioned herein, for the an increased tolerance and/or resistance to environmental stress and increased biomass production as compared to a corresponding non-transformed wild type plant cell, plant or part thereof in plant cell, plant or part thereof, as mentioned.

[0635] Accordingly, in one embodiment, the molecule which activity is to be increased in the process of the invention is the gene product with an activity of described as a “Y-OR024w-protein”, preferably it is the molecule of section (a) or (b) of this paragraph.

[0636] In one embodiment, said molecule, which activity is to be increased in the process of the invention and which is the gene product with an activity of described as a “YOR024w-protein”, is increased non-targeted.

[0637] The sequence of YOR168W from Saccharomyces cerevisiae, e.g. as shown in column 5 of Table I, [sequences from Saccharomyces cerevisiae has been published in Goffeau et al., Science 274 (5287), 546-547, 1996, sequences from Escherichia coli has been published in Blattner et al., Science 277 (5331), 1453-1474 (1997), sequences from Synechocystis sp. has been published in Kaneko and TAbata, Plant Cell Physiology 38 (11), 1997 and its activity is published described as Glutamine tRNA synthetase.

[0638] Accordingly, in one embodiment, the process of the present invention comprises increasing or generating the activity of a gene product with the activity of a “Glutamine tRNA synthetase” from Saccharomyces cerevisiae or its functional equivalent or its homolog, e.g. the increase of
[0639] (a) a gene product of a gene comprising the nucleic acid molecule as shown in column 5 of Table I and being depicted in the same respective line as said YOR168W or a functional equivalent or a homologue thereof as shown depicted in column 7 of Table I, preferably a homologue or functional equivalent as shown depicted in column 7 of Table I B, and being depicted in the same respective line as said YOR168W; or
[0640] (b) a polypeptide comprising a polypeptide, a consensus sequence or a polypeptide motif as shown depicted in column 5 of Table II, and being depicted in the same respective line as said YOR168W or a functional equivalent or a homologue thereof as depicted in column 7 of Table II or IV, preferably a homologue or functional equivalent as depicted in column 7 of Table II B, and being depicted in the same respective line as said YOR168W,
   as mentioned herein, for the an increased tolerance and/or resistance to environmental stress and increased biomass production as compared to a corresponding non-transformed wild type plant cell, plant or part thereof in plant cell, plant or part thereof, as mentioned.

[0641] Accordingly, in one embodiment, the molecule which activity is to be increased in the process of the invention is the gene product with an activity of described as a “Glutamine tRNA synthetase”, preferably it is the molecule of section (a) or (b) of this paragraph.

[0642] In one embodiment, said molecule, which activity is to be increased in the process of the invention and which is the gene product with an activity of described as a “Glutamine tRNA synthetase”, is increased non-targeted.

[0643] The sequence of YPL151C from Saccharomyces cerevisiae, e.g. as shown in column 5 of Table I, [sequences from Saccharomyces cerevisiae has been published in Goffeau et al., Science 274 (5287), 546-547, 1996, sequences from Escherichia coli has been published in Blattner et al., Science 277 (5331), 1453-1474 (1997), sequences from Synechocystis sp. has been published in Kaneko and TAbata, Plant Cell Physiology 38 (11), 1997 and its activity is published described as Splicing factor.

[0644] Accordingly, in one embodiment, the process of the present invention comprises increasing or generating the activity of a gene product with the activity of a “Splicing factor” from Saccharomyces cerevisiae or its functional equivalent or its homolog, e.g. the increase of
[0645] (a) a gene product of a gene comprising the nucleic acid molecule as shown in column 5 of Table I and being depicted in the same respective line as said YPL151C or a functional equivalent or a homologue thereof as shown depicted in column 7 of Table I, preferably a homologue or functional equivalent as shown depicted in column 7 of Table I B, and being depicted in the same respective line as said YPL151C; or
[0646] (b) a polypeptide comprising a polypeptide, a consensus sequence or a polypeptide motif as shown depicted in column 5 of Table II, and being depicted in the same respective line as said YPL151C or a functional equivalent or a homologue thereof as depicted in column 7 of Table II or IV, preferably a homologue or functional equivalent as depicted in column 7 of Table II B, and being depicted in the same respective line as said YPL151C,
   as mentioned herein, for the an increased tolerance and/or resistance to environmental stress and increased biomass production as compared to a corresponding non-transformed wild type plant cell, plant or part thereof in plant cell, plant or part thereof, as mentioned.

[0647] Accordingly, in one embodiment, the molecule which activity is to be increased in the process of the invention is the gene product with an activity of described as a “Splicing factor”, preferably it is the molecule of section (a) or (b) of this paragraph.

[0648] In one embodiment, said molecule, which activity is to be increased in the process of the invention and which is the gene product with an activity of described as a “Splicing factor”, is increased non-targeted.

[0649] The sequence of B1297 from Escherichia coli K12, e.g. as shown in column 5 of Table I, [sequences from Saccharomyces cerevisiae has been published in Goffeau et al., Science 274 (5287), 546-547, 1996, sequences from Escherichia coli has been published in Blattner et al., Science 277 (5331), 1453-1474 (1997), sequences from Synechocystis sp. has been published in Kaneko and TAbata, Plant Cell Physiology 38 (11), 1997 and its activity is published described as gamma-Glu-putrescine synthase.

[0650] Accordingly, in one embodiment, the process of the present invention comprises increasing or generating the activity of a gene product with the activity of a “gamma-Gluputrescine synthase” from Escherichia coli K12 or its functional equivalent or its homolog, e.g. the increase of
[0651] (a) a gene product of a gene comprising the nucleic acid molecule as shown in column 5 of Table I and being depicted in the same respective line as said B1297 or a functional equivalent or a homologue thereof as shown depicted in column 7 of Table I, preferably a homologue or functional equivalent as shown depicted in column 7 of Table I B, and being depicted in the same respective line as said B1297; or
[0652] (b) a polypeptide comprising a polypeptide, a consensus sequence or a polypeptide motif as shown depicted in column 5 of Table II, and being depicted in the same respective line as said B1297 or a functional equivalent or a homologue thereof as depicted in column 7 of Table II or IV, preferably a homologue or functional equivalent as depicted in column 7 of Table II B, and being depicted in the same respective line as said B1297,
   as mentioned herein, for the an increased tolerance and/or resistance to environmental stress and increased biomass production as compared to a corresponding non-transformed wild type plant cell, plant or part thereof in plant cell, plant or part thereof, as mentioned.

[0653] Accordingly, in one embodiment, the molecule which activity is to be increased in the process of the invention is the gene product with an activity of described as a “gamma-Glu-putrescine synthase”, preferably it is the molecule of section (a) or (b) of this paragraph.

[0654] In one embodiment, said molecule, which activity is to be increased in the process of the invention and which is the gene product with an activity of described as a “gamma-Glu-putrescine synthase”, is increased plastidic.

[0655] The sequence of B0970 from Escherichia coli K12, e.g. as shown in column 5 of Table I, [sequences from Saccharomyces cerevisiae has been published in Goffeau et al., Science 274 (5287), 546-547, 1996, sequences from Escherichia coli has been published in Blattner et al., Science 277 (5331), 1453-1474 (1997), sequences from Synechocystis sp. has been published in Kaneko and TAbata, Plant Cell Physiology 38 (11), 1997 and its activity is published described as inner membrane protein.

[0656] Accordingly, in one embodiment, the process of the present invention comprises increasing or generating the activity of a gene product with the activity of a “inner membrane protein” from Escherichia coli K12 or its functional equivalent or its homolog, e.g. the increase of
[0657] (a) a gene product of a gene comprising the nucleic acid molecule as shown in column 5 of Table I and being depicted in the same respective line as said B0970 or a functional equivalent or a homologue thereof as shown depicted in column 7 of Table I, preferably a homologue or functional equivalent as shown depicted in column 7 of Table I B, and being depicted in the same respective line as said B0970; or
[0658] (b) a polypeptide comprising a polypeptide, a consensus sequence or a polypeptide motif as shown depicted in column 5 of Table II, and being depicted in the same respective line as said B0970 or a functional equivalent or a homologue thereof as depicted in column 7 of Table II or IV, preferably a homologue or functional equivalent as depicted in column 7 of Table II B, and being depicted in the same respective line as said B0970,
   as mentioned herein, for the an increased tolerance and/or resistance to environmental stress and increased biomass production as compared to a corresponding non-transformed wild type plant cell, plant or part thereof in plant cell, plant or part thereof, as mentioned.

[0659] Accordingly, in one embodiment, the molecule which activity is to be increased in the process of the invention is the gene product with an activity of described as a “inner membrane protein”, preferably it is the molecule of section (a) or (b) of this paragraph.

[0660] In one embodiment, said molecule, which activity is to be increased in the process of the invention and which is the gene product with an activity of described as a “inner membrane protein”, is increased non-targeted.

[0661] The sequence of B1829 from Escherichia coli K12, e.g. as shown in column 5 of Table I, [sequences from Saccharomyces cerevisiae has been published in Goffeau et al., Science 274 (5287), 546-547, 1996, sequences from Escherichia coli has been published in Blattner et al., Science 277 (5331), 1453-1474 (1997), sequences from Synechocystis sp. has been published in Kaneko and TAbata, Plant Cell Physiology 38 (11), 1997 and its activity is published described as heat shock protein HtpX.

[0662] Accordingly, in one embodiment, the process of the present invention comprises increasing or generating the activity of a gene product with the activity of a “heat shock protein HtpX” from Escherichia coli K12 or its functional equivalent or its homolog, e.g. the increase of
[0663] (a) a gene product of a gene comprising the nucleic acid molecule as shown in column 5 of Table I and being depicted in the same respective line as said B1829 or a functional equivalent or a homologue thereof as shown depicted in column 7 of Table I, preferably a homologue or functional equivalent as shown depicted in column 7 of Table I B, and being depicted in the same respective line as said B1829; or
[0664] (b) a polypeptide comprising a polypeptide, a consensus sequence or a polypeptide motif as shown depicted in column 5 of Table II, and being depicted in the same respective line as said B1829 or a functional equivalent or a homologue thereof as depicted in column 7 of Table II or IV, preferably a homologue or functional equivalent as depicted in column 7 of Table II B, and being depicted in the same respective line as said B1829,
   as mentioned herein, for the an increased tolerance and/or resistance to environmental stress and increased biomass production as compared to a corresponding non-transformed wild type plant cell, plant or part thereof in plant cell, plant or part thereof, as mentioned.

[0665] Accordingly, in one embodiment, the molecule which activity is to be increased in the process of the invention is the gene product with an activity of described as a “heat shock protein HtpX”, preferably it is the molecule of section (a) or (b) of this paragraph.

[0666] In one embodiment, said molecule, which activity is to be increased in the process of the invention and which is the gene product with an activity of described as a “heat shock protein HtpX”, is increased non-targeted.

[0667] The sequence of B2664 from Escherichia coli K12, e.g. as shown in column 5 of Table I, [sequences from Saccharomyces cerevisiae has been published in Goffeau et al., Science 274 (5287), 546-547, 1996, sequences from Escherichia coli has been published in Blattner et al., Science 277 (5331), 1453-1474 (1997), sequences from Synechocystis sp. has been published in Kaneko and TAbata, Plant Cell Physiology 38 (11), 1997 and its activity is published described as DNA-binding transcriptional dual regulator protein.

[0668] Accordingly, in one embodiment, the process of the present invention comprises increasing or generating the activity of a gene product with the activity of a “DNA-binding transcriptional dual regulator protein” from Escherichia coli K12 or its functional equivalent or its homolog, e.g. the increase of
[0669] (a) a gene product of a gene comprising the nucleic acid molecule as shown in column 5 of Table I and being depicted in the same respective line as said B2664 or a functional equivalent or a homologue thereof as shown depicted in column 7 of Table I, preferably a homologue or functional equivalent as shown depicted in column 7 of Table I B, and being depicted in the same respective line as said B2664; or
[0670] (b) a polypeptide comprising a polypeptide, a consensus sequence or a polypeptide motif as shown depicted in column 5 of Table II, and being depicted in the same respective line as said B2664 or a functional equivalent or a homologue thereof as depicted in column 7 of Table II or IV, preferably a homologue or functional equivalent as depicted in column 7 of Table II B, and being depicted in the same respective line as said B2664,
   as mentioned herein, for the an increased tolerance and/or resistance to environmental stress and increased biomass production as compared to a corresponding non-transformed wild type plant cell, plant or part thereof in plant cell, plant or part thereof, as mentioned.

[0671] Accordingly, in one embodiment, the molecule which activity is to be increased in the process of the invention is the gene product with an activity of described as a “DNA-binding transcriptional dual regulator protein”, preferably it is the molecule of section (a) or (b) of this paragraph.

[0672] In one embodiment, said molecule, which activity is to be increased in the process of the invention and which is the gene product with an activity of described as a “DNA-binding transcriptional dual regulator protein”, is increased non-targeted.

[0673] The sequence of B2796 from Escherichia coli K12, e.g. as shown in column 5 of Table I, [sequences from Saccharomyces cerevisiae has been published in Goffeau et al., Science 274 (5287), 546-547, 1996, sequences from Escherichia coli has been published in Blattner et al., Science 277 (5331), 1453-1474 (1997), sequences from Synechocystis sp. has been published in Kaneko and TAbata, Plant Cell Physiology 38 (11), 1997 and its activity is published described as predicted serine transporter protein.

[0674] Accordingly, in one embodiment, the process of the present invention comprises increasing or generating the activity of a gene product with the activity of a “predicted serine transporter protein” from Escherichia coli K12 or its functional equivalent or its homolog, e.g. the increase of
[0675] (a) a gene product of a gene comprising the nucleic acid molecule as shown in column 5 of Table I and being depicted in the same respective line as said B2796 or a functional equivalent or a homologue thereof as shown depicted in column 7 of Table I, preferably a homologue or functional equivalent as shown depicted in column 7 of Table I B, and being depicted in the same respective line as said B2796; or
[0676] (b) a polypeptide comprising a polypeptide, a consensus sequence or a polypeptide motif as shown depicted in column 5 of Table II, and being depicted in the same respective line as said B2796 or a functional equivalent or a homologue thereof as depicted in column 7 of Table II or IV, preferably a homologue or functional equivalent as depicted in column 7 of Table II B, and being depicted in the same respective line as said B2796,
   as mentioned herein, for the an increased tolerance and/or resistance to environmental stress and increased biomass production as compared to a corresponding non-transformed wild type plant cell, plant or part thereof in plant cell, plant or part thereof, as mentioned.

[0677] Accordingly, in one embodiment, the molecule which activity is to be increased in the process of the invention is the gene product with an activity of described as a “predicted serine transporter protein”, preferably it is the molecule of section (a) or (b) of this paragraph.

[0678] In one embodiment, said molecule, which activity is to be increased in the process of the invention and which is the gene product with an activity of described as a “predicted serine transporter protein”, is increased non-targeted.

[0679] The sequence of YER174C from Saccharomyces cerevisiae, e.g. as shown in column 5 of Table I, [sequences from Saccharomyces cerevisiae has been published in Goffeau et al., Science 274 (5287), 546-547, 1996, sequences from Escherichia coli has been published in Blattner et al., Science 277 (5331), 1453-1474 (1997), sequences from Synechocystis sp. has been published in Kaneko and TAbata, Plant Cell Physiology 38 (11), 1997 and its activity is published described as glutathione-dependent oxidoreductase.

[0680] Accordingly, in one embodiment, the process of the present invention comprises increasing or generating the activity of a gene product with the activity of a “glutathione-dependent oxidoreductase” from Saccharomyces cerevisiae or its functional equivalent or its homolog, e.g. the increase of
[0681] (a) a gene product of a gene comprising the nucleic acid molecule as shown in column 5 of Table I and being depicted in the same respective line as said YER174C or a functional equivalent or a homologue thereof as shown depicted in column 7 of Table I, preferably a homologue or functional equivalent as shown depicted in column 7 of Table I B, and being depicted in the same respective line as said YER174C; or
[0682] (b) a polypeptide comprising a polypeptide, a consensus sequence or a polypeptide motif as shown depicted in column 5 of Table II, and being depicted in the same respective line as said YER174C or a functional equivalent or a homologue thereof as depicted in column 7 of Table II or IV, preferably a homologue or functional equivalent as depicted in column 7 of Table II B, and being depicted in the same respective line as said YER174C,
   as mentioned herein, for the an increased tolerance and/or resistance to environmental stress and increased biomass production as compared to a corresponding non-transformed wild type plant cell, plant or part thereof in plant cell, plant or part thereof, as mentioned.

[0683] Accordingly, in one embodiment, the molecule which activity is to be increased in the process of the invention is the gene product with an activity of described as a “glutathione-dependent oxidoreductase”, preferably it is the molecule of section (a) or (b) of this paragraph.

[0684] In one embodiment, said molecule, which activity is to be increased in the process of the invention and which is the gene product with an activity of described as a “glutathione-dependent oxidoreductase”, is increased non-targeted.

[0685] The sequence of YFRO42W from Saccharomyces cerevisiae, e.g. as shown in column 5 of Table I, [sequences from Saccharomyces cerevisiae has been published in Goffeau et al., Science 274 (5287), 546-547, 1996, sequences from Escherichia coli has been published in Blattner et al., Science 277 (5331), 1453-1474 (1997), sequences from Synechocystis sp. has been published in Kaneko and TAbata, Plant Cell Physiology 38 (11), 1997 and its activity is published described as Yfr042w-protein.

[0686] Accordingly, in one embodiment, the process of the present invention comprises increasing or generating the activity of a gene product with the activity of a “Yfr042w-protein” from Saccharomyces cerevisiae or its functional equivalent or its homolog, e.g. the increase of
[0687] (a) a gene product of a gene comprising the nucleic acid molecule as shown in column 5 of Table I and being depicted in the same respective line as said YFR042W or a functional equivalent or a homologue thereof as shown depicted in column 7 of Table I, preferably a homologue or functional equivalent as shown depicted in column 7 of Table I B, and being depicted in the same respective line as said YFR042W; or
[0688] (b) a polypeptide comprising a polypeptide, a consensus sequence or a polypeptide motif as shown depicted in column 5 of Table II, and being depicted in the same respective line as said YFR042W or a functional equivalent or a homologue thereof as depicted in column 7 of Table II or IV, preferably a homologue or functional equivalent as depicted in column 7 of Table II B, and being depicted in the same respective line as said YFR042W,
   as mentioned herein, for the an increased tolerance and/or resistance to environmental stress and increased biomass production as compared to a corresponding non-transformed wild type plant cell, plant or part thereof in plant cell, plant or part thereof, as mentioned.

[0689] Accordingly, in one embodiment, the molecule which activity is to be increased in the process of the invention is the gene product with an activity of described as a “Yfr042w-protein”, preferably it is the molecule of section (a) or (b) of this paragraph.

[0690] In one embodiment, said molecule, which activity is to be increased in the process of the invention and which is the gene product with an activity of described as a “Yfr042w-protein”, is increased non-targeted.

[0691] The sequence of YKR057W from Saccharomyces cerevisiae, e.g. as shown in column 5 of Table I, [sequences from Saccharomyces cerevisiae has been published in Goffeau et al., Science 274 (5287), 546-547, 1996, sequences from Escherichia coli has been published in Blattner et al., Science 277 (5331), 1453-1474 (1997), sequences from Synechocystis sp. has been published in Kaneko and TAbata, Plant Cell Physiology 38 (11), 1997 and its activity is published described as Protein component of the small (40S) ribosomal subunit.

[0692] Accordingly, in one embodiment, the process of the present invention comprises increasing or generating the activity of a gene product with the activity of a “Protein component of the small (40S) ribosomal subunit” from Saccharomyces cerevisiae or its functional equivalent or its homolog, e.g. the increase of
[0693] (a) a gene product of a gene comprising the nucleic acid molecule as shown in column 5 of Table I and being depicted in the same respective line as said YKR057W or a functional equivalent or a homologue thereof as shown depicted in column 7 of Table I, preferably a homologue or functional equivalent as shown depicted in column 7 of Table I B, and being depicted in the same respective line as said YKR057W; or
[0694] (b) a polypeptide comprising a polypeptide, a consensus sequence or a polypeptide motif as shown depicted in column 5 of Table II, and being depicted in the same respective line as said YKR057W or a functional equivalent or a homologue thereof as depicted in column 7 of Table II or IV, preferably a homologue or functional equivalent as depicted in column 7 of Table II B, and being depicted in the same respective line as said YKR057W,
   as mentioned herein, for the an increased tolerance and/or resistance to environmental stress and increased biomass production as compared to a corresponding non-transformed wild type plant cell, plant or part thereof in plant cell, plant or part thereof, as mentioned.

[0695] Accordingly, in one embodiment, the molecule which activity is to be increased in the process of the invention is the gene product with an activity of described as a “Protein component of the small (40S) ribosomal subunit”, preferably it is the molecule of section (a) or (b) of this paragraph.

[0696] In one embodiment, said molecule, which activity is to be increased in the process of the invention and which is the gene product with an activity of described as a “Protein component of the small (40S) ribosomal subunit”, is increased non-targeted.

[0697] The sequence of B0629_{—}2 from Escherichia coli K12, e.g. as shown in column 5 of Table I, [sequences from Saccharomyces cerevisiae has been published in Goffeau et al., Science 274 (5287), 546-547, 1996, sequences from Escherichia coli has been published in Blattner et al., Science 277 (5331), 1453-1474 (1997), sequences from Synechocystis sp. has been published in Kaneko and TAbata, Plant Cell Physiology 38 (11), 1997 and its activity is published described as transcriptional regulator protein.

[0698] Accordingly, in one embodiment, the process of the present invention comprises increasing or generating the activity of a gene product with the activity of a “transcriptional regulator protein” from Escherichia coli K12 or its functional equivalent or its homolog, e.g. the increase of
[0699] (a) a gene product of a gene comprising the nucleic acid molecule as shown in column 5 of Table I and being depicted in the same respective line as said B0629_{—}2 or a functional equivalent or a homologue thereof as shown depicted in column 7 of Table I, preferably a homologue or functional equivalent as shown depicted in column 7 of Table I B, and being depicted in the same respective line as said B0629_{—}2; or
[0700] (b) a polypeptide comprising a polypeptide, a consensus sequence or a polypeptide motif as shown depicted in column 5 of Table II, and being depicted in the same respective line as said B0629_{—}2 or a functional equivalent or a homologue thereof as depicted in column 7 of Table II or IV, preferably a homologue or functional equivalent as depicted in column 7 of Table II B, and being depicted in the same respective line as said B0629_{—}2,
   as mentioned herein, for the an increased tolerance and/or resistance to environmental stress and increased biomass production as compared to a corresponding non-transformed wild type plant cell, plant or part thereof in plant cell, plant or part thereof, as mentioned.

[0701] Accordingly, in one embodiment, the molecule which activity is to be increased in the process of the invention is the gene product with an activity of described as a “transcriptional regulator protein”, preferably it is the molecule of section (a) or (b) of this paragraph.

[0702] In one embodiment, said molecule, which activity is to be increased in the process of the invention and which is the gene product with an activity of described as a “transcriptional regulator protein”, is increased non-targeted.

[0703] The sequence of B1007_{—}2 from Escherichia coli K12, e.g. as shown in column 5 of

[0704] Table I, [sequences from Saccharomyces cerevisiae has been published in Goffeau et al., Science 274 (5287), 546-547, 1996, sequences from Escherichia coli has been published in Blattner et al., Science 277 (5331), 1453-1474 (1997), sequences from Synechocystis sp. has been published in Kaneko and TAbata, Plant Cell Physiology 38 (11), 1997 and its activity is published described as predicted oxidoreductase (flavin:NADH component).

[0705] Accordingly, in one embodiment, the process of the present invention comprises increasing or generating the activity of a gene product with the activity of a “predicted oxidoreductase (flavin:NADH component)” from Escherichia coli K12 or its functional equivalent or its homolog, e.g. the increase of
[0706] (a) a gene product of a gene comprising the nucleic acid molecule as shown in column 5 of Table I and being depicted in the same respective line as said B1007_{—}2 or a functional equivalent or a homologue thereof as shown depicted in column 7 of Table I, preferably a homologue or functional equivalent as shown depicted in column 7 of Table I B, and being depicted in the same respective line as said B1007_{—}2; or
[0707] (b) a polypeptide comprising a polypeptide, a consensus sequence or a polypeptide motif as shown depicted in column 5 of Table II, and being depicted in the same respective line as said B1007_{—}2 or a functional equivalent or a homologue thereof as depicted in column 7 of Table II or IV, preferably a homologue or functional equivalent as depicted in column 7 of Table II B, and being depicted in the same respective line as said B1007_{—}2,
   as mentioned herein, for the an increased tolerance and/or resistance to environmental stress and increased biomass production as compared to a corresponding non-transformed wild type plant cell, plant or part thereof in plant cell, plant or part thereof, as mentioned.

[0708] Accordingly, in one embodiment, the molecule which activity is to be increased in the process of the invention is the gene product with an activity of described as a “predicted oxidoreductase (flavin:NADH component)”, preferably it is the molecule of section (a) or (b) of this paragraph.

[0709] In one embodiment, said molecule, which activity is to be increased in the process of the invention and which is the gene product with an activity of described as a “predicted oxidoreductase (flavin:NADH component)”, is increased non-targeted.

[0710] The sequence of B2715_{—}2 from Escherichia coli K12, e.g. as shown in column 5 of Table I, [sequences from Saccharomyces cerevisiae has been published in Goffeau et al., Science 274 (5287), 546-547, 1996, sequences from Escherichia coli has been published in Blattner et al., Science 277 (5331), 1453-1474 (1997), sequences from Synechocystis sp. has been published in Kaneko and TAbata, Plant Cell Physiology 38 (11), 1997 and its activity is published described as cellobiose/arbutin/salicin-specific PTS enzyme (IIB component/IC component).

[0711] Accordingly, in one embodiment, the process of the present invention comprises increasing or generating the activity of a gene product with the activity of a “cellobiose/arbutin/salicin-specific PTS enzyme (IIB component/IC component)” from Escherichia coli K12 or its functional equivalent or its homolog, e.g. the increase of (a) a gene product of a gene comprising the nucleic acid molecule as shown in column 5 of Table I and being depicted in the same respective line as said B2715_{—}2 or a functional equivalent or a homologue thereof as shown depicted in column 7 of Table I, preferably a homologue or functional equivalent as shown depicted in column 7 of Table I B, and being depicted in the same respective line as said B2715_{—}2; or
[0712] (b) a polypeptide comprising a polypeptide, a consensus sequence or a polypeptide motif as shown depicted in column 5 of Table II, and being depicted in the same respective line as said B2715_{—}2 or a functional equivalent or a homologue thereof as depicted in column 7 of Table II or IV, preferably a homologue or functional equivalent as depicted in column 7 of Table II B, and being depicted in the same respective line as said B2715_{—}2,
   as mentioned herein, for the an increased tolerance and/or resistance to environmental stress and increased biomass production as compared to a corresponding non-transformed wild type plant cell, plant or part thereof in plant cell, plant or part thereof, as mentioned.

[0713] Accordingly, in one embodiment, the molecule which activity is to be increased in the process of the invention is the gene product with an activity of described as a “cellobiose/arbutin/salicin-specific PTS enzyme (IIB component/IC component)”, preferably it is the molecule of section (a) or (b) of this paragraph.

[0714] In one embodiment, said molecule, which activity is to be increased in the process of the invention and which is the gene product with an activity of described as a “cellobiose/arbutin/salicin-specific PTS enzyme (IIB component/IC component)”, is increased plastidic.

[0715] The sequence of B3899_{—}2 from Escherichia coli K12, e.g. as shown in column 5 of Table I, [sequences from Saccharomyces cerevisiae has been published in Goffeau et al., Science 274 (5287), 546-547, 1996, sequences from Escherichia coli has been published in Blattner et al., Science 277 (5331), 1453-1474 (1997), sequences from Synechocystis sp. has been published in Kaneko and TAbata, Plant Cell Physiology 38 (11), 1997 and its activity is published described as predicted PTS enzymes (IIB component/IIC component).

[0716] Accordingly, in one embodiment, the process of the present invention comprises increasing or generating the activity of a gene product with the activity of a “predicted PTS enzymes (IIB component/IIC component)” from Escherichia coli K12 or its functional equivalent or its homolog, e.g. the increase of
[0717] (a) a gene product of a gene comprising the nucleic acid molecule as shown in column 5 of Table I and being depicted in the same respective line as said B3899_{—}2 or a functional equivalent or a homologue thereof as shown depicted in column 7 of Table I, preferably a homologue or functional equivalent as shown depicted in column 7 of Table I B, and being depicted in the same respective line as said B3899_{—}2; or
[0718] (b) a polypeptide comprising a polypeptide, a consensus sequence or a polypeptide motif as shown depicted in column 5 of Table II, and being depicted in the same respective line as said B3899_{—}2 or a functional equivalent or a homologue thereof as depicted in column 7 of Table II or IV, preferably a homologue or functional equivalent as depicted in column 7 of Table II B, and being depicted in the same respective line as said B3899_{—}2,
   as mentioned herein, for the an increased tolerance and/or resistance to environmental stress and increased biomass production as compared to a corresponding non-transformed wild type plant cell, plant or part thereof in plant cell, plant or part thereof, as mentioned.

[0719] Accordingly, in one embodiment, the molecule which activity is to be increased in the process of the invention is the gene product with an activity of described as a “predicted PTS enzymes (IIB component/IIC component)”, preferably it is the molecule of section (a) or (b) of this paragraph.

[0720] In one embodiment, said molecule, which activity is to be increased in the process of the invention and which is the gene product with an activity of described as a “predicted PTS enzymes (IIB component/IIC component)”, is increased non-targeted.

[0721] The sequence of B4390_{—}2 from Escherichia coli K12, e.g. as shown in column 5 of Table I, [sequences from Saccharomyces cerevisiae has been published in Goffeau et al., Science 274 (5287), 546-547, 1996, sequences from Escherichia coli has been published in Blattner et al., Science 277 (5331), 1453-1474 (1997), sequences from Synechocystis sp. has been published in Kaneko and TAbata, Plant Cell Physiology 38 (11), 1997 and its activity is published described as nicotinamide-nucleotide adenylyltransferase.

[0722] Accordingly, in one embodiment, the process of the present invention comprises increasing or generating the activity of a gene product with the activity of a “nicotinamide-nucleotide adenylyltransferase” from Escherichia coli K12 or its functional equivalent or its homolog, e.g. the increase of
[0723] (a) a gene product of a gene comprising the nucleic acid molecule as shown in column 5 of Table I and being depicted in the same respective line as said B4390_{—}2 or a functional equivalent or a homologue thereof as shown depicted in column 7 of Table I, preferably a homologue or functional equivalent as shown depicted in column 7 of Table I B, and being depicted in the same respective line as said B4390_{—}2; or
[0724] (b) a polypeptide comprising a polypeptide, a consensus sequence or a polypeptide motif as shown depicted in column 5 of Table II, and being depicted in the same respective line as said B4390_{—}2 or a functional equivalent or a homologue thereof as depicted in column 7 of Table II or IV, preferably a homologue or functional equivalent as depicted in column 7 of Table II B, and being depicted in the same respective line as said B4390_{—}2,
   as mentioned herein, for the an increased tolerance and/or resistance to environmental stress and increased biomass production as compared to a corresponding non-transformed wild type plant cell, plant or part thereof in plant cell, plant or part thereof, as mentioned.

[0725] Accordingly, in one embodiment, the molecule which activity is to be increased in the process of the invention is the gene product with an activity of described as a “nicotinamide-nucleotide adenylyltransferase”, preferably it is the molecule of section (a) or (b) of this paragraph.

[0726] In one embodiment, said molecule, which activity is to be increased in the process of the invention and which is the gene product with an activity of described as a “nicotinamide-nucleotide adenylyltransferase”, is increased non-targeted.

[0727] The sequence of YGL045W_{—}2 from Saccharomyces cerevisiae, e.g. as shown in column 5 of Table I, [sequences from Saccharomyces cerevisiae has been published in Goffeau et al., Science 274 (5287), 546-547, 1996, sequences from Escherichia coli has been published in Blattner et al., Science 277 (5331), 1453-1474 (1997), sequences from Synechocystis sp. has been published in Kaneko and TAbata, Plant Cell Physiology 38 (11), 1997 and its activity is published described as YGL045W-protein.

[0728] Accordingly, in one embodiment, the process of the present invention comprises increasing or generating the activity of a gene product with the activity of a “YGL045W-protein” from Saccharomyces cerevisiae or its functional equivalent or its homolog, e.g. the increase of
[0729] (a) a gene product of a gene comprising the nucleic acid molecule as shown in column 5 of Table I and being depicted in the same respective line as said YGL045W_{—}2 or a functional equivalent or a homologue thereof as shown depicted in column 7 of Table I, preferably a homologue or functional equivalent as shown depicted in column 7 of Table I B, and being depicted in the same respective line as said YGL045W_{—}2; or
[0730] (b) a polypeptide comprising a polypeptide, a consensus sequence or a polypeptide motif as shown depicted in column 5 of Table II, and being depicted in the same respective line as said YGL045W_{—}2 or a functional equivalent or a homologue thereof as depicted in column 7 of Table II or IV, preferably a homologue or functional equivalent as depicted in column 7 of Table II B, and being depicted in the same respective line as said YGL045W_{—}2,
   as mentioned herein, for the an increased tolerance and/or resistance to environmental stress and increased biomass production as compared to a corresponding non-transformed wild type plant cell, plant or part thereof in plant cell, plant or part thereof, as mentioned.

[0731] Accordingly, in one embodiment, the molecule which activity is to be increased in the process of the invention is the gene product with an activity of described as a “YGL045W-protein”, preferably it is the molecule of section (a) or (b) of this paragraph.

[0732] In one embodiment, said molecule, which activity is to be increased in the process of the invention and which is the gene product with an activity of described as a “YGL045W-protein”, is increased non-targeted.

[0733] The sequence of B2664_{—}2 from Escherichia coli K12, e.g. as shown in column 5 of Table I, [sequences from Saccharomyces cerevisiae has been published in Goffeau et al., Science 274 (5287), 546-547, 1996, sequences from Escherichia coli has been published in Blattner et al., Science 277 (5331), 1453-1474 (1997), sequences from Synechocystis sp. has been published in Kaneko and TAbata, Plant Cell Physiology 38 (11), 1997 and its activity is published described as DNA-binding transcriptional dual regulator protein.

[0734] Accordingly, in one embodiment, the process of the present invention comprises increasing or generating the activity of a gene product with the activity of a “DNA-binding transcriptional dual regulator protein” from Escherichia coli K12 or its functional equivalent or its homolog, e.g. the increase of
[0735] (a) a gene product of a gene comprising the nucleic acid molecule as shown in column 5 of Table I and being depicted in the same respective line as said B2664_{—}2 or a functional equivalent or a homologue thereof as shown depicted in column 7 of Table I, preferably a homologue or functional equivalent as shown depicted in column 7 of Table I B, and being depicted in the same respective line as said B2664_{—}2; or
[0736] (b) a polypeptide comprising a polypeptide, a consensus sequence or a polypeptide motif as shown depicted in column 5 of Table II, and being depicted in the same respective line as said B2664_{—}2 or a functional equivalent or a homologue thereof as depicted in column 7 of Table II or IV, preferably a homologue or functional equivalent as depicted in column 7 of Table II B, and being depicted in the same respective line as said B2664_{—}2,
   as mentioned herein, for the an increased tolerance and/or resistance to environmental stress and increased biomass production as compared to a corresponding non-transformed wild type plant cell, plant or part thereof in plant cell, plant or part thereof, as mentioned.

[0737] Accordingly, in one embodiment, the molecule which activity is to be increased in the process of the invention is the gene product with an activity of described as a “DNA-binding transcriptional dual regulator protein”, preferably it is the molecule of section (a) or (b) of this paragraph.

[0738] In one embodiment, said molecule, which activity is to be increased in the process of the invention and which is the gene product with an activity of described as a “DNA-binding transcriptional dual regulator protein”, is increased non-targeted.

[0739] The sequence of B0963_{—}2 from Escherichia coli K12, e.g. as shown in column 5 of Table I, [sequences from Saccharomyces cerevisiae has been published in Goffeau et al., Science 274 (5287), 546-547, 1996, sequences from Escherichia coli has been published in Blattner et al., Science 277 (5331), 1453-1474 (1997), sequences from Synechocystis sp. has been published in Kaneko and TAbata, Plant Cell Physiology 38 (11), 1997 and its activity is published described as methylglyoxal synthase.

[0740] Accordingly, in one embodiment, the process of the present invention comprises increasing or generating the activity of a gene product with the activity of a “methylglyoxal synthase” from Escherichia coli K12 or its functional equivalent or its homolog, e.g. the increase of
[0741] (a) a gene product of a gene comprising the nucleic acid molecule as shown in column 5 of Table I and being depicted in the same respective line as said B0963_{—}2 or a functional equivalent or a homologue thereof as shown depicted in column 7 of Table I, preferably a homologue or functional equivalent as shown depicted in column 7 of Table I B, and being depicted in the same respective line as said B0963_{—}2; or
[0742] (b) a polypeptide comprising a polypeptide, a consensus sequence or a polypeptide motif as shown depicted in column 5 of Table II, and being depicted in the same respective line as said B0963_{—}2 or a functional equivalent or a homologue thereof as depicted in column 7 of Table II or IV, preferably a homologue or functional equivalent as depicted in column 7 of Table II B, and being depicted in the same respective line as said B0963_{—}2,
   as mentioned herein, for the an increased tolerance and/or resistance to environmental stress and increased biomass production as compared to a corresponding non-transformed wild type plant cell, plant or part thereof in plant cell, plant or part thereof, as mentioned.

[0743] Accordingly, in one embodiment, the molecule which activity is to be increased in the process of the invention is the gene product with an activity of described as a “methylglyoxal synthase”, preferably it is the molecule of section (a) or (b) of this paragraph.

[0744] In one embodiment, said molecule, which activity is to be increased in the process of the invention and which is the gene product with an activity of described as a “methylglyoxal synthase”, is increased non-targeted.

[0745] The sequence of B1297_{—}2 from Escherichia coli K12, e.g. as shown in column 5 of Table I, [sequences from Saccharomyces cerevisiae has been published in Goffeau et al., Science 274 (5287), 546-547, 1996, sequences from Escherichia coli has been published in Blattner et al., Science 277 (5331), 1453-1474 (1997), sequences from Synechocystis sp. has been published in Kaneko and TAbata, Plant Cell Physiology 38 (11), 1997 and its activity is published described as gamma-Glu-putrescine synthase.

[0746] Accordingly, in one embodiment, the process of the present invention comprises increasing or generating the activity of a gene product with the activity of a “gamma-Gluputrescine synthase” from Escherichia coli K12 or its functional equivalent or its homolog, e.g. the increase of
[0747] (a) a gene product of a gene comprising the nucleic acid molecule as shown in column 5 of Table I and being depicted in the same respective line as said B1297_{—}2 or a functional equivalent or a homologue thereof as shown depicted in column 7 of Table I, preferably a homologue or functional equivalent as shown depicted in column 7 of Table I B, and being depicted in the same respective line as said B1297_{—}2; or
[0748] (b) a polypeptide comprising a polypeptide, a consensus sequence or a polypeptide motif as shown depicted in column 5 of Table II, and being depicted in the same respective line as said B1297_{—}2 or a functional equivalent or a homologue thereof as depicted in column 7 of Table II or IV, preferably a homologue or functional equivalent as depicted in column 7 of Table II B, and being depicted in the same respective line as said B1297_{—}2,
   as mentioned herein, for the an increased tolerance and/or resistance to environmental stress and increased biomass production as compared to a corresponding non-transformed wild type plant cell, plant or part thereof in plant cell, plant or part thereof, as mentioned.

[0749] Accordingly, in one embodiment, the molecule which activity is to be increased in the process of the invention is the gene product with an activity of described as a “gamma-Glu-putrescine synthase”, preferably it is the molecule of section (a) or (b) of this paragraph.

[0750] In one embodiment, said molecule, which activity is to be increased in the process of the invention and which is the gene product with an activity of described as a “gamma-Glu-putrescine synthase”, is increased plastidic.

[0751] The sequence of B1597_{—}2 from Escherichia coli K12, e.g. as shown in column 5 of Table I, [sequences from Saccharomyces cerevisiae has been published in Goffeau et al., Science 274 (5287), 546-547, 1996, sequences from Escherichia coli has been published in Blattner et al., Science 277 (5331), 1453-1474 (1997), sequences from Synechocystis sp. has been published in Kaneko and TAbata, Plant Cell Physiology 38 (11), 1997 and its activity is published described as acid shock protein precursor.

[0752] Accordingly, in one embodiment, the process of the present invention comprises increasing or generating the activity of a gene product with the activity of a “acid shock protein precursor” from Escherichia coli K12 or its functional equivalent or its homolog, e.g. the increase of
[0753] (a) a gene product of a gene comprising the nucleic acid molecule as shown in column 5 of Table I and being depicted in the same respective line as said B1597_{—}2 or a functional equivalent or a homologue thereof as shown depicted in column 7 of Table I, preferably a homologue or functional equivalent as shown depicted in column 7 of Table I B, and being depicted in the same respective line as said B1597_{—}2; or
[0754] (b) a polypeptide comprising a polypeptide, a consensus sequence or a polypeptide motif as shown depicted in column 5 of Table II, and being depicted in the same respective line as said B1597_{—}2 or a functional equivalent or a homologue thereof as depicted in column 7 of Table II or IV, preferably a homologue or functional equivalent as depicted in column 7 of Table II B, and being depicted in the same respective line as said B1597_{—}2,
   as mentioned herein, for the an increased tolerance and/or resistance to environmental stress and increased biomass production as compared to a corresponding non-transformed wild type plant cell, plant or part thereof in plant cell, plant or part thereof, as mentioned.

[0755] Accordingly, in one embodiment, the molecule which activity is to be increased in the process of the invention is the gene product with an activity of described as a “acid shock protein precursor”, preferably it is the molecule of section (a) or (b) of this paragraph.

[0756] In one embodiment, said molecule, which activity is to be increased in the process of the invention and which is the gene product with an activity of described as a “acid shock protein precursor”, is increased non-targeted.

[0757] The sequence of B2027_{—}2 from Escherichia coli k12, e.g. as shown in column 5 of Table I, [sequences from Saccharomyces cerevisiae has been published in Goffeau et al., Science 274 (5287), 546-547, 1996, sequences from Escherichia coli has been published in Blattner et al., Science 277 (5331), 1453-1474 (1997), sequences from Synechocystis sp. has been published in Kaneko and TAbata, Plant Cell Physiology 38 (11), 1997 and its activity is published described as regulator of length of O-antigen component of lipopolysaccharide chains.

[0758] Accordingly, in one embodiment, the process of the present invention comprises increasing or generating the activity of a gene product with the activity of a “regulator of length of O-antigen component of lipopolysaccharide chains ” from Escherichia coli k12 or its functional equivalent or its homolog, e.g. the increase of
[0759] (a) a gene product of a gene comprising the nucleic acid molecule as shown in column 5 of Table I and being depicted in the same respective line as said B2027_{—}2 or a functional equivalent or a homologue thereof as shown depicted in column 7 of Table I, preferably a homologue or functional equivalent as shown depicted in column 7 of Table I B, and being depicted in the same respective line as said B2027_{—}2; or
[0760] (b) a polypeptide comprising a polypeptide, a consensus sequence or a polypeptide motif as shown depicted in column 5 of Table II, and being depicted in the same respective line as said B2027_{—}2 or a functional equivalent or a homologue thereof as depicted in column 7 of Table II or IV, preferably a homologue or functional equivalent as depicted in column 7 of Table II B, and being depicted in the same respective line as said B2027_{—}2,
   as mentioned herein, for the an increased tolerance and/or resistance to environmental stress and increased biomass production as compared to a corresponding non-transformed wild type plant cell, plant or part thereof in plant cell, plant or part thereof, as mentioned.

[0761] Accordingly, in one embodiment, the molecule which activity is to be increased in the process of the invention is the gene product with an activity of described as a “regulator of length of O-antigen component of lipopolysaccharide chains “, preferably it is the molecule of section (a) or (b) of this paragraph.

[0762] In one embodiment, said molecule, which activity is to be increased in the process of the invention and which is the gene product with an activity of described as a “regulator of length of O-antigen component of lipopolysaccharide chains “, is increased non-targeted.

[0763] The sequence of B2965_{—}2 from Escherichia coli K12, e.g. as shown in column 5 of Table I, [sequences from Saccharomyces cerevisiae has been published in Goffeau et al., Science 274 (5287), 546-547, 1996, sequences from Escherichia coli has been published in Blattner et al., Science 277 (5331), 1453-1474 (1997), sequences from Synechocystis sp. has been published in Kaneko and TAbata, Plant Cell Physiology 38 (11), 1997 and its activity is published described as ornithine decarboxylase.

[0764] Accordingly, in one embodiment, the process of the present invention comprises increasing or generating the activity of a gene product with the activity of a “ornithine decarboxylase” from Escherichia coli K12 or its functional equivalent or its homolog, e.g. the increase of
[0765] (a) a gene product of a gene comprising the nucleic acid molecule as shown in column 5 of Table I and being depicted in the same respective line as said B2965_{—}2 or a functional equivalent or a homologue thereof as shown depicted in column 7 of Table I, preferably a homologue or functional equivalent as shown depicted in column 7 of Table I B, and being depicted in the same respective line as said B2965_{—}2; or
[0766] (b) a polypeptide comprising a polypeptide, a consensus sequence or a polypeptide motif as shown depicted in column 5 of Table II, and being depicted in the same respective line as said B2965_{—}2 or a functional equivalent or a homologue thereof as depicted in column 7 of Table II or IV, preferably a homologue or functional equivalent as depicted in column 7 of Table II B, and being depicted in the same respective line as said B2965_{—}2,
   as mentioned herein, for the an increased tolerance and/or resistance to environmental stress and increased biomass production as compared to a corresponding non-transformed wild type plant cell, plant or part thereof in plant cell, plant or part thereof, as mentioned.

[0767] Accordingly, in one embodiment, the molecule which activity is to be increased in the process of the invention is the gene product with an activity of described as a “ornithine decarboxylase”, preferably it is the molecule of section (a) or (b) of this paragraph.

[0768] In one embodiment, said molecule, which activity is to be increased in the process of the invention and which is the gene product with an activity of described as a “ornithine decarboxylase”, is increased plastidic.

[0769] The sequence of B4139_{—}2 from Escherichia coli K12, e.g. as shown in column 5 of Table I, [sequences from Saccharomyces cerevisiae has been published in Goffeau et al., Science 274 (5287), 546-547, 1996, sequences from Escherichia coli has been published in Blattner et al., Science 277 (5331), 1453-1474 (1997), sequences from Synechocystis sp. has been published in Kaneko and TAbata, Plant Cell Physiology 38 (11), 1997 and its activity is published described as aspartate ammonia-lyase.

[0770] Accordingly, in one embodiment, the process of the present invention comprises increasing or generating the activity of a gene product with the activity of a “aspartate ammonia-lyase ” from Escherichia coli K12 or its functional equivalent or its homolog, e.g. the increase of
[0771] (a) a gene product of a gene comprising the nucleic acid molecule as shown in column 5 of Table I and being depicted in the same respective line as said B4139_{—}2 or a functional equivalent or a homologue thereof as shown depicted in column 7 of Table I, preferably a homologue or functional equivalent as shown depicted in column 7 of Table I B, and being depicted in the same respective line as said B4139_{—}2; or
[0772] (b) a polypeptide comprising a polypeptide, a consensus sequence or a polypeptide motif as shown depicted in column 5 of Table II, and being depicted in the same respective line as said B4139_{—}2 or a functional equivalent or a homologue thereof as depicted in column 7 of Table II or IV, preferably a homologue or functional equivalent as depicted in column 7 of Table II B, and being depicted in the same respective line as said B4139_{—}2,
   as mentioned herein, for the an increased tolerance and/or resistance to environmental stress and increased biomass production as compared to a corresponding non-transformed wild type plant cell, plant or part thereof in plant cell, plant or part thereof, as mentioned.

[0773] Accordingly, in one embodiment, the molecule which activity is to be increased in the process of the invention is the gene product with an activity of described as a “aspartate ammonia-lyase”, preferably it is the molecule of section (a) or (b) of this paragraph.

[0774] In one embodiment, said molecule, which activity is to be increased in the process of the invention and which is the gene product with an activity of described as a “aspartate ammonia-lyase”, is increased plastidic.

[0775] The sequence of B0845_{—}2 from Escherichia coli K12, e.g. as shown in column 5 of Table I, [sequences from Saccharomyces cerevisiae has been published in Goffeau et al., Science 274 (5287), 546-547, 1996, sequences from Escherichia coli has been published in Blattner et al., Science 277 (5331), 1453-1474 (1997), sequences from Synechocystis sp. has been published in Kaneko and TAbata, Plant Cell Physiology 38 (11), 1997 and its activity is published described as predicted transporter protein.

[0776] Accordingly, in one embodiment, the process of the present invention comprises increasing or generating the activity of a gene product with the activity of a “predicted transporter protein” from Escherichia coli K12 or its functional equivalent or its homolog, e.g. the increase of
[0777] (a) a gene product of a gene comprising the nucleic acid molecule as shown in column 5 of Table I and being depicted in the same respective line as said B0845_{—}2 or a functional equivalent or a homologue thereof as shown depicted in column 7 of Table I, preferably a homologue or functional equivalent as shown depicted in column 7 of Table I B, and being depicted in the same respective line as said B0845_{—}2; or
[0778] (b) a polypeptide comprising a polypeptide, a consensus sequence or a polypeptide motif as shown depicted in column 5 of Table II, and being depicted in the same respective line as said B0845_{—}2 or a functional equivalent or a homologue thereof as depicted in column 7 of Table II or IV, preferably a homologue or functional equivalent as depicted in column 7 of Table II B, and being depicted in the same respective line as said B0845_{—}2,
   as mentioned herein, for the an increased tolerance and/or resistance to environmental stress and increased biomass production as compared to a corresponding non-transformed wild type plant cell, plant or part thereof in plant cell, plant or part thereof, as mentioned.

[0779] Accordingly, in one embodiment, the molecule which activity is to be increased in the process of the invention is the gene product with an activity of described as a “predicted transporter protein”, preferably it is the molecule of section (a) or (b) of this paragraph.

[0780] In one embodiment, said molecule, which activity is to be increased in the process of the invention and which is the gene product with an activity of described as a “predicted transporter protein”, is increased non-targeted.

[0781] The sequence of B1901_{—}2 from Escherichia coli K12, e.g. as shown in column 5 of Table I, [sequences from Saccharomyces cerevisiae has been published in Goffeau et al., Science 274 (5287), 546-547, 1996, sequences from Escherichia coli has been published in Blattner et al., Science 277 (5331), 1453-1474 (1997), sequences from Synechocystis sp. has been published in Kaneko and TAbata, Plant Cell Physiology 38 (11), 1997 and its activity is published described as L-arabinose transporter subunit.

[0782] Accordingly, in one embodiment, the process of the present invention comprises increasing or generating the activity of a gene product with the activity of a “L-arabinose transporter subunit” from Escherichia coli K12 or its functional equivalent or its homolog, e.g. the increase of
[0783] (a) a gene product of a gene comprising the nucleic acid molecule as shown in column 5 of Table I and being depicted in the same respective line as said B1901_{—}2 or a functional equivalent or a homologue thereof as shown depicted in column 7 of Table I, preferably a homologue or functional equivalent as shown depicted in column 7 of Table I B, and being depicted in the same respective line as said B1901_{—}2; or
[0784] (b) a polypeptide comprising a polypeptide, a consensus sequence or a polypeptide motif as shown depicted in column 5 of Table II, and being depicted in the same respective line as said B1901_{—}2 or a functional equivalent or a homologue thereof as depicted in column 7 of Table II or IV, preferably a homologue or functional equivalent as depicted in column 7 of Table II B, and being depicted in the same respective line as said B1901_{—}2,
   as mentioned herein, for the an increased tolerance and/or resistance to environmental stress and increased biomass production as compared to a corresponding non-transformed wild type plant cell, plant or part thereof in plant cell, plant or part thereof, as mentioned.

[0785] Accordingly, in one embodiment, the molecule which activity is to be increased in the process of the invention is the gene product with an activity of described as a “L-arabinose transporter subunit”, preferably it is the molecule of section (a) or (b) of this paragraph.

[0786] In one embodiment, said molecule, which activity is to be increased in the process of the invention and which is the gene product with an activity of described as a “L-arabinose transporter subunit”, is increased plastidic.

[0787] The sequence of YER112W_{—}2 from Saccharomyces cerevisiae, e.g. as shown in column 5 of Table I, [sequences from Saccharomyces cerevisiae has been published in Goffeau et al., Science 274 (5287), 546-547, 1996, sequences from Escherichia coli has been published in Blattner et al., Science 277 (5331), 1453-1474 (1997), sequences from Synechocystis sp. has been published in Kaneko and TAbata, Plant Cell Physiology 38 (11), 1997 and its activity is published described as Lsm (Like Sm) protein.

[0788] Accordingly, in one embodiment, the process of the present invention comprises increasing or generating the activity of a gene product with the activity of a “Lsm (Like Sm) protein” from Saccharomyces cerevisiae or its functional equivalent or its homolog, e.g. the increase of
[0789] (a) a gene product of a gene comprising the nucleic acid molecule as shown in column 5 of Table I and being depicted in the same respective line as said YER112W_{—}2 or a functional equivalent or a homologue thereof as shown depicted in column 7 of Table I, preferably a homologue or functional equivalent as shown depicted in column 7 of Table I B, and being depicted in the same respective line as said YER112W_{—}2; or
[0790] (b) a polypeptide comprising a polypeptide, a consensus sequence or a polypeptide motif as shown depicted in column 5 of Table II, and being depicted in the same respective line as said YER112W_{—}2 or a functional equivalent or a homologue thereof as depicted in column 7 of Table II or IV, preferably a homologue or functional equivalent as depicted in column 7 of Table II B, and being depicted in the same respective line as said YER112W_{—}2,

[0791] as mentioned herein, for the an increased tolerance and/or resistance to environmental stress and increased biomass production as compared to a corresponding non-transformed wild type plant cell, plant or part thereof in plant cell, plant or part thereof, as mentioned.

[0792] Accordingly, in one embodiment, the molecule which activity is to be increased in the process of the invention is the gene product with an activity of described as a “Lsm (Like Sm) protein”, preferably it is the molecule of section (a) or (b) of this paragraph.

[0793] In one embodiment, said molecule, which activity is to be increased in the process of the invention and which is the gene product with an activity of described as a “Lsm (Like Sm) protein”, is increased non-targeted.

[0794] The sequence of B1798_{—}2 from Escherichia coli K12, e.g. as shown in column 5 of Table I, [sequences from Saccharomyces cerevisiae has been published in Goffeau et al., Science 274 (5287), 546-547, 1996, sequences from Escherichia coli has been published in Blattner et al., Science 277 (5331), 1453-1474 (1997), sequences from Synechocystis sp. has been published in Kaneko and TAbata, Plant Cell Physiology 38 (11), 1997 and its activity is published described as neutral amino-acid efflux system.

[0795] Accordingly, in one embodiment, the process of the present invention comprises increasing or generating the activity of a gene product with the activity of a “neutral amino-acid efflux system” from Escherichia coli K12 or its functional equivalent or its homolog, e.g. the increase of
[0796] (a) a gene product of a gene comprising the nucleic acid molecule as shown in column 5 of Table I and being depicted in the same respective line as said B1798_{—}2 or a functional equivalent or a homologue thereof as shown depicted in column 7 of Table I, preferably a homologue or functional equivalent as shown depicted in column 7 of Table I B, and being depicted in the same respective line as said B1798_{—}2; or
[0797] (b) a polypeptide comprising a polypeptide, a consensus sequence or a polypeptide motif as shown depicted in column 5 of Table II, and being depicted in the same respective line as said B1798_{—}2 or a functional equivalent or a homologue thereof as depicted in column 7 of Table II or IV, preferably a homologue or functional equivalent as depicted in column 7 of Table II B, and being depicted in the same respective line as said B1798_{—}2,
   as mentioned herein, for the an increased tolerance and/or resistance to environmental stress and increased biomass production as compared to a corresponding non-transformed wild type plant cell, plant or part thereof in plant cell, plant or part thereof, as mentioned.

[0798] Accordingly, in one embodiment, the molecule which activity is to be increased in the process of the invention is the gene product with an activity of described as a “neutral amino-acid efflux system”, preferably it is the molecule of section (a) or (b) of this paragraph.

[0799] In one embodiment, said molecule, which activity is to be increased in the process of the invention and which is the gene product with an activity of described as a “neutral amino-acid efflux system”, is increased non-targeted.

[0800] The sequence of B2226_{—}2 from Escherichia coli K12, e.g. as shown in column 5 of Table I, [sequences from Saccharomyces cerevisiae has been published in Goffeau et al., Science 274 (5287), 546-547, 1996, sequences from Escherichia coli has been published in Blattner et al., Science 277 (5331), 1453-1474 (1997), sequences from Synechocystis sp. has been published in Kaneko and TAbata, Plant Cell Physiology 38 (11), 1997 and its activity is published described as b2226-protein.

[0801] Accordingly, in one embodiment, the process of the present invention comprises increasing or generating the activity of a gene product with the activity of a “b2226-protein” from Escherichia coli K12 or its functional equivalent or its homolog, e.g. the increase of
[0802] (a) a gene product of a gene comprising the nucleic acid molecule as shown in column 5 of Table I and being depicted in the same respective line as said B2226_{—}2 or a functional equivalent or a homologue thereof as shown depicted in column 7 of Table I, preferably a homologue or functional equivalent as shown depicted in column 7 of Table I B, and being depicted in the same respective line as said B2226_{—}2; or
[0803] (b) a polypeptide comprising a polypeptide, a consensus sequence or a polypeptide motif as shown depicted in column 5 of Table II, and being depicted in the same respective line as said B2226_{—}2 or a functional equivalent or a homologue thereof as depicted in column 7 of Table II or IV, preferably a homologue or functional equivalent as depicted in column 7 of Table II B, and being depicted in the same respective line as said B2226_{—}2,
   as mentioned herein, for the an increased tolerance and/or resistance to environmental stress and increased biomass production as compared to a corresponding non-transformed wild type plant cell, plant or part thereof in plant cell, plant or part thereof, as mentioned.

[0804] Accordingly, in one embodiment, the molecule which activity is to be increased in the process of the invention is the gene product with an activity of described as a “b2226-protein”, preferably it is the molecule of section (a) or (b) of this paragraph.

[0805] In one embodiment, said molecule, which activity is to be increased in the process of the invention and which is the gene product with an activity of described as a “b2226-protein”, is increased non-targeted.

[0806] The sequence of B2469_{—}2 from Escherichia coli K12, e.g. as shown in column 5 of Table I, [sequences from Saccharomyces cerevisiae has been published in Goffeau et al., Science 274 (5287), 546-547, 1996, sequences from Escherichia coli has been published in Blattner et al., Science 277 (5331), 1453-1474 (1997), sequences from Synechocystis sp. has been published in Kaneko and TAbata, Plant Cell Physiology 38 (11), 1997 and its activity is published described as sensory histidine kinase in two-component regulatory system with NarP (NarL).

[0807] Accordingly, in one embodiment, the process of the present invention comprises increasing or generating the activity of a gene product with the activity of a “sensory histidine kinase in two-component regulatory system with NarP (NarL)” from Escherichia coli K12 or its functional equivalent or its homolog, e.g. the increase of
[0808] (a) a gene product of a gene comprising the nucleic acid molecule as shown in column 5 of Table I and being depicted in the same respective line as said B2469_{—}2 or a functional equivalent or a homologue thereof as shown depicted in column 7 of Table I, preferably a homologue or functional equivalent as shown depicted in column 7 of Table I B, and being depicted in the same respective line as said B2469_{—}2; or
[0809] (b) a polypeptide comprising a polypeptide, a consensus sequence or a polypeptide motif as shown depicted in column 5 of Table II, and being depicted in the same respective line as said B2469_{—}2 or a functional equivalent or a homologue thereof as depicted in column 7 of Table II or IV, preferably a homologue or functional equivalent as depicted in column 7 of Table II B, and being depicted in the same respective line as said B2469_{—}2,
   as mentioned herein, for the an increased tolerance and/or resistance to environmental stress and increased biomass production as compared to a corresponding non-transformed wild type plant cell, plant or part thereof in plant cell, plant or part thereof, as mentioned.

[0810] Accordingly, in one embodiment, the molecule which activity is to be increased in the process of the invention is the gene product with an activity of described as a “sensory histidine kinase in two-component regulatory system with NarP (NarL)”, preferably it is the molecule of section (a) or (b) of this paragraph.

[0811] In one embodiment, said molecule, which activity is to be increased in the process of the invention and which is the gene product with an activity of described as a “sensory histidine kinase in two-component regulatory system with NarP (NarL)”, is increased non-targeted.

[0812] The sequence of YOR168W_{—}2 from Saccharomyces cerevisiae, e.g. as shown in column 5 of Table I, [sequences from Saccharomyces cerevisiae has been published in Goffeau et al., Science 274 (5287), 546-547, 1996, sequences from Escherichia coli has been published in Blattner et al., Science 277 (5331), 1453-1474 (1997), sequences from Synechocystis sp. has been published in Kaneko and TAbata, Plant Cell Physiology 38 (11), 1997 and its activity is published described as Glutamine tRNA synthetase.

[0813] Accordingly, in one embodiment, the process of the present invention comprises increasing or generating the activity of a gene product with the activity of a “Glutamine tRNA synthetase” from Saccharomyces cerevisiae or its functional equivalent or its homolog, e.g. the increase of
[0814] (a) a gene product of a gene comprising the nucleic acid molecule as shown in column 5 of Table I and being depicted in the same respective line as said YOR168W_{—}2 or a functional equivalent or a homologue thereof as shown depicted in column 7 of Table I, preferably a homologue or functional equivalent as shown depicted in column 7 of Table I B, and being depicted in the same respective line as said YOR168W_{—}2; or
[0815] (b) a polypeptide comprising a polypeptide, a consensus sequence or a polypeptide motif as shown depicted in column 5 of Table II, and being depicted in the same respective line as said YOR168W_{—}2 or a functional equivalent or a homologue thereof as depicted in column 7 of Table II or IV, preferably a homologue or functional equivalent as depicted in column 7 of Table II B, and being depicted in the same respective line as said YOR168W_{—}2,
   as mentioned herein, for the an increased tolerance and/or resistance to environmental stress and increased biomass production as compared to a corresponding non-transformed wild type plant cell, plant or part thereof in plant cell, plant or part thereof, as mentioned.

[0816] Accordingly, in one embodiment, the molecule which activity is to be increased in the process of the invention is the gene product with an activity of described as a “Glutamine tRNA synthetase”, preferably it is the molecule of section (a) or (b) of this paragraph.

[0817] In one embodiment, said molecule, which activity is to be increased in the process of the invention and which is the gene product with an activity of described as a “Glutamine tRNA synthetase”, is increased non-targeted.

[0818] The sequence of B4321 from Escherichia coli, e.g. as shown in column 5 of Table I, [sequences from Saccharomyces cerevisiae has been published in Goffeau et al., Science 274 (5287), 546-547, 1996, sequences from Escherichia coli has been published in Blattner et al., Science 277 (5331), 1453-1474 (1997), sequences from Synechocystis sp. has been published in Kaneko and TAbata, Plant Cell Physiology 38 (11), 1997 and its activity is published described as gluconate transporter.

[0819] Accordingly, in one embodiment, the process of the present invention comprises increasing or generating the activity of a gene product with the activity of a “gluconate transporter” from Escherichia coli or its functional equivalent or its homolog, e.g. the increase of
[0820] (a) a gene product of a gene comprising the nucleic acid molecule as shown in column 5 of Table I and being depicted in the same respective line as said B4321 or a functional equivalent or a homologue thereof as shown depicted in column 7 of Table I, preferably a homologue or functional equivalent as shown depicted in column 7 of Table I B, and being depicted in the same respective line as said B4321; or
[0821] (b) a polypeptide comprising a polypeptide, a consensus sequence or a polypeptide motif as shown depicted in column 5 of Table II, and being depicted in the same respective line as said B4321 or a functional equivalent or a homologue thereof as depicted in column 7 of Table II or IV, preferably a homologue or functional equivalent as depicted in column 7 of Table II B, and being depicted in the same respective line as said B4321,
   as mentioned herein, for the an increased tolerance and/or resistance to environmental stress and increased biomass production as compared to a corresponding non-transformed wild type plant cell, plant or part thereof in plant cell, plant or part thereof, as mentioned.

[0822] Accordingly, in one embodiment, the molecule which activity is to be increased in the process of the invention is the gene product with an activity of described as a “gluconate transporter”, preferably it is the molecule of section (a) or (b) of this paragraph.

[0823] In one embodiment, said molecule, which activity is to be increased in the process of the invention and which is the gene product with an activity of described as a “gluconate transporter”, is increased non-targeted.

[0824] Surprisingly, it was observed that a increasing or generating of at least one gene conferring an activity selected from the group consisting of: 2,3-dihydroxy-2,3-dihydrophenylpropionatedehydrogenase, 3-deoxy-D-arabino-heptulosonate-7-phosphate (DAHP) synthase, 3-deoxy-D-arabino-heptulosonate-7-phosphatesynthase, 3-oxoacyl-(acyl carrier protein) synthase, acid shock protein precursor, aspartate ammonia-lyase, b0081-protein, b0482-protein, b0631-protein, b0753-protein, b0866-protein, b1052-protein, b1161-protein, b1423-protein, b1878-protein, b2226-protein, b2475-protein, cellobiose/arbutin/salicin-specific PTS enzyme (IIB component/IC component), Checkpoint protein, CP4-57 prophage/RNase LS, Dihydrouridine synthase, DNA-binding transcriptional dual regulator protein, D-xylose transporter subunit, gamma-Glu-putrescine synthase, gluconate transporter, glucose-1-phosphate thymidylyl-transferase, Glutamine tRNA synthetase, glutathione-dependent oxidoreductase, glycine betaine transporter subunit protein, glycogen synthase, GTP cyclohydrolase I, heat shock protein, heat shock protein HtpX, heme lyase (CcmH subunit), hexuronate transporter, histidine/lysine/arginine/ornithine transporter subunit protein, HyaA/HyaB-processing protein, inner membrane protein, L-arabinose transporter subunit, Lsm (Like Sm) protein, L-threonine 3-dehydrogenase, methylglyoxal synthase, multidrug efflux system (subunit B), N,N′-diacetylchitobiose-specific enzyme IIA component of PTS, NADH dehydrogenase (subunit N), neutral amino-acid efflux system, nicotinamide-nucleotide adenylyltransferase, ornithine decarboxylase, pantothenate kinase, peptidylprolyl cis-trans isomerase A (rotamase A), phosphate transporter, phosphatidylglycerophosphate synthetase, polyphosphate kinase, potassium-transporting ATPase (subunit B), predicted antimicrobial peptide transporter subunit, predicted arginine/ornithine transporter, predicted hydrolase, predicted kinase, predicted ligase, predicted outer membrane lipoprotein, predicted oxidoreductase (flavin:NADH component), predicted porin, predicted PTS enzymes (IIB component/IIC component), predicted serine transporter protein, predicted transporter protein, Protein component of the small (40S) ribosomal subunit, regulator of length of O-antigen component of lipopolysaccharide chains, ribonuclease activity regulator protein RraA, sensory histidine kinase in two-component regulatory system with NarP (NarL), sodium/proton antiporter, Splicing factor, threonine and homoserine efflux system, transcriptional regulator protein, transcriptional repressor protein MetJ, transporter subunit/periplasmic-binding component of ABC superfamily, tRNA pseudouridine synthase, tRNA-specific adenosine deaminase, universal stress protein UP12, Ya1049c-protein, YCR059C-protein, YEL005C-protein, YER156C-protein, Yfr042w-protein, YGL045W-protein, and YOR024w-protein or of a gene comprising a nucleic acid sequence described in column 5 of Table I in Arabidopsis thaliana conferred an increased tolerance and/or resistance to environmental stress and increased biomass production in the transformed plants as compared to a corresponding non-transformed wild type plant.

[0825] Surprisingly, it was observed that a increasing or generating of at least one gene conferring an activity selected from the group consisting of: 2,3-dihydroxy-2,3-dihydrophenylpropionatedehydrogenase, 3-deoxy-D-arabino-heptulosonate-7-phosphate (DAHP) synthase, 3-deoxy-D-arabino-heptulosonate-7-phosphatesynthase, 3-oxoacyl-(acyl carrier protein) synthase, acid shock protein precursor, aspartate ammonia-lyase, b0081-protein, b0482-protein, b0631-protein, b0753-protein, b0866-protein, b1052-protein, b1161-protein, b1423-protein, b1878-protein, b2226-protein, b2475-protein, cellobiose/arbutin/salicin-specific PTS enzyme (IIB component/IC component), Checkpoint protein, CP4-57 prophage/RNase LS, Dihydrouridine synthase, DNA-binding transcriptional dual regulator protein, D-xylose transporter subunit, gamma-Glu-putrescine synthase, gluconate transporter, glucose-1-phosphate thymidylyltransferase, Glutamine tRNA synthetase, glutathione-dependent oxidoreductase, glycine betaine transporter subunit protein, glycogen synthase, GTP cyclohydrolase I, heat shock protein, heat shock protein HtpX, heme lyase (CcmH subunit), hexuronate transporter, histidine/lysine/arginine/ornithine transporter subunit protein, HyaA/HyaB-processing protein, inner membrane protein, L-arabinose transporter subunit, Lsm (Like Sm) protein, L-threonine 3-dehydrogenase, methylglyoxal synthase, multidrug efflux system (subunit B), N,N′-diacetylchitobiose-specific enzyme IIA component of PTS, NADH dehydrogenase (subunit N), neutral amino-acid efflux system, nicotinamide-nucleotide adenylyltransferase, ornithine decarboxylase, pantothenate kinase, peptidylprolyl cis-trans isomerase A (rotamase A), phosphate transporter, phosphatidylglycerophosphate synthetase, polyphosphate kinase, potassium-transporting ATPase (subunit B), predicted antimicrobial peptide transporter subunit, predicted arginine/ornithine transporter, predicted hydrolase, predicted kinase, predicted ligase, predicted outer membrane lipoprotein, predicted oxidoreductase (flavin:NADH component), predicted porin, predicted PTS enzymes (IIB component/IIC component), predicted serine transporter protein, predicted transporter protein, Protein component of the small (40S) ribosomal subunit, regulator of length of O-antigen component of lipopolysaccharide chains, ribonuclease activity regulator protein RraA, sensory histidine kinase in two-component regulatory system with NarP (NarL), sodium/proton antiporter, Splicing factor, threonine and homoserine efflux system, transcriptional regulator protein, transcriptional repressor protein MetJ, transporter subunit/periplasmic-binding component of ABC superfamily, tRNA pseudouridine synthase, tRNA-specific adenosine deaminase, universal stress protein UP12, Yal049c-protein, YCR059C-protein, YEL005C-protein, YER156C-protein, Yfr042w-protein, YGL045W-protein, and YOR024w-protein or of a gene comprising a nucleic acid sequence described in column 5 of Table I in Arabidopsis thaliana conferred an increased tolerance and/or resistance to environmental stress and increased biomass production in the transformed plants as compared to a corresponding non-transformed wild type plant.

[0826] In particular, it was observed that increasing or generating the activity of a gene product with the activity of a “b0081-protein” encoded by a gene comprising the nucleic acid sequence SEQ ID NO.: 38 in Arabidopsis thaliana conferred an increased drought resistance by surviving longer than the wild type control without showing any symptoms of injury for a period between 3.4 and 6 days as shown in the Examples.

[0827] It was further observed that increasing or generating the activity of a gene product with the activity of a “b0081-protein” encoded by a gene comprising the nucleic acid sequence SEQ ID NO.: 38 in Arabidopsis thaliana conferred an increased biomass production compared with the wild type control without showing any symptoms of injury for a period between 1.1 and 3 days as shown in the Examples.

[0828] In particular, it was observed that increasing or generating the activity of a gene product with the activity of a “transporter subunit/periplasmic-binding component of ABC superfamily” encoded by a gene comprising the nucleic acid sequence SEQ ID NO.: 54 in Arabidopsis thaliana conferred an increased drought resistance by surviving longer than the wild type control without showing any symptoms of injury for a period between 3 and 5 days as shown in the Examples.

[0829] It was further observed that increasing or generating the activity of a gene product with the activity of a “transporter subunit/periplasmic-binding component of ABC super-family” encoded by a gene comprising the nucleic acid sequence SEQ ID NO.: 54 in Arabidopsis thaliana conferred an increased biomass production compared with the wild type control without showing any symptoms of injury for a period between 0.9 and 4 days as shown in the Examples.

[0830] In particular, it was observed that increasing or generating the activity of a gene product with the activity of a “b0482-protein” encoded by a gene comprising the nucleic acid sequence SEQ ID NO.: 70 in Arabidopsis thaliana conferred an increased drought resistance by surviving longer than the wild type control without showing any symptoms of injury for a period between 2.8 and 5 days as shown in the Examples.

[0831] It was further observed that increasing or generating the activity of a gene product with the activity of a “b0482-protein” encoded by a gene comprising the nucleic acid sequence SEQ ID NO.: 70 in Arabidopsis thaliana conferred an increased biomass production compared with the wild type control without showing any symptoms of injury for a period between 0.6 and 3 days as shown in the Examples.

[0832] In particular, it was observed that increasing or generating the activity of a gene product with the activity of a “universal stress protein UP12” encoded by a gene comprising the nucleic acid sequence SEQ ID NO.: 89 in Arabidopsis thaliana conferred an increased drought resistance by surviving longer than the wild type control without showing any symptoms of injury for a period between 2.9 and 5 days as shown in the Examples.

[0833] It was further observed that increasing or generating the activity of a gene product with the activity of a “universal stress protein UP12” encoded by a gene comprising the nucleic acid sequence SEQ ID NO.: 89 in Arabidopsis thaliana conferred an increased biomass production compared with the wild type control without showing any symptoms of injury for a period between 0.9 and 4 days as shown in the Examples.

[0834] In particular, it was observed that increasing or generating the activity of a gene product with the activity of a “transcriptional regulator protein” encoded by a gene comprising the nucleic acid sequence SEQ ID NO.: 143 in Arabidopsis thaliana conferred an increased drought resistance by surviving longer than the wild type control without showing any symptoms of injury for a period between 2.8 and 5 days as shown in the Examples.

[0835] It was further observed that increasing or generating the activity of a gene product with the activity of a “transcriptional regulator protein” encoded by a gene comprising the nucleic acid sequence SEQ ID NO.: 143 in Arabidopsis thaliana conferred an increased biomass production compared with the wild type control without showing any symptoms of injury for a period between 0.8 and 4 days as shown in the Examples.

[0836] In particular, it was observed that increasing or generating the activity of a gene product with the activity of a “b0631-protein” encoded by a gene comprising the nucleic acid sequence SEQ ID NO.: 162 in Arabidopsis thaliana conferred an increased drought resistance by surviving longer than the wild type control without showing any symptoms of injury for a period between 3.4 and 6 days as shown in the Examples.

[0837] It was further observed that increasing or generating the activity of a gene product with the activity of a “b0631-protein” encoded by a gene comprising the nucleic acid sequence SEQ ID NO.: 162 in Arabidopsis thaliana conferred an increased biomass production compared with the wild type control without showing any symptoms of injury for a period between 1.2 and 5 days as shown in the Examples.

[0838] In particular, it was observed that increasing or generating the activity of a gene product with the activity of a “potassium-transporting ATPase (subunit B)” encoded by a gene comprising the nucleic acid sequence SEQ ID NO.: 213 in Arabidopsis thaliana conferred an increased drought resistance by surviving longer than the wild type control without showing any symptoms of injury for a period between 2.1 and 3 days as shown in the Examples.

[0839] It was further observed that increasing or generating the activity of a gene product with the activity of a “potassium-transporting ATPase (subunit B)” encoded by a gene comprising the nucleic acid sequence SEQ ID NO.: 213 in Arabidopsis thaliana conferred an increased biomass production compared with the wild type control without showing any symptoms of injury for a period between 1.8 and 3 days as shown in the Examples.

[0840] In particular, it was observed that increasing or generating the activity of a gene product with the activity of a “b0753-protein” encoded by a gene comprising the nucleic acid sequence SEQ ID NO.: 358 in Arabidopsis thaliana conferred an increased drought resistance by surviving longer than the wild type control without showing any symptoms of injury for a period between 3.3 and 5 days as shown in the Examples.

[0841] It was further observed that increasing or generating the activity of a gene product with the activity of a “b0753-protein” encoded by a gene comprising the nucleic acid sequence SEQ ID NO.: 358 in Arabidopsis thaliana conferred an increased biomass production compared with the wild type control without showing any symptoms of injury for a period between 1.6 and 4 days as shown in the Examples.

[0842] In particular, it was observed that increasing or generating the activity of a gene product with the activity of a “threonine and homoserine efflux system” encoded by a gene comprising the nucleic acid sequence SEQ ID NO.: 367 in Arabidopsis thaliana conferred an increased drought resistance by surviving longer than the wild type control without showing any symptoms of injury for a period between 3 and 5 days as shown in the Examples.

[0843] It was further observed that increasing or generating the activity of a gene product with the activity of a “threonine and homoserine efflux system” encoded by a gene comprising the nucleic acid sequence SEQ ID NO.: 367 in Arabidopsis thaliana conferred an increased biomass production compared with the wild type control without showing any symptoms of injury for a period between 1.5 and 3 days as shown in the Examples.

[0844] In particular, it was observed that increasing or generating the activity of a gene product with the activity of a “predicted transporter protein” encoded by a gene comprising the nucleic acid sequence SEQ ID NO.: 420 in Arabidopsis thaliana conferred an increased drought resistance by surviving longer than the wild type control without showing any symptoms of injury for a period between 2.2 and 5 days as shown in the Examples.

[0845] It was further observed that increasing or generating the activity of a gene product with the activity of a “predicted transporter protein” encoded by a gene comprising the nucleic acid sequence SEQ ID NO.: 420 in Arabidopsis thaliana conferred an increased biomass production compared with the wild type control without showing any symptoms of injury for a period between 1 and 4 days as shown in the Examples.

[0846] In particular, it was observed that increasing or generating the activity of a gene product with the activity of a “b0866-protein” encoded by a gene comprising the nucleic acid sequence SEQ ID NO.: 455 in Arabidopsis thaliana conferred an increased drought resistance by surviving longer than the wild type control without showing any symptoms of injury for a period between 3 and 5 days as shown in the Examples. It was further observed that increasing or generating the activity of a gene product with the activity of a “b0866-protein” encoded by a gene comprising the nucleic acid sequence SEQ ID NO.: 455 in Arabidopsis thaliana conferred an increased biomass production compared with the wild type control without showing any symptoms of injury for a period between 0.8 and 5 days as shown in the Examples.

[0847] In particular, it was observed that increasing or generating the activity of a gene product with the activity of a “methylglyoxal synthase” encoded by a gene comprising the nucleic acid sequence SEQ ID NO.: 535 in Arabidopsis thaliana conferred an increased drought resistance by surviving longer than the wild type control without showing any symptoms of injury for a period between 4.4 and 5 days as shown in the Examples. It was further observed that increasing or generating the activity of a gene product with the activity of a “methylglyoxal synthase” encoded by a gene comprising the nucleic acid sequence SEQ ID NO.: 535 in Arabidopsis thaliana conferred an increased biomass production compared with the wild type control without showing any symptoms of injury for a period between 0.5 and 2 days as shown in the Examples.

[0848] In particular, it was observed that increasing or generating the activity of a gene product with the activity of a “HyaA/HyaB-processing protein” encoded by a gene comprising the nucleic acid sequence SEQ ID NO.: 618 in Arabidopsis thaliana conferred an increased drought resistance by surviving longer than the wild type control without showing any symptoms of injury for a period between 2.6 and 4 days as shown in the Examples.

[0849] It was further observed that increasing or generating the activity of a gene product with the activity of a “HyaA/HyaB-processing protein” encoded by a gene comprising the nucleic acid sequence SEQ ID NO.: 618 in Arabidopsis thaliana conferred an increased biomass production compared with the wild type control without showing any symptoms of injury for a period between 1.2 and 4 days as shown in the Examples.

[0850] In particular, it was observed that increasing or generating the activity of a gene product with the activity of a “predicted oxidoreductase (flavin:NADH component)” encoded by a gene comprising the nucleic acid sequence SEQ ID NO.: 671 in Arabidopsis thaliana conferred an increased drought resistance by surviving longer than the wild type control without showing any symptoms of injury for a period between 3.3 and 6 days as shown in the Examples.

[0851] It was further observed that increasing or generating the activity of a gene product with the activity of a “predicted oxidoreductase (flavin:NADH component)” encoded by a gene comprising the nucleic acid sequence SEQ ID NO.: 671 in Arabidopsis thaliana conferred an increased biomass production compared with the wild type control without showing any symptoms of injury for a period between 0.6 and 2 days as shown in the Examples.

[0852] In particular, it was observed that increasing or generating the activity of a gene product with the activity of a “b1052-protein” encoded by a gene comprising the nucleic acid sequence SEQ ID NO.: 764 in Arabidopsis thaliana conferred an increased drought resistance by surviving longer than the wild type control without showing any symptoms of injury for a period between 3 and 5 days as shown in the Examples.

[0853] It was further observed that increasing or generating the activity of a gene product with the activity of a “b1052-protein” encoded by a gene comprising the nucleic acid sequence SEQ ID NO.: 764 in Arabidopsis thaliana conferred an increased biomass production compared with the wild type control without showing any symptoms of injury for a period between 0.4 and 2 days as shown in the Examples.

[0854] In particular, it was observed that increasing or generating the activity of a gene product with the activity of a “3-oxoacyl-(acyl carrier protein) synthase” encoded by a gene comprising the nucleic acid sequence SEQ ID NO.: 768 in Arabidopsis thaliana conferred an increased drought resistance by surviving longer than the wild type control without showing any symptoms of injury for a period between 3.4 and 5 days as shown in the Examples.

[0855] It was further observed that increasing or generating the activity of a gene product with the activity of a “3-oxoacyl-(acyl carrier protein) synthase” encoded by a gene comprising the nucleic acid sequence SEQ ID NO.: 768 in Arabidopsis thaliana conferred an increased biomass production compared with the wild type control without showing any symptoms of injury for a period between 0.3 and 3 days as shown in the Examples.

[0856] In particular, it was observed that increasing or generating the activity of a gene product with the activity of a “b1161-protein” encoded by a gene comprising the nucleic acid sequence SEQ ID NO.: 907 in Arabidopsis thaliana conferred an increased drought resistance by surviving longer than the wild type control without showing any symptoms of injury for a period between 2.9 and 4 days as shown in the Examples.

[0857] It was further observed that increasing or generating the activity of a gene product with the activity of a “b1161-protein” encoded by a gene comprising the nucleic acid sequence SEQ ID NO.: 907 in Arabidopsis thaliana conferred an increased biomass production compared with the wild type control without showing any symptoms of injury for a period between 2 and 4 days as shown in the Examples.

[0858] In particular, it was observed that increasing or generating the activity of a gene product with the activity of a “sodium/proton antiporter” encoded by a gene comprising the nucleic acid sequence SEQ ID NO.: 927 in Arabidopsis thaliana conferred an increased drought resistance by surviving longer than the wild type control without showing any symptoms of injury for a period between 4 and 6 days as shown in the Examples.

[0859] It was further observed that increasing or generating the activity of a gene product with the activity of a “sodium/proton antiporter” encoded by a gene comprising the nucleic acid sequence SEQ ID NO.: 927 in Arabidopsis thaliana conferred an increased biomass production compared with the wild type control without showing any symptoms of injury for a period between 0.8 and 4 days as shown in the Examples.

[0860] In particular, it was observed that increasing or generating the activity of a gene product with the activity of a “predicted antimicrobial peptide transporter subunit” encoded by a gene comprising the nucleic acid sequence SEQ ID NO.: 1009 in Arabidopsis thaliana conferred an increased drought resistance by surviving longer than the wild type control without showing any symptoms of injury for a period between 3.4 and 5 days as shown in the Examples.

[0861] It was further observed that increasing or generating the activity of a gene product with the activity of a “predicted antimicrobial peptide transporter subunit” encoded by a gene comprising the nucleic acid sequence SEQ ID NO.: 1009 in Arabidopsis thaliana conferred an increased biomass production compared with the wild type control without showing any symptoms of injury for a period between 1.2 and 3 days as shown in the Examples.

[0862] In particular, it was observed that increasing or generating the activity of a gene product with the activity of a “predicted antimicrobial peptide transporter subunit” encoded by a gene comprising the nucleic acid sequence SEQ ID NO.: 1154 in Arabidopsis thaliana conferred an increased drought resistance by surviving longer than the wild type control without showing any symptoms of injury for a period between 2.3 and 5 days as shown in the Examples.

[0863] It was further observed that increasing or generating the activity of a gene product with the activity of a “predicted antimicrobial peptide transporter subunit” encoded by a gene comprising the nucleic acid sequence SEQ ID NO.: 1154 in Arabidopsis thaliana conferred an increased biomass production compared with the wild type control without showing any symptoms of injury for a period between 1 and 4 days as shown in the Examples.

[0864] In particular, it was observed that increasing or generating the activity of a gene product with the activity of a “b1423-protein” encoded by a gene comprising the nucleic acid sequence SEQ ID NO.: 1308 in Arabidopsis thaliana conferred an increased drought resistance by surviving longer than the wild type control without showing any symptoms of injury for a period between 3.1 and 6 days as shown in the Examples.

[0865] It was further observed that increasing or generating the activity of a gene product with the activity of a “b1423-protein” encoded by a gene comprising the nucleic acid sequence SEQ ID NO.: 1308 in Arabidopsis thaliana conferred an increased biomass production compared with the wild type control without showing any symptoms of injury for a period between 0.1 and 1 days as shown in the Examples.

[0866] In particular, it was observed that increasing or generating the activity of a gene product with the activity of a “acid shock protein precursor” encoded by a gene comprising the nucleic acid sequence SEQ ID NO.: 1368 in Arabidopsis thaliana conferred an increased drought resistance by surviving longer than the wild type control without showing any symptoms of injury for a period between 3.7 and 5 days as shown in the Examples.

[0867] It was further observed that increasing or generating the activity of a gene product with the activity of a “acid shock protein precursor” encoded by a gene comprising the nucleic acid sequence SEQ ID NO.: 1368 in Arabidopsis thaliana conferred an increased biomass production compared with the wild type control without showing any symptoms of injury for a period between 0.1 and 1 days as shown in the Examples.

[0868] In particular, it was observed that increasing or generating the activity of a gene product with the activity of a “predicted arginine/ornithine transporter” encoded by a gene comprising the nucleic acid sequence SEQ ID NO.: 1374 in Arabidopsis thaliana conferred an increased drought resistance by surviving longer than the wild type control without showing any symptoms of injury for a period between 2.8 and 5 days as shown in the Examples.

[0869] It was further observed that increasing or generating the activity of a gene product with the activity of a “predicted arginine/ornithine transporter” encoded by a gene comprising the nucleic acid sequence SEQ ID NO.: 1374 in Arabidopsis thaliana conferred an increased biomass production compared with the wild type control without showing any symptoms of injury for a period between 0.9 and 3 days as shown in the Examples.

[0870] In particular, it was observed that increasing or generating the activity of a gene product with the activity of a “3-deoxy-D-arabino-heptulosonate-7-phosphatesynthase” encoded by a gene comprising the nucleic acid sequence SEQ ID NO.: 1507 in Arabidopsis thaliana conferred an increased drought resistance by surviving longer than the wild type control without showing any symptoms of injury for a period between 4.2 and 5 days as shown in the Examples.

[0871] It was further observed that increasing or generating the activity of a gene product with the activity of a “3-deoxy-D-arabino-heptulosonate-7-phosphatesynthase” encoded by a gene comprising the nucleic acid sequence SEQ ID NO.: 1507 in Arabidopsis thaliana conferred an increased biomass production compared with the wild type control without showing any symptoms of injury for a period between 0.6 and 2 days as shown in the Examples.

[0872] In particular, it was observed that increasing or generating the activity of a gene product with the activity of a “N,N′-diacetylchitobiose-specific enzyme IIA component of PTS” encoded by a gene comprising the nucleic acid sequence SEQ ID NO.: 1953 in Arabidopsis thaliana conferred an increased drought resistance by surviving longer than the wild type control without showing any symptoms of injury for a period between 4.1 and 5 days as shown in the Examples.

[0873] It was further observed that increasing or generating the activity of a gene product with the activity of a “N,N′-diacetylchitobiose-specific enzyme IIA component of PTS” encoded by a gene comprising the nucleic acid sequence SEQ ID NO.: 1953 in Arabidopsis thaliana conferred an increased biomass production compared with the wild type control without showing any symptoms of injury for a period between 0.8 and 2 days as shown in the Examples.

[0874] In particular, it was observed that increasing or generating the activity of a gene product with the activity of a “neutral amino-acid efflux system” encoded by a gene comprising the nucleic acid sequence SEQ ID NO.: 2156 in Arabidopsis thaliana conferred an increased drought resistance by surviving longer than the wild type control without showing any symptoms of injury for a period between 3.4 and 5 days as shown in the Examples.

[0875] It was further observed that increasing or generating the activity of a gene product with the activity of a “neutral amino-acid efflux system” encoded by a gene comprising the nucleic acid sequence SEQ ID NO.: 2156 in Arabidopsis thaliana conferred an increased biomass production compared with the wild type control without showing any symptoms of injury for a period between 1 and 4 days as shown in the Examples.

[0876] In particular, it was observed that increasing or generating the activity of a gene product with the activity of a “b1878-protein” encoded by a gene comprising the nucleic acid sequence SEQ ID NO.: 2195 in Arabidopsis thaliana conferred an increased drought resistance by surviving longer than the wild type control without showing any symptoms of injury for a period between 3.4 and 5 days as shown in the Examples.

[0877] It was further observed that increasing or generating the activity of a gene product with the activity of a “b1878-protein” encoded by a gene comprising the nucleic acid sequence SEQ ID NO.: 2195 in Arabidopsis thaliana conferred an increased biomass production compared with the wild type control without showing any symptoms of injury for a period between 1.3 and 3 days as shown in the Examples.

[0878] In particular, it was observed that increasing or generating the activity of a gene product with the activity of a “L-arabinose transporter subunit” encoded by a gene comprising the nucleic acid sequence SEQ ID NO.: 2219 in Arabidopsis thaliana conferred an increased drought resistance by surviving longer than the wild type control without showing any symptoms of injury for a period between 2.8 and 4 days as shown in the Examples.

[0879] It was further observed that increasing or generating the activity of a gene product with the activity of a “L-arabinose transporter subunit” encoded by a gene comprising the nucleic acid sequence SEQ ID NO.: 2219 in Arabidopsis thaliana conferred an increased biomass production compared with the wild type control without showing any symptoms of injury for a period between 1.8 and 3 days as shown in the Examples.

[0880] In particular, it was observed that increasing or generating the activity of a gene product with the activity of a “phosphatidylglycerophosphate synthetase” encoded by a gene comprising the nucleic acid sequence SEQ ID NO.: 2277 in Arabidopsis thaliana conferred an increased drought resistance by surviving longer than the wild type control without showing any symptoms of injury for a period between 2.5 and 4 days as shown in the Examples.

[0881] It was further observed that increasing or generating the activity of a gene product with the activity of a “phosphatidylglycerophosphate synthetase” encoded by a gene comprising the nucleic acid sequence SEQ ID NO.: 2277 in Arabidopsis thaliana conferred an increased biomass production compared with the wild type control without showing any symptoms of injury for a period between 1.6 and 3 days as shown in the Examples.

[0882] In particular, it was observed that increasing or generating the activity of a gene product with the activity of a “regulator of length of O-antigen component of lipopolysaccharide chains” encoded by a gene comprising the nucleic acid sequence SEQ ID NO.: 2470 in Arabidopsis thaliana conferred an increased drought resistance by surviving longer than the wild type control without showing any symptoms of injury for a period between 2.6 and 4 days as shown in the Examples.

[0883] It was further observed that increasing or generating the activity of a gene product with the activity of a “regulator of length of O-antigen component of lipopolysaccharide chains” encoded by a gene comprising the nucleic acid sequence SEQ ID NO.: 2470 in Arabidopsis thaliana conferred an increased biomass production compared with the wild type control without showing any symptoms of injury for a period between 0.3 and 2 days as shown in the Examples.

[0884] In particular, it was observed that increasing or generating the activity of a gene product with the activity of a “glucose-1-phosphate thymidylyltransferase” encoded by a gene comprising the nucleic acid sequence SEQ ID NO.: 2493 in Arabidopsis thaliana conferred an increased drought resistance by surviving longer than the wild type control without showing any symptoms of injury for a period between 2.1 and 4 days as shown in the Examples.

[0885] It was further observed that increasing or generating the activity of a gene product with the activity of a “glucose-1-phosphate thymidylyltransferase” encoded by a gene comprising the nucleic acid sequence SEQ ID NO.: 2493 in Arabidopsis thaliana conferred an increased biomass production compared with the wild type control without showing any symptoms of injury for a period between 0.1 and 1 days as shown in the Examples.

[0886] In particular, it was observed that increasing or generating the activity of a gene product with the activity of a “multidrug efflux system (subunit B)” encoded by a gene comprising the nucleic acid sequence SEQ ID NO.: 2627 in Arabidopsis thaliana conferred an increased drought resistance by surviving longer than the wild type control without showing any symptoms of injury for a period between 2.5 and 4 days as shown in the Examples.

[0887] It was further observed that increasing or generating the activity of a gene product with the activity of a “multidrug efflux system (subunit B)” encoded by a gene comprising the nucleic acid sequence SEQ ID NO.: 2627 in Arabidopsis thaliana conferred an increased biomass production compared with the wild type control without showing any symptoms of injury for a period between 0.5 and 3 days as shown in the Examples.

[0888] In particular, it was observed that increasing or generating the activity of a gene product with the activity of a “GTP cyclohydrolase I” encoded by a gene comprising the nucleic acid sequence SEQ ID NO.: 2858 in Arabidopsis thaliana conferred an increased drought resistance by surviving longer than the wild type control without showing any symptoms of injury for a period between 2.5 and 4 days as shown in the Examples.

[0889] It was further observed that increasing or generating the activity of a gene product with the activity of a “GTP cyclohydrolase I” encoded by a gene comprising the nucleic acid sequence SEQ ID NO.: 2858 in Arabidopsis thaliana conferred an increased biomass production compared with the wild type control without showing any symptoms of injury for a period between 1.5 and 4 days as shown in the Examples.

[0890] In particular, it was observed that increasing or generating the activity of a gene product with the activity of a “heme lyase (CcmH subunit)” encoded by a gene comprising the nucleic acid sequence SEQ ID NO.: 2942 in Arabidopsis thaliana conferred an increased drought resistance by surviving longer than the wild type control without showing any symptoms of injury for a period between 3.4 and 6 days as shown in the Examples.

[0891] It was further observed that increasing or generating the activity of a gene product with the activity of a “heme lyase (CcmH subunit)” encoded by a gene comprising the nucleic acid sequence SEQ ID NO.: 2942 in Arabidopsis thaliana conferred an increased biomass production compared with the wild type control without showing any symptoms of injury for a period between 0.7 and 3 days as shown in the Examples.

[0892] In particular, it was observed that increasing or generating the activity of a gene product with the activity of a “b2226-protein” encoded by a gene comprising the nucleic acid sequence SEQ ID NO.: 2965 in Arabidopsis thaliana conferred an increased drought resistance by surviving longer than the wild type control without showing any symptoms of injury for a period between 2.9 and 4 days as shown in the Examples.

[0893] It was further observed that increasing or generating the activity of a gene product with the activity of a “b2226-protein” encoded by a gene comprising the nucleic acid sequence SEQ ID NO.: 2965 in Arabidopsis thaliana conferred an increased biomass production compared with the wild type control without showing any symptoms of injury for a period between 1.6 and 4 days as shown in the Examples.

[0894] In particular, it was observed that increasing or generating the activity of a gene product with the activity of a “histidine/lysine/arginine/ornithine transporter subunit protein” encoded by a gene comprising the nucleic acid sequence SEQ ID NO.: 2981 in Arabidopsis thaliana conferred an increased drought resistance by surviving longer than the wild type control without showing any symptoms of injury for a period between 1.9 and 3 days as shown in the Examples.

[0895] It was further observed that increasing or generating the activity of a gene product with the activity of a “histidine/lysine/arginine/ornithine transporter subunit protein” encoded by a gene comprising the nucleic acid sequence SEQ ID NO.: 2981 in Arabidopsis thaliana conferred an increased biomass production compared with the wild type control without showing any symptoms of injury for a period between 0.9 and 3 days as shown in the Examples.

[0896] In particular, it was observed that increasing or generating the activity of a gene product with the activity of a “sensory histidine kinase in two-component regulatory system with NarP (NarL)” encoded by a gene comprising the nucleic acid sequence SEQ ID NO.: 3130 in Arabidopsis thaliana conferred an increased drought resistance by surviving longer than the wild type control without showing any symptoms of injury for a period between 2.2 and 5 days as shown in the Examples.

[0897] It was further observed that increasing or generating the activity of a gene product with the activity of a “sensory histidine kinase in two-component regulatory system with NarP (NarL)” encoded by a gene comprising the nucleic acid sequence SEQ ID NO.: 3130 in Arabidopsis thaliana conferred an increased biomass production compared with the wild type control without showing any symptoms of injury for a period between 0.9 and 3 days as shown in the Examples.

[0898] In particular, it was observed that increasing or generating the activity of a gene product with the activity of a “b2475-protein” encoded by a gene comprising the nucleic acid sequence SEQ ID NO.: 3216 in Arabidopsis thaliana conferred an increased drought resistance by surviving longer than the wild type control without showing any symptoms of injury for a period between 2.9 and 5 days as shown in the Examples.

[0899] It was further observed that increasing or generating the activity of a gene product with the activity of a “b2475-protein” encoded by a gene comprising the nucleic acid sequence SEQ ID NO.: 3216 in Arabidopsis thaliana conferred an increased biomass production compared with the wild type control without showing any symptoms of injury for a period between 0.3 and 2 days as shown in the Examples.

[0900] In particular, it was observed that increasing or generating the activity of a gene product with the activity of a “NADH dehydrogenase (subunit N)” encoded by a gene comprising the nucleic acid sequence SEQ ID NO.: 3335 in Arabidopsis thaliana conferred an increased drought resistance by surviving longer than the wild type control without showing any symptoms of injury for a period between 1.9 and 3 days as shown in the Examples.

[0901] It was further observed that increasing or generating the activity of a gene product with the activity of a “NADH dehydrogenase (subunit N)” encoded by a gene comprising the nucleic acid sequence SEQ ID NO.: 3335 in Arabidopsis thaliana conferred an increased biomass production compared with the wild type control without showing any symptoms of injury for a period between 0.6 and 2 days as shown in the Examples.

[0902] In particular, it was observed that increasing or generating the activity of a gene product with the activity of a “2,3-dihydroxy-2,3-dihydrophenylpropionatedehydrogenase” encoded by a gene comprising the nucleic acid sequence SEQ ID NO.: 3401 in Arabidopsis thaliana conferred an increased drought resistance by surviving longer than the wild type control without showing any symptoms of injury for a period between 2.9 and 5 days as shown in the Examples.

[0903] It was further observed that increasing or generating the activity of a gene product with the activity of a “2,3-dihydroxy-2,3-dihydrophenylpropionatedehydrogenase” encoded by a gene comprising the nucleic acid sequence SEQ ID NO.: 3401 in Arabidopsis thaliana conferred an increased biomass production compared with the wild type control without showing any symptoms of injury for a period between 0.6 and 2 days as shown in the Examples.

[0904] In particular, it was observed that increasing or generating the activity of a gene product with the activity of a “tRNA-specific adenosine deaminase” encoded by a gene comprising the nucleic acid sequence SEQ ID NO.: 3590 in Arabidopsis thaliana conferred an increased drought resistance by surviving longer than the wild type control without showing any symptoms of injury for a period between 1.6 and 3 days as shown in the Examples.

[0905] It was further observed that increasing or generating the activity of a gene product with the activity of a “tRNA-specific adenosine deaminase” encoded by a gene comprising the nucleic acid sequence SEQ ID NO.: 3590 in Arabidopsis thaliana conferred an increased biomass production compared with the wild type control without showing any symptoms of injury for a period between 1.4 and 3 days as shown in the Examples.

[0906] In particular, it was observed that increasing or generating the activity of a gene product with the activity of a “predicted outer membrane lipoprotein” encoded by a gene comprising the nucleic acid sequence SEQ ID NO.: 3831 in Arabidopsis thaliana conferred an increased drought resistance by surviving longer than the wild type control without showing any symptoms of injury for a period between 1.6 and 4 days as shown in the Examples.

[0907] It was further observed that increasing or generating the activity of a gene product with the activity of a “predicted outer membrane lipoprotein” encoded by a gene comprising the nucleic acid sequence SEQ ID NO.: 3831 in Arabidopsis thaliana conferred an increased biomass production compared with the wild type control without showing any symptoms of injury for a period between 0.7 and 2 days as shown in the Examples.

[0908] In particular, it was observed that increasing or generating the activity of a gene product with the activity of a “CP4-57 prophage/RNase LS” encoded by a gene comprising the nucleic acid sequence SEQ ID NO.: 3857 in Arabidopsis thaliana conferred an increased drought resistance by surviving longer than the wild type control without showing any symptoms of injury for a period between 1.8 and 3 days as shown in the Examples.

[0909] It was further observed that increasing or generating the activity of a gene product with the activity of a “CP4-57 prophage/ RNase LS” encoded by a gene comprising the nucleic acid sequence SEQ ID NO.: 3857 in Arabidopsis thaliana conferred an increased biomass production compared with the wild type control without showing any symptoms of injury for a period between 0.6 and 2 days as shown in the Examples.

[0910] In particular, it was observed that increasing or generating the activity of a gene product with the activity of a “glycine betaine transporter subunit protein” encoded by a gene comprising the nucleic acid sequence SEQ ID NO.: 3861 in Arabidopsis thaliana conferred an increased drought resistance by surviving longer than the wild type control without showing any symptoms of injury for a period between 4.3 and 5 days as shown in the Examples.

[0911] It was further observed that increasing or generating the activity of a gene product with the activity of a “glycine betaine transporter subunit protein” encoded by a gene comprising the nucleic acid sequence SEQ ID NO.: 3861 in Arabidopsis thaliana conferred an increased biomass production compared with the wild type control without showing any symptoms of injury for a period between 0.1 and 1 days as shown in the Examples.

[0912] In particular, it was observed that increasing or generating the activity of a gene product with the activity of a “cellobiose/arbutin/salicin-specific PTS enzyme (IIB component/IC component)” encoded by a gene comprising the nucleic acid sequence SEQ ID NO.: 4022 in Arabidopsis thaliana conferred an increased drought resistance by surviving longer than the wild type control without showing any symptoms of injury for a period between 4 and 5 days as shown in the Examples.

[0913] It was further observed that increasing or generating the activity of a gene product with the activity of a “cellobiose/arbutin/salicin-specific PTS enzyme (IIB component/IC component)” encoded by a gene comprising the nucleic acid sequence SEQ ID NO.: 4022 in Arabidopsis thaliana conferred an increased biomass production compared with the wild type control without showing any symptoms of injury for a period between 0.4 and 2 days as shown in the Examples.

[0914] In particular, it was observed that increasing or generating the activity of a gene product with the activity of a “predicted kinase” encoded by a gene comprising the nucleic acid sequence SEQ ID NO.: 4059 in Arabidopsis thaliana conferred an increased drought resistance by surviving longer than the wild type control without showing any symptoms of injury for a period between 2.9 and 5 days as shown in the Examples.

[0915] It was further observed that increasing or generating the activity of a gene product with the activity of a “predicted kinase” encoded by a gene comprising the nucleic acid sequence SEQ ID NO.: 4059 in Arabidopsis thaliana conferred an increased biomass production compared with the wild type control without showing any symptoms of injury for a period between 0.4 and 2 days as shown in the Examples.

[0916] In particular, it was observed that increasing or generating the activity of a gene product with the activity of a “tRNA pseudouridine synthase” encoded by a gene comprising the nucleic acid sequence SEQ ID NO.: 4076 in Arabidopsis thaliana conferred an increased drought resistance by surviving longer than the wild type control without showing any symptoms of injury for a period between 3.2 and 6 days as shown in the Examples.

[0917] It was further observed that increasing or generating the activity of a gene product with the activity of a “tRNA pseudouridine synthase” encoded by a gene comprising the nucleic acid sequence SEQ ID NO.: 4076 in Arabidopsis thaliana conferred an increased biomass production compared with the wild type control without showing any symptoms of injury for a period between 0.7 and 3 days as shown in the Examples.

[0918] In particular, it was observed that increasing or generating the activity of a gene product with the activity of a “predicted ligase” encoded by a gene comprising the nucleic acid sequence SEQ ID NO.: 4157 in Arabidopsis thaliana conferred an increased drought resistance by surviving longer than the wild type control without showing any symptoms of injury for a period between 3 and 5 days as shown in the Examples.

[0919] It was further observed that increasing or generating the activity of a gene product with the activity of a “predicted ligase” encoded by a gene comprising the nucleic acid sequence SEQ ID NO.: 4157 in Arabidopsis thaliana conferred an increased biomass production compared with the wild type control without showing any symptoms of injury for a period between 1.7 and 3 days as shown in the Examples.

[0920] In particular, it was observed that increasing or generating the activity of a gene product with the activity of a “ornithine decarboxylase” encoded by a gene comprising the nucleic acid sequence SEQ ID NO.: 4260 in Arabidopsis thaliana conferred an increased drought resistance by surviving longer than the wild type control without showing any symptoms of injury for a period between 3.8 and 5 days as shown in the Examples.

[0921] It was further observed that increasing or generating the activity of a gene product with the activity of a “ornithine decarboxylase” encoded by a gene comprising the nucleic acid sequence SEQ ID NO.: 4260 in Arabidopsis thaliana conferred an increased biomass production compared with the wild type control without showing any symptoms of injury for a period between 0.7 and 3 days as shown in the Examples.

[0922] In particular, it was observed that increasing or generating the activity of a gene product with the activity of a “phosphate transporter” encoded by a gene comprising the nucleic acid sequence SEQ ID NO.: 4350 in Arabidopsis thaliana conferred an increased drought resistance by surviving longer than the wild type control without showing any symptoms of injury for a period between 2.9 and 4 days as shown in the Examples.

[0923] It was further observed that increasing or generating the activity of a gene product with the activity of a “phosphate transporter” encoded by a gene comprising the nucleic acid sequence SEQ ID NO.: 4350 in Arabidopsis thaliana conferred an increased biomass production compared with the wild type control without showing any symptoms of injury for a period between 1.3 and 4 days as shown in the Examples.

[0924] In particular, it was observed that increasing or generating the activity of a gene product with the activity of a “phosphate transporter” encoded by a gene comprising the nucleic acid sequence SEQ ID NO.: 4350 in Arabidopsis thaliana conferred an increased drought resistance by surviving longer than the wild type control without showing any symptoms of injury for a period between 2.7 and 4 days as shown in the Examples.

[0925] It was further observed that increasing or generating the activity of a gene product with the activity of a “phosphate transporter” encoded by a gene comprising the nucleic acid sequence SEQ ID NO.: 4350 in Arabidopsis thaliana conferred an increased biomass production compared with the wild type control without showing any symptoms of injury for a period between 0.1 and 0.1 days as shown in the Examples.

[0926] In particular, it was observed that increasing or generating the activity of a gene product with the activity of a “hexuronate transporter” encoded by a gene comprising the nucleic acid sequence SEQ ID NO.: 4459 in Arabidopsis thaliana conferred an increased drought resistance by surviving longer than the wild type control without showing any symptoms of injury for a period between 2.8 and 5 days as shown in the Examples.

[0927] It was further observed that increasing or generating the activity of a gene product with the activity of a “hexuronate transporter” encoded by a gene comprising the nucleic acid sequence SEQ ID NO.: 4459 in Arabidopsis thaliana conferred an increased biomass production compared with the wild type control without showing any symptoms of injury for a period between 1 and 3 days as shown in the Examples.

[0928] In particular, it was observed that increasing or generating the activity of a gene product with the activity of a “peptidyl-prolyl cis-trans isomerase A (rotamase A)” encoded by a gene comprising the nucleic acid sequence SEQ ID NO.: 4505 in Arabidopsis thaliana conferred an increased drought resistance by surviving longer than the wild type control without showing any symptoms of injury for a period between 3.7 and 4 days as shown in the Examples.

[0929] It was further observed that increasing or generating the activity of a gene product with the activity of a “peptidyl-prolyl cis-trans isomerase A (rotamase A)” encoded by a gene comprising the nucleic acid sequence SEQ ID NO.: 4505 in Arabidopsis thaliana conferred an increased biomass production compared with the wild type control without showing any symptoms of injury for a period between 0.1 and 0.1 days as shown in the Examples.

[0930] In particular, it was observed that increasing or generating the activity of a gene product with the activity of a “glycogen synthase” encoded by a gene comprising the nucleic acid sequence SEQ ID NO.: 4640 in Arabidopsis thaliana conferred an increased drought resistance by surviving longer than the wild type control without showing any symptoms of injury for a period between 2.8 and 4 days as shown in the Examples.

[0931] It was further observed that increasing or generating the activity of a gene product with the activity of a “glycogen synthase” encoded by a gene comprising the nucleic acid sequence SEQ ID NO.: 4640 in Arabidopsis thaliana conferred an increased biomass production compared with the wild type control without showing any symptoms of injury for a period between 0.6 and 2 days as shown in the Examples.

[0932] In particular, it was observed that increasing or generating the activity of a gene product with the activity of a “D-xylose transporter subunit” encoded by a gene comprising the nucleic acid sequence SEQ ID NO.: 4806 in Arabidopsis thaliana conferred an increased drought resistance by surviving longer than the wild type control without showing any symptoms of injury for a period between 2.7 and 4 days as shown in the Examples.

[0933] It was further observed that increasing or generating the activity of a gene product with the activity of a “D-xylose transporter subunit” encoded by a gene comprising the nucleic acid sequence SEQ ID NO.: 4806 in Arabidopsis thaliana conferred an increased biomass production compared with the wild type control without showing any symptoms of injury for a period between 0.8 and 3 days as shown in the Examples.

[0934] In particular, it was observed that increasing or generating the activity of a gene product with the activity of a “L-threonine 3-dehydrogenase” encoded by a gene comprising the nucleic acid sequence SEQ ID NO.: 5124 in Arabidopsis thaliana conferred an increased drought resistance by surviving longer than the wild type control without showing any symptoms of injury for a period between 2.5 and 5 days as shown in the Examples.

[0935] It was further observed that increasing or generating the activity of a gene product with the activity of a “L-threonine 3-dehydrogenase” encoded by a gene comprising the nucleic acid sequence SEQ ID NO.: 5124 in Arabidopsis thaliana conferred an increased biomass production compared with the wild type control without showing any symptoms of injury for a period between 1.1 and 5 days as shown in the Examples.

[0936] In particular, it was observed that increasing or generating the activity of a gene product with the activity of a “L-threonine 3-dehydrogenase” encoded by a gene comprising the nucleic acid sequence SEQ ID NO.: 5124 in Arabidopsis thaliana conferred an increased drought resistance by surviving longer than the wild type control without showing any symptoms of injury for a period between 2.8 and 5 days as shown in the Examples.

[0937] It was further observed that increasing or generating the activity of a gene product with the activity of a “L-threonine 3-dehydrogenase” encoded by a gene comprising the nucleic acid sequence SEQ ID NO.: 5124 in Arabidopsis thaliana conferred an increased biomass production compared with the wild type control without showing any symptoms of injury for a period between 1.3 and 3 days as shown in the Examples.

[0938] In particular, it was observed that increasing or generating the activity of a gene product with the activity of a “predicted hydrolase” encoded by a gene comprising the nucleic acid sequence SEQ ID NO.: 5417 in Arabidopsis thaliana conferred an increased drought resistance by surviving longer than the wild type control without showing any symptoms of injury for a period between 3 and 5 days as shown in the Examples. It was further observed that increasing or generating the activity of a gene product with the activity of a “predicted hydrolase” encoded by a gene comprising the nucleic acid sequence SEQ ID NO.: 5417 in Arabidopsis thaliana conferred an increased biomass production compared with the wild type control without showing any symptoms of injury for a period between 0.9 and 3 days as shown in the Examples.

[0939] In particular, it was observed that increasing or generating the activity of a gene product with the activity of a “predicted PTS enzymes (IIB component/IIC component)” encoded by a gene comprising the nucleic acid sequence SEQ ID NO.: 5495 in Arabidopsis thaliana conferred an increased drought resistance by surviving longer than the wild type control without showing any symptoms of injury for a period between 2.5 and 4 days as shown in the Examples.

[0940] It was further observed that increasing or generating the activity of a gene product with the activity of a “predicted PTS enzymes (IIB component/IIC component)” encoded by a gene comprising the nucleic acid sequence SEQ ID NO.: 5495 in Arabidopsis thaliana conferred an increased biomass production compared with the wild type control without showing any symptoms of injury for a period between 0.8 and 3 days as shown in the Examples.

[0941] In particular, it was observed that increasing or generating the activity of a gene product with the activity of a “ribonuclease activity regulator protein RraA” encoded by a gene comprising the nucleic acid sequence SEQ ID NO.: 5585 in Arabidopsis thaliana conferred an increased drought resistance by surviving longer than the wild type control without showing any symptoms of injury for a period between 2.3 and 4 days as shown in the Examples.

[0942] It was further observed that increasing or generating the activity of a gene product with the activity of a “ribonuclease activity regulator protein RraA” encoded by a gene comprising the nucleic acid sequence SEQ ID NO.: 5585 in Arabidopsis thaliana conferred an increased biomass production compared with the wild type control without showing any symptoms of injury for a period between 0.7 and 3 days as shown in the Examples.

[0943] In particular, it was observed that increasing or generating the activity of a gene product with the activity of a “transcriptional repressor protein MetJ” encoded by a gene comprising the nucleic acid sequence SEQ ID NO.: 5800 in Arabidopsis thaliana conferred an increased drought resistance by surviving longer than the wild type control without showing any symptoms of injury for a period between 2.3 and 3 days as shown in the Examples.

[0944] It was further observed that increasing or generating the activity of a gene product with the activity of a “transcriptional repressor protein MetJ” encoded by a gene comprising the nucleic acid sequence SEQ ID NO.: 5800 in Arabidopsis thaliana conferred an increased biomass production compared with the wild type control without showing any symptoms of injury for a period between 1.1 and 3 days as shown in the Examples.

[0945] In particular, it was observed that increasing or generating the activity of a gene product with the activity of a “pantothenate kinase” encoded by a gene comprising the nucleic acid sequence SEQ ID NO.: 5850 in Arabidopsis thaliana conferred an increased drought resistance by surviving longer than the wild type control without showing any symptoms of injury for a period between 2.9 and 5 days as shown in the Examples.

[0946] It was further observed that increasing or generating the activity of a gene product with the activity of a “pantothenate kinase” encoded by a gene comprising the nucleic acid sequence SEQ ID NO.: 5850 in Arabidopsis thaliana conferred an increased biomass production compared with the wild type control without showing any symptoms of injury for a period between 1.4 and 2 days as shown in the Examples.

[0947] In particular, it was observed that increasing or generating the activity of a gene product with the activity of a “heat shock protein” encoded by a gene comprising the nucleic acid sequence SEQ ID NO.: 5992 in Arabidopsis thaliana conferred an increased drought resistance by surviving longer than the wild type control without showing any symptoms of injury for a period between 2.8 and 5 days as shown in the Examples.

[0948] It was further observed that increasing or generating the activity of a gene product with the activity of a “heat shock protein” encoded by a gene comprising the nucleic acid sequence SEQ ID NO.: 5992 in Arabidopsis thaliana conferred an increased biomass production compared with the wild type control without showing any symptoms of injury for a period between 0.7 and 2 days as shown in the Examples.

[0949] In particular, it was observed that increasing or generating the activity of a gene product with the activity of a “predicted porin” encoded by a gene comprising the nucleic acid sequence SEQ ID NO.: 5999 in Arabidopsis thaliana conferred an increased drought resistance by surviving longer than the wild type control without showing any symptoms of injury for a period between 3.2 and 5 days as shown in the Examples.

[0950] It was further observed that increasing or generating the activity of a gene product with the activity of a “predicted porin” encoded by a gene comprising the nucleic acid sequence SEQ ID NO.: 5999 in Arabidopsis thaliana conferred an increased biomass production compared with the wild type control without showing any symptoms of injury for a period between 0.5 and 3 days as shown in the Examples.

[0951] In particular, it was observed that increasing or generating the activity of a gene product with the activity of a “aspartate ammonia-lyase” encoded by a gene comprising the nucleic acid sequence SEQ ID NO.: 6056 in Arabidopsis thaliana conferred an increased drought resistance by surviving longer than the wild type control without showing any symptoms of injury for a period between 3.1 and 5 days as shown in the Examples.

[0952] It was further observed that increasing or generating the activity of a gene product with the activity of a “aspartate ammonia-lyase” encoded by a gene comprising the nucleic acid sequence SEQ ID NO.: 6056 in Arabidopsis thaliana conferred an increased biomass production compared with the wild type control without showing any symptoms of injury for a period between 1.6 and 4 days as shown in the Examples.

[0953] In particular, it was observed that increasing or generating the activity of a gene product with the activity of a “nicotinamide-nucleotide adenylyltransferase” encoded by a gene comprising the nucleic acid sequence SEQ ID NO.: 6500 in Arabidopsis thaliana conferred an increased drought resistance by surviving longer than the wild type control without showing any symptoms of injury for a period between 3.5 and 6 days as shown in the Examples.

[0954] It was further observed that increasing or generating the activity of a gene product with the activity of a “nicotinamide-nucleotide adenylyltransferase” encoded by a gene comprising the nucleic acid sequence SEQ ID NO.: 6500 in Arabidopsis thaliana conferred an increased biomass production compared with the wild type control without showing any symptoms of injury for a period between 0.8 and 3 days as shown in the Examples.

[0955] In particular, it was observed that increasing or generating the activity of a gene product with the activity of a “polyphosphate kinase” encoded by a gene comprising the nucleic acid sequence SEQ ID NO.: 6542 in Arabidopsis thaliana conferred an increased drought resistance by surviving longer than the wild type control without showing any symptoms of injury for a period between 2.5 and 4 days as shown in the Examples.

[0956] It was further observed that increasing or generating the activity of a gene product with the activity of a “polyphosphate kinase” encoded by a gene comprising the nucleic acid sequence SEQ ID NO.: 6542 in Arabidopsis thaliana conferred an increased biomass production compared with the wild type control without showing any symptoms of injury for a period between 0.9 and 3 days as shown in the Examples.

[0957] In particular, it was observed that increasing or generating the activity of a gene product with the activity of a “Yal049c-protein” encoded by a gene comprising the nucleic acid sequence SEQ ID NO.: 6823 in Arabidopsis thaliana conferred an increased drought resistance by surviving longer than the wild type control without showing any symptoms of injury for a period between 3.5 and 5 days as shown in the Examples. It was further observed that increasing or generating the activity of a gene product with the activity of a “Ya1049c-protein” encoded by a gene comprising the nucleic acid sequence SEQ ID NO.: 6823 in Arabidopsis thaliana conferred an increased biomass production compared with the wild type control without showing any symptoms of injury for a period between 0.7 and 2 days as shown in the Examples.

[0958] In particular, it was observed that increasing or generating the activity of a gene product with the activity of a “YCR059C-protein” encoded by a gene comprising the nucleic acid sequence SEQ ID NO.: 6870 in Arabidopsis thaliana conferred an increased drought resistance by surviving longer than the wild type control without showing any symptoms of injury for a period between 3.5 and 5 days as shown in the Examples.

[0959] It was further observed that increasing or generating the activity of a gene product with the activity of a “YCR059C-protein” encoded by a gene comprising the nucleic acid sequence SEQ ID NO.: 6870 in Arabidopsis thaliana conferred an increased biomass production compared with the wild type control without showing any symptoms of injury for a period between 1 and 3 days as shown in the Examples.

[0960] In particular, it was observed that increasing or generating the activity of a gene product with the activity of a “3-deoxy-D-arabino-heptulosonate-7-phosphate (DAHP) synthase” encoded by a gene comprising the nucleic acid sequence SEQ ID NO.: 6910 in Arabidopsis thaliana conferred an increased drought resistance by surviving longer than the wild type control without showing any symptoms of injury for a period between 2.7 and 4 days as shown in the Examples.

[0961] It was further observed that increasing or generating the activity of a gene product with the activity of a “3-deoxy-D-arabino-heptulosonate-7-phosphate (DAHP) synthase” encoded by a gene comprising the nucleic acid sequence SEQ ID NO.: 6910 in Arabidopsis thaliana conferred an increased biomass production compared with the wild type control without showing any symptoms of injury for a period between 1.3 and 3 days as shown in the Examples.

[0962] In particular, it was observed that increasing or generating the activity of a gene product with the activity of a “YEL005C-protein” encoded by a gene comprising the nucleic acid sequence SEQ ID NO.: 7261 in Arabidopsis thaliana conferred an increased drought resistance by surviving longer than the wild type control without showing any symptoms of injury for a period between 3.6 and 6 days as shown in the Examples.

[0963] It was further observed that increasing or generating the activity of a gene product with the activity of a “YELOO5C-protein” encoded by a gene comprising the nucleic acid sequence SEQ ID NO.: 7261 in Arabidopsis thaliana conferred an increased biomass production compared with the wild type control without showing any symptoms of injury for a period between 1.1 and 4 days as shown in the Examples.

[0964] In particular, it was observed that increasing or generating the activity of a gene product with the activity of a “Lsm (Like Sm) protein” encoded by a gene comprising the nucleic acid sequence SEQ ID NO.: 7265 in Arabidopsis thaliana conferred an increased drought resistance by surviving longer than the wild type control without showing any symptoms of injury for a period between 3.1 and 4 days as shown in the Examples.

[0965] It was further observed that increasing or generating the activity of a gene product with the activity of a “Lsm (Like Sm) protein” encoded by a gene comprising the nucleic acid sequence SEQ ID NO.: 7265 in Arabidopsis thaliana conferred an increased biomass production compared with the wild type control without showing any symptoms of injury for a period between 0.8 and 2 days as shown in the Examples.

[0966] In particular, it was observed that increasing or generating the activity of a gene product with the activity of a “YER156C-protein” encoded by a gene comprising the nucleic acid sequence SEQ ID NO.: 7301 in Arabidopsis thaliana conferred an increased drought resistance by surviving longer than the wild type control without showing any symptoms of injury for a period between 2.2 and 4 days as shown in the Examples.

[0967] It was further observed that increasing or generating the activity of a gene product with the activity of a “YER156C-protein” encoded by a gene comprising the nucleic acid sequence SEQ ID NO.: 7301 in Arabidopsis thaliana conferred an increased biomass production compared with the wild type control without showing any symptoms of injury for a period between 0.1 and 0.1 days as shown in the Examples.

[0968] In particular, it was observed that increasing or generating the activity of a gene product with the activity of a “Checkpoint protein” encoded by a gene comprising the nucleic acid sequence SEQ ID NO.: 7384 in Arabidopsis thaliana conferred an increased drought resistance by surviving longer than the wild type control without showing any symptoms of injury for a period between 4.3 and 5 days as shown in the Examples.

[0969] It was further observed that increasing or generating the activity of a gene product with the activity of a “Checkpoint protein” encoded by a gene comprising the nucleic acid sequence SEQ ID NO.: 7384 in Arabidopsis thaliana conferred an increased biomass production compared with the wild type control without showing any symptoms of injury for a period between 0.2 and 1 days as shown in the Examples.

[0970] In particular, it was observed that increasing or generating the activity of a gene product with the activity of a “YGL045W-protein” encoded by a gene comprising the nucleic acid sequence SEQ ID NO.: 7407 in Arabidopsis thaliana conferred an increased drought resistance by surviving longer than the wild type control without showing any symptoms of injury for a period between 3.3 and 4 days as shown in the Examples.

[0971] It was further observed that increasing or generating the activity of a gene product with the activity of a “YGL045W-protein” encoded by a gene comprising the nucleic acid sequence SEQ ID NO.: 7407 in Arabidopsis thaliana conferred an increased biomass production compared with the wild type control without showing any symptoms of injury for a period between 1.2 and 4 days as shown in the Examples.

[0972] In particular, it was observed that increasing or generating the activity of a gene product with the activity of a “Protein component of the small (40S) ribosomal subunit” encoded by a gene comprising the nucleic acid sequence SEQ ID NO.: 7429 in Arabidopsis thaliana conferred an increased drought resistance by surviving longer than the wild type control without showing any symptoms of injury for a period between 2.3 and 4 days as shown in the Examples.

[0973] It was further observed that increasing or generating the activity of a gene product with the activity of a “Protein component of the small (40S) ribosomal subunit” encoded by a gene comprising the nucleic acid sequence SEQ ID NO.: 7429 in Arabidopsis thaliana conferred an increased biomass production compared with the wild type control without showing any symptoms of injury for a period between 0.1 and 0.1 days as shown in the Examples.

[0974] In particular, it was observed that increasing or generating the activity of a gene product with the activity of a “Dihydrouridine synthase” encoded by a gene comprising the nucleic acid sequence SEQ ID NO.: 7558 in Arabidopsis thaliana conferred an increased drought resistance by surviving longer than the wild type control without showing any symptoms of injury for a period between 4.5 and 7 days as shown in the Examples.

[0975] It was further observed that increasing or generating the activity of a gene product with the activity of a “Dihydrouridine synthase” encoded by a gene comprising the nucleic acid sequence SEQ ID NO.: 7558 in Arabidopsis thaliana conferred an increased biomass production compared with the wild type control without showing any symptoms of injury for a period between 0.1 and 0.1 days as shown in the Examples.

[0976] In particular, it was observed that increasing or generating the activity of a gene product with the activity of a “YOR024w-protein” encoded by a gene comprising the nucleic acid sequence SEQ ID NO.: 7606 in Arabidopsis thaliana conferred an increased drought resistance by surviving longer than the wild type control without showing any symptoms of injury for a period between 4.8 and 5 days as shown in the Examples.

[0977] It was further observed that increasing or generating the activity of a gene product with the activity of a “YOR024w-protein” encoded by a gene comprising the nucleic acid sequence SEQ ID NO.: 7606 in Arabidopsis thaliana conferred an increased biomass production compared with the wild type control without showing any symptoms of injury for a period between 0.6 and 3 days as shown in the Examples.

[0978] In particular, it was observed that increasing or generating the activity of a gene product with the activity of a “Glutamine tRNA synthetase” encoded by a gene comprising the nucleic acid sequence SEQ ID NO.: 7610 in Arabidopsis thaliana conferred an increased drought resistance by surviving longer than the wild type control without showing any symptoms of injury for a period between 3.1 and 5 days as shown in the Examples.

[0979] It was further observed that increasing or generating the activity of a gene product with the activity of a “Glutamine tRNA synthetase” encoded by a gene comprising the nucleic acid sequence SEQ ID NO.: 7610 in Arabidopsis thaliana conferred an increased biomass production compared with the wild type control without showing any symptoms of injury for a period between 0.6 and 2 days as shown in the Examples.

[0980] In particular, it was observed that increasing or generating the activity of a gene product with the activity of a “Splicing factor” encoded by a gene comprising the nucleic acid sequence SEQ ID NO.: 7685 in Arabidopsis thaliana conferred an increased drought resistance by surviving longer than the wild type control without showing any symptoms of injury for a period between 3.9 and 5 days as shown in the Examples.

[0981] It was further observed that increasing or generating the activity of a gene product with the activity of a “Splicing factor” encoded by a gene comprising the nucleic acid sequence SEQ ID NO.: 7685 in Arabidopsis thaliana conferred an increased biomass production compared with the wild type control without showing any symptoms of injury for a period between 0.1 and 0.1 days as shown in the Examples.

[0982] In particular, it was observed that increasing or generating the activity of a gene product with the activity of a “gamma-Glu-putrescine synthase” encoded by a gene comprising the nucleic acid sequence SEQ ID NO.: 1201 in Arabidopsis thaliana conferred an increased drought resistance by surviving longer than the wild type control without showing any symptoms of injury for a period between 2.1 and 3 days as shown in the Examples.

[0983] It was further observed that increasing or generating the activity of a gene product with the activity of a “gamma-Glu-putrescine synthase” encoded by a gene comprising the nucleic acid sequence SEQ ID NO.: 1201 in Arabidopsis thaliana conferred an increased biomass production compared with the wild type control without showing any symptoms of injury for a period between 1.1 and 2 days as shown in the Examples.

[0984] In particular, it was observed that increasing or generating the activity of a gene product with the activity of a “inner membrane protein” encoded by a gene comprising the nucleic acid sequence SEQ ID NO.: 7741 in Arabidopsis thaliana conferred an increased drought resistance by surviving longer than the wild type control without showing any symptoms of injury for a period between 3.2 and 5 days as shown in the Examples.

[0985] It was further observed that increasing or generating the activity of a gene product with the activity of a “inner membrane protein” encoded by a gene comprising the nucleic acid sequence SEQ ID NO.: 7741 in Arabidopsis thaliana conferred an increased biomass production compared with the wild type control without showing any symptoms of injury for a period between 0.2 and 2 days as shown in the Examples.

[0986] In particular, it was observed that increasing or generating the activity of a gene product with the activity of a “heat shock protein HtpX” encoded by a gene comprising the nucleic acid sequence SEQ ID NO.: 7850 in Arabidopsis thaliana conferred an increased drought resistance by surviving longer than the wild type control without showing any symptoms of injury for a period between 2.4 and 6 days as shown in the Examples.

[0987] It was further observed that increasing or generating the activity of a gene product with the activity of a “heat shock protein HtpX” encoded by a gene comprising the nucleic acid sequence SEQ ID NO.: 7850 in Arabidopsis thaliana conferred an increased biomass production compared with the wild type control without showing any symptoms of injury for a period between 1 and 3 days as shown in the Examples.

[0988] In particular, it was observed that increasing or generating the activity of a gene product with the activity of a “DNA-binding transcriptional dual regulator protein” encoded by a gene comprising the nucleic acid sequence SEQ ID NO.: 7971 in Arabidopsis thaliana conferred an increased drought resistance by surviving longer than the wild type control without showing any symptoms of injury for a period between 3.9 and 5 days as shown in the Examples.

[0989] It was further observed that increasing or generating the activity of a gene product with the activity of a “DNA-binding transcriptional dual regulator protein” encoded by a gene comprising the nucleic acid sequence SEQ ID NO.: 7971 in Arabidopsis thaliana conferred an increased biomass production compared with the wild type control without showing any symptoms of injury for a period between 0.4 and 2 days as shown in the Examples.

[0990] In particular, it was observed that increasing or generating the activity of a gene product with the activity of a “predicted serine transporter protein” encoded by a gene comprising the nucleic acid sequence SEQ ID NO.: 8021 in Arabidopsis thaliana conferred an increased drought resistance by surviving longer than the wild type control without showing any symptoms of injury for a period between 2.9 and 5 days as shown in the Examples.

[0991] It was further observed that increasing or generating the activity of a gene product with the activity of a “predicted serine transporter protein” encoded by a gene comprising the nucleic acid sequence SEQ ID NO.: 8021 in Arabidopsis thaliana conferred an increased biomass production compared with the wild type control without showing any symptoms of injury for a period between 0.7 and 4 days as shown in the Examples.

[0992] In particular, it was observed that increasing or generating the activity of a gene product with the activity of a “glutathione-dependent oxidoreductase” encoded by a gene comprising the nucleic acid sequence SEQ ID NO.: 8177 in Arabidopsis thaliana conferred an increased drought resistance by surviving longer than the wild type control without showing any symptoms of injury for a period between 4.5 and 5 days as shown in the Examples.

[0993] It was further observed that increasing or generating the activity of a gene product with the activity of a “glutathione-dependent oxidoreductase” encoded by a gene comprising the nucleic acid sequence SEQ ID NO.: 8177 in Arabidopsis thaliana conferred an increased biomass production compared with the wild type control without showing any symptoms of injury for a period between 0.1 and 0.1 days as shown in the Examples.

[0994] In particular, it was observed that increasing or generating the activity of a gene product with the activity of a “Yfr042w-protein” encoded by a gene comprising the nucleic acid sequence SEQ ID NO.: 8272 in Arabidopsis thaliana conferred an increased drought resistance by surviving longer than the wild type control without showing any symptoms of injury for a period between 3.7 and 5 days as shown in the Examples.

[0995] It was further observed that increasing or generating the activity of a gene product with the activity of a “Yfr042w-protein” encoded by a gene comprising the nucleic acid sequence SEQ ID NO.: 8272 in Arabidopsis thaliana conferred an increased biomass production compared with the wild type control without showing any symptoms of injury for a period between 1 and 4 days as shown in the Examples.

[0996] In particular, it was observed that increasing or generating the activity of a gene product with the activity of a “Protein component of the small (40S) ribosomal subunit” encoded by a gene comprising the nucleic acid sequence SEQ ID NO.: 8288 in Arabidopsis thaliana conferred an increased drought resistance by surviving longer than the wild type control without showing any symptoms of injury for a period between 3.3 and 5 days as shown in the Examples.

[0997] It was further observed that increasing or generating the activity of a gene product with the activity of a “Protein component of the small (40S) ribosomal subunit” encoded by a gene comprising the nucleic acid sequence SEQ ID NO.: 8288 in Arabidopsis thaliana conferred an increased biomass production compared with the wild type control without showing any symptoms of injury for a period between 1.9 and 4 days as shown in the Examples.

[0998] In particular, it was observed that increasing or generating the activity of a gene product with the activity of a “transcriptional regulator protein” encoded by a gene comprising the nucleic acid sequence SEQ ID NO.: 8438 in Arabidopsis thaliana conferred an increased drought resistance by surviving longer than the wild type control without showing any symptoms of injury for a period between 2.8 and 5 days as shown in the Examples.

[0999] It was further observed that increasing or generating the activity of a gene product with the activity of a “transcriptional regulator protein” encoded by a gene comprising the nucleic acid sequence SEQ ID NO.: 8438 in Arabidopsis thaliana conferred an increased biomass production compared with the wild type control without showing any symptoms of injury for a period between 0.8 and 4 days as shown in the Examples.

[1000] In particular, it was observed that increasing or generating the activity of a gene product with the activity of a “predicted oxidoreductase (flavin:NADH component)” encoded by a gene comprising the nucleic acid sequence SEQ ID NO.: 8630 in Arabidopsis thaliana conferred an increased drought resistance by surviving longer than the wild type control without showing any symptoms of injury for a period between 3.3 and 6 days as shown in the Examples.

[1001] It was further observed that increasing or generating the activity of a gene product with the activity of a “predicted oxidoreductase (flavin:NADH component)” encoded by a gene comprising the nucleic acid sequence SEQ ID NO.: 8630 in Arabidopsis thaliana conferred an increased biomass production compared with the wild type control without showing any symptoms of injury for a period between 0.6 and 2 days as shown in the Examples.

[1002] In particular, it was observed that increasing or generating the activity of a gene product with the activity of a “cellobiose/arbutin/salicin-specific PTS enzyme (IIB component/IC component)” encoded by a gene comprising the nucleic acid sequence SEQ ID NO.: 9268 in Arabidopsis thaliana conferred an increased drought resistance by surviving longer than the wild type control without showing any symptoms of injury for a period between 4 and 5 days as shown in the Examples.

[1003] It was further observed that increasing or generating the activity of a gene product with the activity of a “cellobiose/arbutin/salicin-specific PTS enzyme (IIB component/IC component)” encoded by a gene comprising the nucleic acid sequence SEQ ID NO.: 9268 in Arabidopsis thaliana conferred an increased biomass production compared with the wild type control without showing any symptoms of injury for a period between 0.4 and 2 days as shown in the Examples.

[1004] In particular, it was observed that increasing or generating the activity of a gene product with the activity of a “predicted PTS enzymes (IIB component/IIC component)” encoded by a gene comprising the nucleic acid sequence SEQ ID NO.: 9444 in Arabidopsis thaliana conferred an increased drought resistance by surviving longer than the wild type control without showing any symptoms of injury for a period between 2.5 and 4 days as shown in the Examples.

[1005] It was further observed that increasing or generating the activity of a gene product with the activity of a “predicted PTS enzymes (IIB component/IIC component)” encoded by a gene comprising the nucleic acid sequence SEQ ID NO.: 9444 in Arabidopsis thaliana conferred an increased biomass production compared with the wild type control without showing any symptoms of injury for a period between 0.8 and 3 days as shown in the Examples.

[1006] In particular, it was observed that increasing or generating the activity of a gene product with the activity of a “nicotinamide-nucleotide adenylyltransferase” encoded by a gene comprising the nucleic acid sequence SEQ ID NO.: 9824 in Arabidopsis thaliana conferred an increased drought resistance by surviving longer than the wild type control without showing any symptoms of injury for a period between 3.5 and 6 days as shown in the Examples.

[1007] It was further observed that increasing or generating the activity of a gene product with the activity of a “nicotinamide-nucleotide adenylyltransferase” encoded by a gene comprising the nucleic acid sequence SEQ ID NO.: 9824 in Arabidopsis thaliana conferred an increased biomass production compared with the wild type control without showing any symptoms of injury for a period between 0.8 and 3 days as shown in the Examples.

[1008] In particular, it was observed that increasing or generating the activity of a gene product with the activity of a “YGL045W-protein” encoded by a gene comprising the nucleic acid sequence SEQ ID NO.: 9905 in Arabidopsis thaliana conferred an increased drought resistance by surviving longer than the wild type control without showing any symptoms of injury for a period between 3.3 and 4 days as shown in the Examples.

[1009] It was further observed that increasing or generating the activity of a gene product with the activity of a “YGL045W-protein” encoded by a gene comprising the nucleic acid sequence SEQ ID NO.: 9905 in Arabidopsis thaliana conferred an increased biomass production compared with the wild type control without showing any symptoms of injury for a period between 1.2 and 4 days as shown in the Examples.

[1010] In particular, it was observed that increasing or generating the activity of a gene product with the activity of a “DNA-binding transcriptional dual regulator protein” encoded by a gene comprising the nucleic acid sequence SEQ ID NO.: 9193 in Arabidopsis thaliana conferred an increased drought resistance by surviving longer than the wild type control without showing any symptoms of injury for a period between 3.9 and 5 days as shown in the Examples.

[1011] It was further observed that increasing or generating the activity of a gene product with the activity of a “DNA-binding transcriptional dual regulator protein” encoded by a gene comprising the nucleic acid sequence SEQ ID NO.: 9193 in Arabidopsis thaliana conferred an increased biomass production compared with the wild type control without showing any symptoms of injury for a period between 0.4 and 2 days as shown in the Examples.

[1012] In particular, it was observed that increasing or generating the activity of a gene product with the activity of a “methylglyoxal synthase” encoded by a gene comprising the nucleic acid sequence SEQ ID NO.: 8497 in Arabidopsis thaliana conferred an increased drought resistance by surviving longer than the wild type control without showing any symptoms of injury for a period between 4.4 and 5 days as shown in the Examples.

[1013] It was further observed that increasing or generating the activity of a gene product with the activity of a “methylglyoxal synthase” encoded by a gene comprising the nucleic acid sequence SEQ ID NO.: 8497 in Arabidopsis thaliana conferred an increased biomass production compared with the wild type control without showing any symptoms of injury for a period between 0.5 and 2 days as shown in the Examples.

[1014] In particular, it was observed that increasing or generating the activity of a gene product with the activity of a “gamma-Glu-putrescine synthase” encoded by a gene comprising the nucleic acid sequence SEQ ID NO.: 8742 in Arabidopsis thaliana conferred an increased drought resistance by surviving longer than the wild type control without showing any symptoms of injury for a period between 2.1 and 3 days as shown in the Examples.

[1015] It was further observed that increasing or generating the activity of a gene product with the activity of a “gamma-Glu-putrescine synthase” encoded by a gene comprising the nucleic acid sequence SEQ ID NO.: 8742 in Arabidopsis thaliana conferred an increased biomass production compared with the wild type control without showing any symptoms of injury for a period between 1.1 and 2 days as shown in the Examples.

[1016] In particular, it was observed that increasing or generating the activity of a gene product with the activity of a “acid shock protein precursor” encoded by a gene comprising the nucleic acid sequence SEQ ID NO.: 8891 in Arabidopsis thaliana conferred an increased drought resistance by surviving longer than the wild type control without showing any symptoms of injury for a period between 3.7 and 5 days as shown in the Examples.

[1017] It was further observed that increasing or generating the activity of a gene product with the activity of a “acid shock protein precursor” encoded by a gene comprising the nucleic acid sequence SEQ ID NO.: 8891 in Arabidopsis thaliana conferred an increased biomass production compared with the wild type control without showing any symptoms of injury for a period between 0.1 and 1 days as shown in the Examples.

[1018] In particular, it was observed that increasing or generating the activity of a gene product with the activity of a “regulator of length of 0-antigen component of lipopolysaccharide chains ” encoded by a gene comprising the nucleic acid sequence SEQ ID NO.: 9031 in Arabidopsis thaliana conferred an increased drought resistance by surviving longer than the wild type control without showing any symptoms of injury for a period between 2.6 and 4 days as shown in the Examples.

[1019] It was further observed that increasing or generating the activity of a gene product with the activity of a “regulator of length of O-antigen component of lipopolysaccharide chains” encoded by a gene comprising the nucleic acid sequence SEQ ID NO.: 9031 in Arabidopsis thaliana conferred an increased biomass production compared with the wild type control without showing any symptoms of injury for a period between 0.3 and 2 days as shown in the Examples.

[1020] In particular, it was observed that increasing or generating the activity of a gene product with the activity of a “ornithine decarboxylase” encoded by a gene comprising the nucleic acid sequence SEQ ID NO.: 9315 in Arabidopsis thaliana conferred an increased drought resistance by surviving longer than the wild type control without showing any symptoms of injury for a period between 3.8 and 5 days as shown in the Examples.

[1021] It was further observed that increasing or generating the activity of a gene product with the activity of a “ornithine decarboxylase” encoded by a gene comprising the nucleic acid sequence SEQ ID NO.: 9315 in Arabidopsis thaliana conferred an increased biomass production compared with the wild type control without showing any symptoms of injury for a period between 0.7 and 3 days as shown in the Examples.

[1022] In particular, it was observed that increasing or generating the activity of a gene product with the activity of a “aspartate ammonia-lyase ” encoded by a gene comprising the nucleic acid sequence SEQ ID NO.: 9529 in Arabidopsis thaliana conferred an increased drought resistance by surviving longer than the wild type control without showing any symptoms of injury for a period between 3.1 and 5 days as shown in the Examples.

[1023] It was further observed that increasing or generating the activity of a gene product with the activity of a “aspartate ammonia-lyase ” encoded by a gene comprising the nucleic acid sequence SEQ ID NO.: 9529 in Arabidopsis thaliana conferred an increased biomass production compared with the wild type control without showing any symptoms of injury for a period between 1.6 and 4 days as shown in the Examples.

[1024] In particular, it was observed that increasing or generating the activity of a gene product with the activity of a “predicted transporter protein” encoded by a gene comprising the nucleic acid sequence SEQ ID NO.: 8462 in Arabidopsis thaliana conferred an increased drought resistance by surviving longer than the wild type control without showing any symptoms of injury for a period between 2.2 and 5 days as shown in the Examples.

[1025] It was further observed that increasing or generating the activity of a gene product with the activity of a “predicted transporter protein” encoded by a gene comprising the nucleic acid sequence SEQ ID NO.: 8462 in Arabidopsis thaliana conferred an increased biomass production compared with the wild type control without showing any symptoms of injury for a period between 1 and 4 days as shown in the Examples.

[1026] In particular, it was observed that increasing or generating the activity of a gene product with the activity of a “L-arabinose transporter subunit” encoded by a gene comprising the nucleic acid sequence SEQ ID NO.: 8973 in Arabidopsis thaliana conferred an increased drought resistance by surviving longer than the wild type control without showing any symptoms of injury for a period between 2.8 and 4 days as shown in the Examples.

[1027] It was further observed that increasing or generating the activity of a gene product with the activity of a “L-arabinose transporter subunit” encoded by a gene comprising the nucleic acid sequence SEQ ID NO.: 8973 in Arabidopsis thaliana conferred an increased biomass production compared with the wild type control without showing any symptoms of injury for a period between 1.8 and 3 days as shown in the Examples.

[1028] In particular, it was observed that increasing or generating the activity of a gene product with the activity of a “Lsm (Like Sm) protein” encoded by a gene comprising the nucleic acid sequence SEQ ID NO.: 9883 in Arabidopsis thaliana conferred an increased drought resistance by surviving longer than the wild type control without showing any symptoms of injury for a period between 3.1 and 4 days as shown in the Examples.

[1029] It was further observed that increasing or generating the activity of a gene product with the activity of a “Lsm (Like Sm) protein” encoded by a gene comprising the nucleic acid sequence SEQ ID NO.: 9883 in Arabidopsis thaliana conferred an increased biomass production compared with the wild type control without showing any symptoms of injury for a period between 0.8 and 2 days as shown in the Examples.

[1030] In particular, it was observed that increasing or generating the activity of a gene product with the activity of a “neutral amino-acid efflux system” encoded by a gene comprising the nucleic acid sequence SEQ ID NO.: 8934 in Arabidopsis thaliana conferred an increased drought resistance by surviving longer than the wild type control without showing any symptoms of injury for a period between 3.4 and 5 days as shown in the Examples.

[1031] It was further observed that increasing or generating the activity of a gene product with the activity of a “neutral amino-acid efflux system” encoded by a gene comprising the nucleic acid sequence SEQ ID NO.: 8934 in Arabidopsis thaliana conferred an increased biomass production compared with the wild type control without showing any symptoms of injury for a period between 1 and 4 days as shown in the Examples.

[1032] In particular, it was observed that increasing or generating the activity of a gene product with the activity of a “b2226-protein” encoded by a gene comprising the nucleic acid sequence SEQ ID NO.: 9093 in Arabidopsis thaliana conferred an increased drought resistance by surviving longer than the wild type control without showing any symptoms of injury for a period between 2.9 and 4 days as shown in the Examples.

[1033] It was further observed that increasing or generating the activity of a gene product with the activity of a “b2226-protein” encoded by a gene comprising the nucleic acid sequence SEQ ID NO.: 9093 in Arabidopsis thaliana conferred an increased biomass production compared with the wild type control without showing any symptoms of injury for a period between 1.6 and 4 days as shown in the Examples. In particular, it was observed that increasing or generating the activity of a gene product with the activity of a “sensory histidine kinase in two-component regulatory system with NarP (NarL)” encoded by a gene comprising the nucleic acid sequence SEQ ID NO.: 9109 in Arabidopsis thaliana conferred an increased drought resistance by surviving longer than the wild type control without showing any symptoms of injury for a period between 2.2 and 5 days as shown in the Examples.

[1034] It was further observed that increasing or generating the activity of a gene product with the activity of a “sensory histidine kinase in two-component regulatory system with NarP (NarL)” encoded by a gene comprising the nucleic acid sequence SEQ ID NO.: 9109 in Arabidopsis thaliana conferred an increased biomass production compared with the wild type control without showing any symptoms of injury for a period between 0.9 and 3 days as shown in the Examples.

[1035] In particular, it was observed that increasing or generating the activity of a gene product with the activity of a “Glutamine tRNA synthetase” encoded by a gene comprising the nucleic acid sequence SEQ ID NO.: 9931 in Arabidopsis thaliana conferred an increased drought resistance by surviving longer than the wild type control without showing any symptoms of injury for a period between 3.1 and 5 days as shown in the Examples.

[1036] It was further observed that increasing or generating the activity of a gene product with the activity of a “Glutamine tRNA synthetase” encoded by a gene comprising the nucleic acid sequence SEQ ID NO.: 9931 in Arabidopsis thaliana conferred an increased biomass production compared with the wild type control without showing any symptoms of injury for a period between 0.6 and 2 days as shown in the Examples.

[1037] In particular, it was observed that increasing or generating the activity of a gene product with the activity of a “gluconate transporter” encoded by a gene comprising the nucleic acid sequence SEQ ID NO.: 10096 in Arabidopsis thaliana conferred an increased drought resistance by surviving longer than the wild type control without showing any symptoms of injury for a period between 2.5 and 4 days as shown in the Examples.

[1038] It was further observed that increasing or generating the activity of a gene product with the activity of a “gluconate transporter” encoded by a gene comprising the nucleic acid sequence SEQ ID NO.: 10096 in Arabidopsis thaliana conferred an increased biomass production compared with the wild type control without showing any symptoms of injury for a period between 0.8 and 3 days as shown in the Examples.

[1039] In particular, it was observed that increasing or generating the activity of a gene product with the activity of a “glutathione-dependent oxidoreductase” encoded by a gene comprising the nucleic acid sequence SEQ ID NO.: 8177 in Arabidopsis thaliana conferred an increased cold resistance by an increased biomass production compared with the wild type control of 38% to 45% as shown in the Examples.

[1040] In particular, it was observed that increasing or generating the activity of a gene product with the activity of a “glutathione-dependent oxidoreductase” encoded by a gene comprising the nucleic acid sequence SEQ ID NO.: 8177 in Arabidopsis thaliana conferred an increased resistance to cycling drought by an increased biomass production compared with the wild type control of 21% to 27% as shown in the Examples.

[1041] In particular, it was observed that increasing or generating the activity of a gene product with the activity of a “glutathione-dependent oxidoreductase” encoded by a gene comprising the nucleic acid sequence SEQ ID NO.: 8177 in Arabidopsis thaliana conferred an increased biomass production compared with the wild type control of 41% to 45% as shown in the Examples.

[1042] In particular, it was observed that increasing or generating the activity of a gene product with the activity of a “glutathione-dependent oxidoreductase” encoded by a gene comprising the nucleic acid sequence SEQ ID NO.: 8177 in Arabidopsis thaliana conferred an increased resistance to limited nitrogen availability by enhanced NUE by an increased biomass production compared with the wild type control of 30% to 60% as shown in the Examples.

[1043] Thus, according to the method of the invention for an increased tolerance and/or resistance to environmental stress and increased biomass production in a plant cell, plant or a part thereof compared to a control or wild type can be achieved.

[1044] Accordingly, in one embodiment, in case the activity of a polypeptide according to the polypeptide SEQ ID NO.: 39,or encoded by a nucleic acid molecule comprising the nucleic acid SEQ ID NO.: 38 or a homolog of said nucleic acid molecule or polypeptide, e.g. if the activity of a nucleic acid molecule or a polypeptide comprising the nucleic acid or polypeptide or the consensus sequence or the polypeptide motif, as depicted in Table I, II or IV, column 7 in the respective same line as the nucleic acid molecule SEQ ID NO.: 38 or polypeptide SEQ ID NO.: 39, respectively is increased or generated or if the activity “b0081-protein” is increased or generated in an organism, preferably an increased drought resistance by surviving longer than the wild type control without showing any symptoms of injury for a period between 3.4 and 6 days or more and

[1045] an increased biomass production compared with the wild type control without showing any symptoms of injury for a period between 1.1 and 3 days is conferred in said organism.

[1046] Accordingly, in one embodiment, in case the activity of a polypeptide according to the polypeptide SEQ ID NO.: 55,or encoded by a nucleic acid molecule comprising the nucleic acid SEQ ID NO.: 54 or a homolog of said nucleic acid molecule or polypeptide, e.g. if the activity of a nucleic acid molecule or a polypeptide comprising the nucleic acid or polypeptide or the consensus sequence or the polypeptide motif, as depicted in Table I, II or IV, column 7 in the respective same line as the nucleic acid molecule SEQ ID NO.: 54 or polypeptide SEQ ID NO.: 55, respectively is increased or generated or if the activity “transporter subunit/periplasmic-binding component of ABC superfamily” is increased or generated in an organism, preferably an increased drought resistance by surviving longer than the wild type control without showing any symptoms of injury for a period between 3 and 5 days or more and

[1047] an increased biomass production compared with the wild type control without showing any symptoms of injury for a period between 0.9 and 4 days

[1048] is conferred in said organism.

[1049] Accordingly, in one embodiment, in case the activity of a polypeptide according to the polypeptide SEQ ID NO.: 71,or encoded by a nucleic acid molecule comprising the nucleic acid SEQ ID NO.: 70 or a homolog of said nucleic acid molecule or polypeptide, e.g. if the activity of a nucleic acid molecule or a polypeptide comprising the nucleic acid or polypeptide or the consensus sequence or the polypeptide motif, as depicted in Table I, II or IV, column 7 in the respective same line as the nucleic acid molecule SEQ ID NO.: 70 or polypeptide SEQ ID NO.: 71, respectively is increased or generated or if the activity “b0482-protein” is increased or generated in an organism, preferably an increased drought resistance by surviving longer than the wild type control without showing any symptoms of injury for a period between 2.8 and 5 days or more and an increased biomass production compared with the wild type control without showing any symptoms of injury for a period between 0.6 and 3 days is conferred in said organism.

[1050] Accordingly, in one embodiment, in case the activity of a polypeptide according to the polypeptide SEQ ID NO.: 90,or encoded by a nucleic acid molecule comprising the nucleic acid SEQ ID NO.: 89 or a homolog of said nucleic acid molecule or polypeptide, e.g. if the activity of a nucleic acid molecule or a polypeptide comprising the nucleic acid or polypeptide or the consensus sequence or the polypeptide motif, as depicted in Table I, II or IV, column 7 in the respective same line as the nucleic acid molecule SEQ ID NO.: 89 or polypeptide SEQ ID NO.: 90, respectively is increased or generated or if the activity “universal stress protein UP12” is increased or generated in an organism, preferably

[1051] an increased drought resistance by surviving longer than the wild type control without showing any symptoms of injury for a period between 2.9 and 5 days or more and

[1052] an increased biomass production compared with the wild type control without showing any symptoms of injury for a period between 0.9 and 4 days is conferred in said organism.

[1053] Accordingly, in one embodiment, in case the activity of a polypeptide according to the polypeptide SEQ ID NO.: 144,or encoded by a nucleic acid molecule comprising the nucleic acid SEQ ID NO.: 143 or a homolog of said nucleic acid molecule or polypeptide, e.g. if the activity of a nucleic acid molecule or a polypeptide comprising the nucleic acid or polypeptide or the consensus sequence or the polypeptide motif, as depicted in Table I, II or IV, column 7 in the respective same line as the nucleic acid molecule SEQ ID NO.: 143 or polypeptide SEQ ID NO.: 144, respectively is increased or generated or if the activity “transcriptional regulator protein” is increased or generated in an organism, preferably

[1054] an increased drought resistance by surviving longer than the wild type control without showing any symptoms of injury for a period between 2.8 and 5 days or more and

[1055] an increased biomass production compared with the wild type control without showing any symptoms of injury for a period between 0.8 and 4 days is conferred in said organism.

[1056] Accordingly, in one embodiment, in case the activity of a polypeptide according to the polypeptide SEQ ID NO.: 163,or encoded by a nucleic acid molecule comprising the nucleic acid SEQ ID NO.: 162 or a homolog of said nucleic acid molecule or polypeptide, e.g. if the activity of a nucleic acid molecule or a polypeptide comprising the nucleic acid or polypeptide or the consensus sequence or the polypeptide motif, as depicted in Table I, II or IV, column 7 in the respective same line as the nucleic acid molecule SEQ ID NO.: 162 or polypeptide SEQ ID NO.: 163, respectively is increased or generated or if the activity “b0631-protein” is increased or generated in an organism, preferably

[1057] an increased drought resistance by surviving longer than the wild type control without showing any symptoms of injury for a period between 3.4 and 6 days or more and

[1058] an increased biomass production compared with the wild type control without showing any symptoms of injury for a period between 1.2 and 5 days is conferred in said organism.

[1059] Accordingly, in one embodiment, in case the activity of a polypeptide according to the polypeptide SEQ ID NO.: 214,or encoded by a nucleic acid molecule comprising the nucleic acid SEQ ID NO.: 213 or a homolog of said nucleic acid molecule or polypeptide, e.g. if the activity of a nucleic acid molecule or a polypeptide comprising the nucleic acid or polypeptide or the consensus sequence or the polypeptide motif, as depicted in Table I, II or IV, column 7 in the respective same line as the nucleic acid molecule SEQ ID NO.: 213 or polypeptide SEQ ID NO.: 214, respectively is increased or generated or if the activity “potassium-transporting ATPase (subunit B)” is increased or generated in an organism, preferably

[1060] an increased drought resistance by surviving longer than the wild type control without showing any symptoms of injury for a period between 2.1 and 3 days or more and

[1061] an increased biomass production compared with the wild type control without showing any symptoms of injury for a period between 1.8 and 3 days is conferred in said organism.

[1062] Accordingly, in one embodiment, in case the activity of a polypeptide according to the polypeptide SEQ ID NO.: 359,or encoded by a nucleic acid molecule comprising the nucleic acid SEQ ID NO.: 358 or a homolog of said nucleic acid molecule or polypeptide, e.g. if the activity of a nucleic acid molecule or a polypeptide comprising the nucleic acid or polypeptide or the consensus sequence or the polypeptide motif, as depicted in Table I, II or IV, column 7 in the respective same line as the nucleic acid molecule SEQ ID NO.: 358 or polypeptide SEQ ID NO.: 359, respectively is increased or generated or if the activity “b0753-protein” is increased or generated in an organism, preferably

[1063] an increased drought resistance by surviving longer than the wild type control without showing any symptoms of injury for a period between 3.3 and 5 days or more and

[1064] an increased biomass production compared with the wild type control without showing any symptoms of injury for a period between 1.6 and 4 days is conferred in said organism.

[1065] Accordingly, in one embodiment, in case the activity of a polypeptide according to the polypeptide SEQ ID NO.: 368,or encoded by a nucleic acid molecule comprising the nucleic acid SEQ ID NO.: 367 or a homolog of said nucleic acid molecule or polypeptide, e.g. if the activity of a nucleic acid molecule or a polypeptide comprising the nucleic acid or polypeptide or the consensus sequence or the polypeptide motif, as depicted in Table I, II or IV, column 7 in the respective same line as the nucleic acid molecule SEQ ID NO.: 367 or polypeptide SEQ ID NO.: 368, respectively is increased or generated or if the activity “threonine and homoserine efflux system” is increased or generated in an organism, preferably

[1066] an increased drought resistance by surviving longer than the wild type control without showing any symptoms of injury for a period between 3 and 5 days or more and

[1067] an increased biomass production compared with the wild type control without showing any symptoms of injury for a period between 1.5 and 3 days is conferred in said organism.

[1068] Accordingly, in one embodiment, in case the activity of a polypeptide according to the polypeptide SEQ ID NO.: 421,or encoded by a nucleic acid molecule comprising the nucleic acid SEQ ID NO.: 420 or a homolog of said nucleic acid molecule or polypeptide, e.g. if the activity of a nucleic acid molecule or a polypeptide comprising the nucleic acid or polypeptide or the consensus sequence or the polypeptide motif, as depicted in Table I, II or IV, column 7 in the respective same line as the nucleic acid molecule SEQ ID NO.: 420 or polypeptide SEQ ID NO.: 421, respectively is increased or generated or if the activity “predicted transporter protein” is increased or generated in an organism, preferably

[1069] an increased drought resistance by surviving longer than the wild type control without showing any symptoms of injury for a period between 2.2 and 5 days or more and

[1070] an increased biomass production compared with the wild type control without showing any symptoms of injury for a period between 1 and 4 days is conferred in said organism.

[1071] Accordingly, in one embodiment, in case the activity of a polypeptide according to the polypeptide SEQ ID NO.: 456,or encoded by a nucleic acid molecule comprising the nucleic acid SEQ ID NO.: 455 or a homolog of said nucleic acid molecule or polypeptide, e.g. if the activity of a nucleic acid molecule or a polypeptide comprising the nucleic acid or polypeptide or the consensus sequence or the polypeptide motif, as depicted in Table I, II or IV, column 7 in the respective same line as the nucleic acid molecule SEQ ID NO.: 455 or polypeptide SEQ ID NO.: 456, respectively is increased or generated or if the activity “b0866-protein” is increased or generated in an organism, preferably

[1072] an increased drought resistance by surviving longer than the wild type control without showing any symptoms of injury for a period between 3 and 5 days or more and

[1073] an increased biomass production compared with the wild type control without showing any symptoms of injury for a period between 0.8 and 5 days is conferred in said organism.

[1074] Accordingly, in one embodiment, in case the activity of a polypeptide according to the polypeptide SEQ ID NO.: 536,or encoded by a nucleic acid molecule comprising the nucleic acid SEQ ID NO.: 535 or a homolog of said nucleic acid molecule or polypeptide, e.g. if the activity of a nucleic acid molecule or a polypeptide comprising the nucleic acid or polypeptide or the consensus sequence or the polypeptide motif, as depicted in Table I, II or IV, column 7 in the respective same line as the nucleic acid molecule SEQ ID NO.: 535 or polypeptide SEQ ID NO.: 536, respectively is increased or generated or if the activity “methylglyoxal synthase” is increased or generated in an organism, preferably

[1075] an increased drought resistance by surviving longer than the wild type control without showing any symptoms of injury for a period between 4.4 and 5 days or more and

[1076] an increased biomass production compared with the wild type control without showing any symptoms of injury for a period between 0.5 and 2 days is conferred in said organism.

[1077] Accordingly, in one embodiment, in case the activity of a polypeptide according to the polypeptide SEQ ID NO.: 619,or encoded by a nucleic acid molecule comprising the nucleic acid SEQ ID NO.: 618 or a homolog of said nucleic acid molecule or polypeptide, e.g. if the activity of a nucleic acid molecule or a polypeptide comprising the nucleic acid or polypeptide or the consensus sequence or the polypeptide motif, as depicted in Table I, II or IV, column 7 in the respective same line as the nucleic acid molecule SEQ ID NO.: 618 or polypeptide SEQ ID NO.: 619, respectively is increased or generated or if the activity “HyaA/HyaB-processing protein” is increased or generated in an organism, preferably

[1078] an increased drought resistance by surviving longer than the wild type control without showing any symptoms of injury for a period between 2.6 and 4 days or more and

[1079] an increased biomass production compared with the wild type control without showing any symptoms of injury for a period between 1.2 and 4 days is conferred in said organism.

[1080] Accordingly, in one embodiment, in case the activity of a polypeptide according to the polypeptide SEQ ID NO.: 672,or encoded by a nucleic acid molecule comprising the nucleic acid SEQ ID NO.: 671 or a homolog of said nucleic acid molecule or polypeptide, e.g. if the activity of a nucleic acid molecule or a polypeptide comprising the nucleic acid or polypeptide or the consensus sequence or the polypeptide motif, as depicted in Table I, II or IV, column 7 in the respective same line as the nucleic acid molecule SEQ ID NO.: 671 or polypeptide SEQ ID NO.: 672, respectively is increased or generated or if the activity “predicted oxidoreductase (flavin:NADH component)” is increased or generated in an organism, preferably

[1081] an increased drought resistance by surviving longer than the wild type control without showing any symptoms of injury for a period between 3.3 and 6 days or more and

[1082] an increased biomass production compared with the wild type control without showing any symptoms of injury for a period between 0.6 and 2 days is conferred in said organism.

[1083] Accordingly, in one embodiment, in case the activity of a polypeptide according to the polypeptide SEQ ID NO.: 765,or encoded by a nucleic acid molecule comprising the nucleic acid SEQ ID NO.: 764 or a homolog of said nucleic acid molecule or polypeptide, e.g. if the activity of a nucleic acid molecule or a polypeptide comprising the nucleic acid or polypeptide or the consensus sequence or the polypeptide motif, as depicted in Table I, II or IV, column 7 in the respective same line as the nucleic acid molecule SEQ ID NO.: 764 or polypeptide SEQ ID NO.: 765, respectively is increased or generated or if the activity “b1052-protein” is increased or generated in an organism, preferably

[1084] an increased drought resistance by surviving longer than the wild type control without showing any symptoms of injury for a period between 3 and 5 days or more and

[1085] an increased biomass production compared with the wild type control without showing any symptoms of injury for a period between 0.4 and 2 days is conferred in said organism.

[1086] Accordingly, in one embodiment, in case the activity of a polypeptide according to the polypeptide SEQ ID NO.: 769,or encoded by a nucleic acid molecule comprising the nucleic acid SEQ ID NO.: 768 or a homolog of said nucleic acid molecule or polypeptide, e.g. if the activity of a nucleic acid molecule or a polypeptide comprising the nucleic acid or polypeptide or the consensus sequence or the polypeptide motif, as depicted in Table I, II or IV, column 7 in the respective same line as the nucleic acid molecule SEQ ID NO.: 768 or polypeptide SEQ ID NO.: 769, respectively is increased or generated or if the activity “3-oxoacyl-(acyl carrier protein) synthase” is increased or generated in an organism, preferably

[1087] an increased drought resistance by surviving longer than the wild type control without showing any symptoms of injury for a period between 3.4 and 5 days or more and

[1088] an increased biomass production compared with the wild type control without showing any symptoms of injury for a period between 0.3 and 3 days is conferred in said organism.

[1089] Accordingly, in one embodiment, in case the activity of a polypeptide according to the polypeptide SEQ ID NO.: 908,or encoded by a nucleic acid molecule comprising the nucleic acid SEQ ID NO.: 907 or a homolog of said nucleic acid molecule or polypeptide, e.g. if the activity of a nucleic acid molecule or a polypeptide comprising the nucleic acid or polypeptide or the consensus sequence or the polypeptide motif, as depicted in Table I, II or IV, column 7 in the respective same line as the nucleic acid molecule SEQ ID NO.: 907 or polypeptide SEQ ID NO.: 908, respectively is increased or generated or if the activity “b1161-protein” is increased or generated in an organism, preferably

[1090] an increased drought resistance by surviving longer than the wild type control without showing any symptoms of injury for a period between 2.9 and 4 days or more and

[1091] an increased biomass production compared with the wild type control without showing any symptoms of injury for a period between 2 and 4 days is conferred in said organism.

[1092] Accordingly, in one embodiment, in case the activity of a polypeptide according to the polypeptide SEQ ID NO.: 928,or encoded by a nucleic acid molecule comprising the nucleic acid SEQ ID NO.: 927 or a homolog of said nucleic acid molecule or polypeptide, e.g. if the activity of a nucleic acid molecule or a polypeptide comprising the nucleic acid or polypeptide or the consensus sequence or the polypeptide motif, as depicted in Table I, II or IV, column 7 in the respective same line as the nucleic acid molecule SEQ ID NO.: 927 or polypeptide SEQ ID NO.: 928, respectively is increased or generated or if the activity “sodium/proton antiporter” is increased or generated in an organism, preferably

[1093] an increased drought resistance by surviving longer than the wild type control without showing any symptoms of injury for a period between 4 and 6 days or more and

[1094] an increased biomass production compared with the wild type control without showing any symptoms of injury for a period between 0.8 and 4 days is conferred in said organism.

[1095] Accordingly, in one embodiment, in case the activity of a polypeptide according to the polypeptide SEQ ID NO.: 1010,or encoded by a nucleic acid molecule comprising the nucleic acid SEQ ID NO.: 1009 or a homolog of said nucleic acid molecule or polypeptide, e.g. if the activity of a nucleic acid molecule or a polypeptide comprising the nucleic acid or polypeptide or the consensus sequence or the polypeptide motif, as depicted in Table I, II or IV, column 7 in the respective same line as the nucleic acid molecule SEQ ID NO.: 1009 or polypeptide SEQ ID NO.: 1010, respectively is increased or generated or if the activity “predicted antimicrobial peptide transporter subunit” is increased or generated in an organism, preferably

[1096] an increased drought resistance by surviving longer than the wild type control without showing any symptoms of injury for a period between 3.4 and 5 days or more and

[1097] an increased biomass production compared with the wild type control without showing any symptoms of injury for a period between 1.2 and 3 days is conferred in said organism.

[1098] Accordingly, in one embodiment, in case the activity of a polypeptide according to the polypeptide SEQ ID NO.: 1155,or encoded by a nucleic acid molecule comprising the nucleic acid SEQ ID NO.: 1154 or a homolog of said nucleic acid molecule or polypeptide, e.g. if the activity of a nucleic acid molecule or a polypeptide comprising the nucleic acid or polypeptide or the consensus sequence or the polypeptide motif, as depicted in Table I, II or IV, column 7 in the respective same line as the nucleic acid molecule SEQ ID NO.: 1154 or polypeptide SEQ ID NO.: 1155, respectively is increased or generated or if the activity “predicted antimicrobial peptide transporter subunit” is increased or generated in an organism, preferably

[1099] an increased drought resistance by surviving longer than the wild type control without showing any symptoms of injury for a period between 2.3 and 5 days or more and

[1100] an increased biomass production compared with the wild type control without showing any symptoms of injury for a period between 1 and 4 days is conferred in said organism.

[1101] Accordingly, in one embodiment, in case the activity of a polypeptide according to the polypeptide SEQ ID NO.: 1309,or encoded by a nucleic acid molecule comprising the nucleic acid SEQ ID NO.: 1308 or a homolog of said nucleic acid molecule or polypeptide, e.g. if the activity of a nucleic acid molecule or a polypeptide comprising the nucleic acid or polypeptide or the consensus sequence or the polypeptide motif, as depicted in Table I, II or IV, column 7 in the respective same line as the nucleic acid molecule SEQ ID NO.: 1308 or polypeptide SEQ ID NO.: 1309, respectively is increased or generated or if the activity “b1423-protein” is increased or generated in an organism, preferably

[1102] an increased drought resistance by surviving longer than the wild type control without showing any symptoms of injury for a period between 3.1 and 6 days or more and

[1103] an increased biomass production compared with the wild type control without showing any symptoms of injury for a period between 0.1 and 1 days is conferred in said organism.

[1104] Accordingly, in one embodiment, in case the activity of a polypeptide according to the polypeptide SEQ ID NO.: 1369,or encoded by a nucleic acid molecule comprising the nucleic acid SEQ ID NO.: 1368 or a homolog of said nucleic acid molecule or polypeptide, e.g. if the activity of a nucleic acid molecule or a polypeptide comprising the nucleic acid or polypeptide or the consensus sequence or the polypeptide motif, as depicted in Table I, II or IV, column 7 in the respective same line as the nucleic acid molecule SEQ ID NO.: 1368 or polypeptide SEQ ID NO.: 1369, respectively is increased or generated or if the activity “acid shock protein precursor” is increased or generated in an organism, preferably

[1105] an increased drought resistance by surviving longer than the wild type control without showing any symptoms of injury for a period between 3.7 and 5 days or more and

[1106] an increased biomass production compared with the wild type control without showing any symptoms of injury for a period between 0.1 and 1 days is conferred in said organism.

[1107] Accordingly, in one embodiment, in case the activity of a polypeptide according to the polypeptide SEQ ID NO.: 1375,or encoded by a nucleic acid molecule comprising the nucleic acid SEQ ID NO.: 1374 or a homolog of said nucleic acid molecule or polypeptide, e.g. if the activity of a nucleic acid molecule or a polypeptide comprising the nucleic acid or polypeptide or the consensus sequence or the polypeptide motif, as depicted in Table I, II or IV, column 7 in the respective same line as the nucleic acid molecule SEQ ID NO.: 1374 or polypeptide SEQ ID NO.: 1375, respectively is increased or generated or if the activity “predicted arginine/ornithine transporter” is increased or generated in an organism, preferably

[1108] an increased drought resistance by surviving longer than the wild type control without showing any symptoms of injury for a period between 2.8 and 5 days or more and

[1109] an increased biomass production compared with the wild type control without showing any symptoms of injury for a period between 0.9 and 3 days is conferred in said organism.

[1110] Accordingly, in one embodiment, in case the activity of a polypeptide according to the polypeptide SEQ ID NO.: 1508,or encoded by a nucleic acid molecule comprising the nucleic acid SEQ ID NO.: 1507 or a homolog of said nucleic acid molecule or polypeptide, e.g. if the activity of a nucleic acid molecule or a polypeptide comprising the nucleic acid or polypeptide or the consensus sequence or the polypeptide motif, as depicted in Table I, II or IV, column 7 in the respective same line as the nucleic acid molecule SEQ ID NO.: 1507 or polypeptide SEQ ID NO.: 1508, respectively is increased or generated or if the activity “3-deoxy-D-arabino-heptulosonate-7-phosphatesynthase” is increased or generated in an organism, preferably

[1111] an increased drought resistance by surviving longer than the wild type control without showing any symptoms of injury for a period between 4.2 and 5 days or more and

[1112] an increased biomass production compared with the wild type control without showing any symptoms of injury for a period between 0.6 and 2 days is conferred in said organism.

[1113] Accordingly, in one embodiment, in case the activity of a polypeptide according to the polypeptide SEQ ID NO.: 1954,or encoded by a nucleic acid molecule comprising the nucleic acid SEQ ID NO.: 1953 or a homolog of said nucleic acid molecule or polypeptide, e.g. if the activity of a nucleic acid molecule or a polypeptide comprising the nucleic acid or polypeptide or the consensus sequence or the polypeptide motif, as depicted in Table I, II or IV, column 7 in the respective same line as the nucleic acid molecule SEQ ID NO.: 1953 or polypeptide SEQ ID NO.: 1954, respectively is increased or generated or if the activity “N,N′-diacetylchitobiose-specific enzyme IIA component of PTS” is increased or generated in an organism, preferably

[1114] an increased drought resistance by surviving longer than the wild type control without showing any symptoms of injury for a period between 4.1 and 5 days or more and

[1115] an increased biomass production compared with the wild type control without showing any symptoms of injury for a period between 0.8 and 2 days is conferred in said organism.

[1116] Accordingly, in one embodiment, in case the activity of a polypeptide according to the polypeptide SEQ ID NO.: 2157,or encoded by a nucleic acid molecule comprising the nucleic acid SEQ ID NO.: 2156 or a homolog of said nucleic acid molecule or polypeptide, e.g. if the activity of a nucleic acid molecule or a polypeptide comprising the nucleic acid or polypeptide or the consensus sequence or the polypeptide motif, as depicted in Table I, II or IV, column 7 in the respective same line as the nucleic acid molecule SEQ ID NO.: 2156 or polypeptide SEQ ID NO.: 2157, respectively is increased or generated or if the activity “neutral amino-acid efflux system” is increased or generated in an organism, preferably

[1117] an increased drought resistance by surviving longer than the wild type control without showing any symptoms of injury for a period between 3.4 and 5 days or more and

[1118] an increased biomass production compared with the wild type control without showing any symptoms of injury for a period between 1 and 4 days is conferred in said organism.

[1119] Accordingly, in one embodiment, in case the activity of a polypeptide according to the polypeptide SEQ ID NO.: 2196,or encoded by a nucleic acid molecule comprising the nucleic acid SEQ ID NO.: 2195 or a homolog of said nucleic acid molecule or polypeptide, e.g. if the activity of a nucleic acid molecule or a polypeptide comprising the nucleic acid or polypeptide or the consensus sequence or the polypeptide motif, as depicted in Table I, II or IV, column 7 in the respective same line as the nucleic acid molecule SEQ ID NO.: 2195 or polypeptide SEQ ID NO.: 2196, respectively is increased or generated or if the activity “b1878-protein” is increased or generated in an organism, preferably

[1120] an increased drought resistance by surviving longer than the wild type control without showing any symptoms of injury for a period between 3.4 and 5 days or more and

[1121] an increased biomass production compared with the wild type control without showing any symptoms of injury for a period between 1.3 and 3 days is conferred in said organism.

[1122] Accordingly, in one embodiment, in case the activity of a polypeptide according to the polypeptide SEQ ID NO.: 2220,or encoded by a nucleic acid molecule comprising the nucleic acid SEQ ID NO.: 2219 or a homolog of said nucleic acid molecule or polypeptide, e.g. if the activity of a nucleic acid molecule or a polypeptide comprising the nucleic acid or polypeptide or the consensus sequence or the polypeptide motif, as depicted in Table I, II or IV, column 7 in the respective same line as the nucleic acid molecule SEQ ID NO.: 2219 or polypeptide SEQ ID NO.: 2220, respectively is increased or generated or if the activity “L-arabinose transporter subunit” is increased or generated in an organism, preferably

[1123] an increased drought resistance by surviving longer than the wild type control without showing any symptoms of injury for a period between 2.8 and 4 days or more and

[1124] an increased biomass production compared with the wild type control without showing any symptoms of injury for a period between 1.8 and 3 days is conferred in said organism.

[1125] Accordingly, in one embodiment, in case the activity of a polypeptide according to the polypeptide SEQ ID NO.: 2278,or encoded by a nucleic acid molecule comprising the nucleic acid SEQ ID NO.: 2277 or a homolog of said nucleic acid molecule or polypeptide, e.g. if the activity of a nucleic acid molecule or a polypeptide comprising the nucleic acid or polypeptide or the consensus sequence or the polypeptide motif, as depicted in Table I, II or IV, column 7 in the respective same line as the nucleic acid molecule SEQ ID NO.: 2277 or polypeptide SEQ ID NO.: 2278, respectively is increased or generated or if the activity “phosphatidylglycerophosphate synthetase” is increased or generated in an organism, preferably

[1126] an increased drought resistance by surviving longer than the wild type control without showing any symptoms of injury for a period between 2.5 and 4 days or more and

[1127] an increased biomass production compared with the wild type control without showing any symptoms of injury for a period between 1.6 and 3 days is conferred in said organism.

[1128] Accordingly, in one embodiment, in case the activity of a polypeptide according to the polypeptide SEQ ID NO.: 2471,or encoded by a nucleic acid molecule comprising the nucleic acid SEQ ID NO.: 2470 or a homolog of said nucleic acid molecule or polypeptide, e.g. if the activity of a nucleic acid molecule or a polypeptide comprising the nucleic acid or polypeptide or the consensus sequence or the polypeptide motif, as depicted in Table I, II or IV, column 7 in the respective same line as the nucleic acid molecule SEQ ID NO.: 2470 or polypeptide SEQ ID NO.: 2471, respectively is increased or generated or if the activity “regulator of length of O-antigen component of lipopolysaccharide chains” is increased or generated in an organism, preferably

[1129] an increased drought resistance by surviving longer than the wild type control without showing any symptoms of injury for a period between 2.6 and 4 days or more and

[1130] an increased biomass production compared with the wild type control without showing any symptoms of injury for a period between 0.3 and 2 days is conferred in said organism.

[1131] Accordingly, in one embodiment, in case the activity of a polypeptide according to the polypeptide SEQ ID NO.: 2494,or encoded by a nucleic acid molecule comprising the nucleic acid SEQ ID NO.: 2493 or a homolog of said nucleic acid molecule or polypeptide, e.g. if the activity of a nucleic acid molecule or a polypeptide comprising the nucleic acid or polypeptide or the consensus sequence or the polypeptide motif, as depicted in Table I, II or IV, column 7 in the respective same line as the nucleic acid molecule SEQ ID NO.: 2493 or polypeptide SEQ ID NO.: 2494, respectively is increased or generated or if the activity “glucose-1-phosphate thymidylyltransferase” is increased or generated in an organism, preferably

[1132] an increased drought resistance by surviving longer than the wild type control without showing any symptoms of injury for a period between 2.1 and 4 days or more and

[1133] an increased biomass production compared with the wild type control without showing any symptoms of injury for a period between 0.1 and 1 days is conferred in said organism.

[1134] Accordingly, in one embodiment, in case the activity of a polypeptide according to the polypeptide SEQ ID NO.: 2628,or encoded by a nucleic acid molecule comprising the nucleic acid SEQ ID NO.: 2627 or a homolog of said nucleic acid molecule or polypeptide, e.g. if the activity of a nucleic acid molecule or a polypeptide comprising the nucleic acid or polypeptide or the consensus sequence or the polypeptide motif, as depicted in Table I, II or IV, column 7 in the respective same line as the nucleic acid molecule SEQ ID NO.: 2627 or polypeptide SEQ ID NO.: 2628, respectively is increased or generated or if the activity “multidrug efflux system (subunit B)” is increased or generated in an organism, preferably

[1135] an increased drought resistance by surviving longer than the wild type control without showing any symptoms of injury for a period between 2.5 and 4 days or more and

[1136] an increased biomass production compared with the wild type control without showing any symptoms of injury for a period between 0.5 and 3 days is conferred in said organism.

[1137] Accordingly, in one embodiment, in case the activity of a polypeptide according to the polypeptide SEQ ID NO.: 2859,or encoded by a nucleic acid molecule comprising the nucleic acid SEQ ID NO.: 2858 or a homolog of said nucleic acid molecule or polypeptide, e.g. if the activity of a nucleic acid molecule or a polypeptide comprising the nucleic acid or polypeptide or the consensus sequence or the polypeptide motif, as depicted in Table I, II or IV, column 7 in the respective same line as the nucleic acid molecule SEQ ID NO.: 2858 or polypeptide SEQ ID NO.: 2859, respectively is increased or generated or if the activity “GTP cyclohydrolase I” is increased or generated in an organism, preferably

[1138] an increased drought resistance by surviving longer than the wild type control without showing any symptoms of injury for a period between 2.5 and 4 days or more and

[1139] an increased biomass production compared with the wild type control without showing any symptoms of injury for a period between 1.5 and 4 days is conferred in said organism.

[1140] Accordingly, in one embodiment, in case the activity of a polypeptide according to the polypeptide SEQ ID NO.: 2943,or encoded by a nucleic acid molecule comprising the nucleic acid SEQ ID NO.: 2942 or a homolog of said nucleic acid molecule or polypeptide, e.g. if the activity of a nucleic acid molecule or a polypeptide comprising the nucleic acid or polypeptide or the consensus sequence or the polypeptide motif, as depicted in Table I, II or IV, column 7 in the respective same line as the nucleic acid molecule SEQ ID NO.: 2942 or polypeptide SEQ ID NO.: 2943, respectively is increased or generated or if the activity “heme lyase (CcmH subunit)” is increased or generated in an organism, preferably

[1141] an increased drought resistance by surviving longer than the wild type control without showing any symptoms of injury for a period between 3.4 and 6 days or more and

[1142] an increased biomass production compared with the wild type control without showing any symptoms of injury for a period between 0.7 and 3 days is conferred in said organism.

[1143] Accordingly, in one embodiment, in case the activity of a polypeptide according to the polypeptide SEQ ID NO.: 2966,or encoded by a nucleic acid molecule comprising the nucleic acid SEQ ID NO.: 2965 or a homolog of said nucleic acid molecule or polypeptide, e.g. if the activity of a nucleic acid molecule or a polypeptide comprising the nucleic acid or polypeptide or the consensus sequence or the polypeptide motif, as depicted in Table I, II or IV, column 7 in the respective same line as the nucleic acid molecule SEQ ID NO.: 2965 or polypeptide SEQ ID NO.: 2966, respectively is increased or generated or if the activity “b2226-protein” is increased or generated in an organism, preferably

[1144] an increased drought resistance by surviving longer than the wild type control without showing any symptoms of injury for a period between 2.9 and 4 days or more and

[1145] an increased biomass production compared with the wild type control without showing any symptoms of injury for a period between 1.6 and 4 days is conferred in said organism.

[1146] Accordingly, in one embodiment, in case the activity of a polypeptide according to the polypeptide SEQ ID NO.: 2982,or encoded by a nucleic acid molecule comprising the nucleic acid SEQ ID NO.: 2981 or a homolog of said nucleic acid molecule or polypeptide, e.g. if the activity of a nucleic acid molecule or a polypeptide comprising the nucleic acid or polypeptide or the consensus sequence or the polypeptide motif, as depicted in Table I, II or IV, column 7 in the respective same line as the nucleic acid molecule SEQ ID NO.: 2981 or polypeptide SEQ ID NO.: 2982, respectively is increased or generated or if the activity “histidine/lysine/arginine/ornithine transporter subunit protein” is increased or generated in an organism, preferably

[1147] an increased drought resistance by surviving longer than the wild type control without showing any symptoms of injury for a period between 1.9 and 3 days or more and

[1148] an increased biomass production compared with the wild type control without showing any symptoms of injury for a period between 0.9 and 3 days is conferred in said organism.

[1149] Accordingly, in one embodiment, in case the activity of a polypeptide according to the polypeptide SEQ ID NO.: 3131,or encoded by a nucleic acid molecule comprising the nucleic acid SEQ ID NO.: 3130 or a homolog of said nucleic acid molecule or polypeptide, e.g. if the activity of a nucleic acid molecule or a polypeptide comprising the nucleic acid or polypeptide or the consensus sequence or the polypeptide motif, as depicted in Table I, II or IV, column 7 in the respective same line as the nucleic acid molecule SEQ ID NO.: 3130 or polypeptide SEQ ID NO.: 3131, respectively is increased or generated or if the activity “sensory histidine kinase in two-component regulatory system with NarP (NarL)” is increased or generated in an organism, preferably an increased drought resistance by surviving longer than the wild type control without showing any symptoms of injury for a period between 2.2 and 5 days or more and

[1150] an increased biomass production compared with the wild type control without showing any symptoms of injury for a period between 0.9 and 3 days is conferred in said organism.

[1151] Accordingly, in one embodiment, in case the activity of a polypeptide according to the polypeptide SEQ ID NO.: 3217,or encoded by a nucleic acid molecule comprising the nucleic acid SEQ ID NO.: 3216 or a homolog of said nucleic acid molecule or polypeptide, e.g. if the activity of a nucleic acid molecule or a polypeptide comprising the nucleic acid or polypeptide or the consensus sequence or the polypeptide motif, as depicted in Table I, II or IV, column 7 in the respective same line as the nucleic acid molecule SEQ ID NO.: 3216 or polypeptide SEQ ID NO.: 3217, respectively is increased or generated or if the activity “b2475-protein” is increased or generated in an organism, preferably

[1152] an increased drought resistance by surviving longer than the wild type control without showing any symptoms of injury for a period between 2.9 and 5 days or more and

[1153] an increased biomass production compared with the wild type control without showing any symptoms of injury for a period between 0.3 and 2 days is conferred in said organism.

[1154] Accordingly, in one embodiment, in case the activity of a polypeptide according to the polypeptide SEQ ID NO.: 3336,or encoded by a nucleic acid molecule comprising the nucleic acid SEQ ID NO.: 3335 or a homolog of said nucleic acid molecule or polypeptide, e.g. if the activity of a nucleic acid molecule or a polypeptide comprising the nucleic acid or polypeptide or the consensus sequence or the polypeptide motif, as depicted in Table I, II or IV, column 7 in the respective same line as the nucleic acid molecule SEQ ID NO.: 3335 or polypeptide SEQ ID NO.: 3336, respectively is increased or generated or if the activity “NADH dehydrogenase (subunit N)” is increased or generated in an organism, preferably

[1155] an increased drought resistance by surviving longer than the wild type control without showing any symptoms of injury for a period between 1.9 and 3 days or more and

[1156] an increased biomass production compared with the wild type control without showing any symptoms of injury for a period between 0.6 and 2 days is conferred in said organism.

[1157] Accordingly, in one embodiment, in case the activity of a polypeptide according to the polypeptide SEQ ID NO.: 3402,or encoded by a nucleic acid molecule comprising the nucleic acid SEQ ID NO.: 3401 or a homolog of said nucleic acid molecule or polypeptide, e.g. if the activity of a nucleic acid molecule or a polypeptide comprising the nucleic acid or polypeptide or the consensus sequence or the polypeptide motif, as depicted in Table I, II or IV, column 7 in the respective same line as the nucleic acid molecule SEQ ID NO.: 3401 or polypeptide SEQ ID NO.: 3402, respectively is increased or generated or if the activity “2,3-dihydroxy-2,3-dihydrophenylpropionatedehydrogenase” is increased or generated in an organism, preferably an increased drought resistance by surviving longer than the wild type control without showing any symptoms of injury for a period between 2.9 and 5 days or more and

[1158] an increased biomass production compared with the wild type control without showing any symptoms of injury for a period between 0.6 and 2 days is conferred in said organism.

[1159] Accordingly, in one embodiment, in case the activity of a polypeptide according to the polypeptide SEQ ID NO.: 3591,or encoded by a nucleic acid molecule comprising the nucleic acid SEQ ID NO.: 3590 or a homolog of said nucleic acid molecule or polypeptide, e.g. if the activity of a nucleic acid molecule or a polypeptide comprising the nucleic acid or polypeptide or the consensus sequence or the polypeptide motif, as depicted in Table I, II or IV, column 7 in the respective same line as the nucleic acid molecule SEQ ID NO.: 3590 or polypeptide SEQ ID NO.: 3591, respectively is increased or generated or if the activity “tRNA-specific adenosine deaminase” is increased or generated in an organism, preferably

[1160] an increased drought resistance by surviving longer than the wild type control without showing any symptoms of injury for a period between 1.6 and 3 days or more and

[1161] an increased biomass production compared with the wild type control without showing any symptoms of injury for a period between 1.4 and 3 days is conferred in said organism.

[1162] Accordingly, in one embodiment, in case the activity of a polypeptide according to the polypeptide SEQ ID NO.: 3832,or encoded by a nucleic acid molecule comprising the nucleic acid SEQ ID NO.: 3831 or a homolog of said nucleic acid molecule or polypeptide, e.g. if the activity of a nucleic acid molecule or a polypeptide comprising the nucleic acid or polypeptide or the consensus sequence or the polypeptide motif, as depicted in Table I, II or IV, column 7 in the respective same line as the nucleic acid molecule SEQ ID NO.: 3831 or polypeptide SEQ ID NO.: 3832, respectively is increased or generated or if the activity “predicted outer membrane lipoprotein” is increased or generated in an organism, preferably

[1163] an increased drought resistance by surviving longer than the wild type control without showing any symptoms of injury for a period between 1.6 and 4 days or more and

[1164] an increased biomass production compared with the wild type control without showing any symptoms of injury for a period between 0.7 and 2 days is conferred in said organism.

[1165] Accordingly, in one embodiment, in case the activity of a polypeptide according to the polypeptide SEQ ID NO.: 3858,or encoded by a nucleic acid molecule comprising the nucleic acid SEQ ID NO.: 3857 or a homolog of said nucleic acid molecule or polypeptide, e.g. if the activity of a nucleic acid molecule or a polypeptide comprising the nucleic acid or polypeptide or the consensus sequence or the polypeptide motif, as depicted in Table I, II or IV, column 7 in the respective same line as the nucleic acid molecule SEQ ID NO.: 3857 or polypeptide SEQ ID NO.: 3858, respectively is increased or generated or if the activity “CP4-57 prophage/ RNase LS” is increased or generated in an organism, preferably

[1166] an increased drought resistance by surviving longer than the wild type control without showing any symptoms of injury for a period between 1.8 and 3 days or more and

[1167] an increased biomass production compared with the wild type control without showing any symptoms of injury for a period between 0.6 and 2 days is conferred in said organism.

[1168] Accordingly, in one embodiment, in case the activity of a polypeptide according to the polypeptide SEQ ID NO.: 3862,or encoded by a nucleic acid molecule comprising the nucleic acid SEQ ID NO.: 3861 or a homolog of said nucleic acid molecule or polypeptide, e.g. if the activity of a nucleic acid molecule or a polypeptide comprising the nucleic acid or polypeptide or the consensus sequence or the polypeptide motif, as depicted in Table I, II or IV, column 7 in the respective same line as the nucleic acid molecule SEQ ID NO.: 3861 or polypeptide SEQ ID NO.: 3862, respectively is increased or generated or if the activity “glycine betaine transporter subunit protein” is increased or generated in an organism, preferably

[1169] an increased drought resistance by surviving longer than the wild type control without showing any symptoms of injury for a period between 4.3 and 5 days or more and

[1170] an increased biomass production compared with the wild type control without showing any symptoms of injury for a period between 0.1 and 1 days is conferred in said organism.

[1171] Accordingly, in one embodiment, in case the activity of a polypeptide according to the polypeptide SEQ ID NO.: 4023,or encoded by a nucleic acid molecule comprising the nucleic acid SEQ ID NO.: 4022 or a homolog of said nucleic acid molecule or polypeptide, e.g. if the activity of a nucleic acid molecule or a polypeptide comprising the nucleic acid or polypeptide or the consensus sequence or the polypeptide motif, as depicted in Table I, II or IV, column 7 in the respective same line as the nucleic acid molecule SEQ ID NO.: 4022 or polypeptide SEQ ID NO.: 4023, respectively is increased or generated or if the activity “cellobiose/arbutin/salicin-specific PTS enzyme (IIB component/IC component)” is increased or generated in an organism, preferably an increased drought resistance by surviving longer than the wild type control without showing any symptoms of injury for a period between 4 and 5 days or more and

[1172] an increased biomass production compared with the wild type control without showing any symptoms of injury for a period between 0.4 and 2 days is conferred in said organism.

[1173] Accordingly, in one embodiment, in case the activity of a polypeptide according to the polypeptide SEQ ID NO.: 4060,or encoded by a nucleic acid molecule comprising the nucleic acid SEQ ID NO.: 4059 or a homolog of said nucleic acid molecule or polypeptide, e.g. if the activity of a nucleic acid molecule or a polypeptide comprising the nucleic acid or polypeptide or the consensus sequence or the polypeptide motif, as depicted in Table I, II or IV, column 7 in the respective same line as the nucleic acid molecule SEQ ID NO.: 4059 or polypeptide SEQ ID NO.: 4060, respectively is increased or generated or if the activity “predicted kinase” is increased or generated in an organism, preferably

[1174] an increased drought resistance by surviving longer than the wild type control without showing any symptoms of injury for a period between 2.9 and 5 days or more and

[1175] an increased biomass production compared with the wild type control without showing any symptoms of injury for a period between 0.4 and 2 days is conferred in said organism.

[1176] Accordingly, in one embodiment, in case the activity of a polypeptide according to the polypeptide SEQ ID NO.: 4077,or encoded by a nucleic acid molecule comprising the nucleic acid SEQ ID NO.: 4076 or a homolog of said nucleic acid molecule or polypeptide, e.g. if the activity of a nucleic acid molecule or a polypeptide comprising the nucleic acid or polypeptide or the consensus sequence or the polypeptide motif, as depicted in Table I, II or IV, column 7 in the respective same line as the nucleic acid molecule SEQ ID NO.: 4076 or polypeptide SEQ ID NO.: 4077, respectively is increased or generated or if the activity “tRNA pseudouridine synthase” is increased or generated in an organism, preferably

[1177] an increased drought resistance by surviving longer than the wild type control without showing any symptoms of injury for a period between 3.2 and 6 days or more and

[1178] an increased biomass production compared with the wild type control without showing any symptoms of injury for a period between 0.7 and 3 days is conferred in said organism.

[1179] Accordingly, in one embodiment, in case the activity of a polypeptide according to the polypeptide SEQ ID NO.: 4158,or encoded by a nucleic acid molecule comprising the nucleic acid SEQ ID NO.: 4157 or a homolog of said nucleic acid molecule or polypeptide, e.g. if the activity of a nucleic acid molecule or a polypeptide comprising the nucleic acid or polypeptide or the consensus sequence or the polypeptide motif, as depicted in Table I, II or IV, column 7 in the respective same line as the nucleic acid molecule SEQ ID NO.: 4157 or polypeptide SEQ ID NO.: 4158, respectively is increased or generated or if the activity “predicted ligase” is increased or generated in an organism, preferably

[1180] an increased drought resistance by surviving longer than the wild type control without showing any symptoms of injury for a period between 3 and 5 days or more and

[1181] an increased biomass production compared with the wild type control without showing any symptoms of injury for a period between 1.7 and 3 days is conferred in said organism.

[1182] Accordingly, in one embodiment, in case the activity of a polypeptide according to the polypeptide SEQ ID NO.: 4261,or encoded by a nucleic acid molecule comprising the nucleic acid SEQ ID NO.: 4260 or a homolog of said nucleic acid molecule or polypeptide, e.g. if the activity of a nucleic acid molecule or a polypeptide comprising the nucleic acid or polypeptide or the consensus sequence or the polypeptide motif, as depicted in Table I, II or IV, column 7 in the respective same line as the nucleic acid molecule SEQ ID NO.: 4260 or polypeptide SEQ ID NO.: 4261, respectively is increased or generated or if the activity “ornithine decarboxylase” is increased or generated in an organism, preferably

[1183] an increased drought resistance by surviving longer than the wild type control without showing any symptoms of injury for a period between 3.8 and 5 days or more and

[1184] an increased biomass production compared with the wild type control without showing any symptoms of injury for a period between 0.7 and 3 days is conferred in said organism.

[1185] Accordingly, in one embodiment, in case the activity of a polypeptide according to the polypeptide SEQ ID NO.: 4351,or encoded by a nucleic acid molecule comprising the nucleic acid SEQ ID NO.: 4350 or a homolog of said nucleic acid molecule or polypeptide, e.g. if the activity of a nucleic acid molecule or a polypeptide comprising the nucleic acid or polypeptide or the consensus sequence or the polypeptide motif, as depicted in Table I, II or IV, column 7 in the respective same line as the nucleic acid molecule SEQ ID NO.: 4350 or polypeptide SEQ ID NO.: 4351, respectively is increased or generated or if the activity “phosphate transporter” is increased or generated in an organism, preferably

[1186] an increased drought resistance by surviving longer than the wild type control without showing any symptoms of injury for a period between 2.9 and 4 days or more and

[1187] an increased biomass production compared with the wild type control without showing any symptoms of injury for a period between 1.3 and 4 days is conferred in said organism.

[1188] Accordingly, in one embodiment, in case the activity of a polypeptide according to the polypeptide SEQ ID NO.: 4351,or encoded by a nucleic acid molecule comprising the nucleic acid SEQ ID NO.: 4350 or a homolog of said nucleic acid molecule or polypeptide, e.g. if the activity of a nucleic acid molecule or a polypeptide comprising the nucleic acid or polypeptide or the consensus sequence or the polypeptide motif, as depicted in Table I, II or IV, column 7 in the respective same line as the nucleic acid molecule SEQ ID NO.: 4350 or polypeptide SEQ ID NO.: 4351, respectively is increased or generated or if the activity “phosphate transporter” is increased or generated in an organism, preferably

[1189] an increased drought resistance by surviving longer than the wild type control without showing any symptoms of injury for a period between 2.7 and 4 days or more and

[1190] an increased biomass production compared with the wild type control without showing any symptoms of injury for a period between 0.1 and 0.1 days is conferred in said organism.

[1191] Accordingly, in one embodiment, in case the activity of a polypeptide according to the polypeptide SEQ ID NO.: 4460,or encoded by a nucleic acid molecule comprising the nucleic acid SEQ ID NO.: 4459 or a homolog of said nucleic acid molecule or polypeptide, e.g. if the activity of a nucleic acid molecule or a polypeptide comprising the nucleic acid or polypeptide or the consensus sequence or the polypeptide motif, as depicted in Table I, II or IV, column 7 in the respective same line as the nucleic acid molecule SEQ ID NO.: 4459 or polypeptide SEQ ID NO.: 4460, respectively is increased or generated or if the activity “hexuronate transporter” is increased or generated in an organism, preferably

[1192] an increased drought resistance by surviving longer than the wild type control without showing any symptoms of injury for a period between 2.8 and 5 days or more and

[1193] an increased biomass production compared with the wild type control without showing any symptoms of injury for a period between 1 and 3 days is conferred in said organism.

[1194] Accordingly, in one embodiment, in case the activity of a polypeptide according to the polypeptide SEQ ID NO.: 4506,or encoded by a nucleic acid molecule comprising the nucleic acid SEQ ID NO.: 4505 or a homolog of said nucleic acid molecule or polypeptide, e.g. if the activity of a nucleic acid molecule or a polypeptide comprising the nucleic acid or polypeptide or the consensus sequence or the polypeptide motif, as depicted in Table I, II or IV, column 7 in the respective same line as the nucleic acid molecule SEQ ID NO.: 4505 or polypeptide SEQ ID NO.: 4506, respectively is increased or generated or if the activity “peptidyl-prolyl cis-trans isomerase A (rotamase A)” is increased or generated in an organism, preferably

[1195] an increased drought resistance by surviving longer than the wild type control without showing any symptoms of injury for a period between 3.7 and 4 days or more and

[1196] an increased biomass production compared with the wild type control without showing any symptoms of injury for a period between 0.1 and 0.1 days is conferred in said organism.

[1197] Accordingly, in one embodiment, in case the activity of a polypeptide according to the polypeptide SEQ ID NO.: 4641,or encoded by a nucleic acid molecule comprising the nucleic acid SEQ ID NO.: 4640 or a homolog of said nucleic acid molecule or polypeptide, e.g. if the activity of a nucleic acid molecule or a polypeptide comprising the nucleic acid or polypeptide or the consensus sequence or the polypeptide motif, as depicted in Table I, II or IV, column 7 in the respective same line as the nucleic acid molecule SEQ ID NO.: 4640 or polypeptide SEQ ID NO.: 4641, respectively is increased or generated or if the activity “glycogen synthase” is increased or generated in an organism, preferably

[1198] an increased drought resistance by surviving longer than the wild type control without showing any symptoms of injury for a period between 2.8 and 4 days or more and

[1199] an increased biomass production compared with the wild type control without showing any symptoms of injury for a period between 0.6 and 2 days is conferred in said organism.

[1200] Accordingly, in one embodiment, in case the activity of a polypeptide according to the polypeptide SEQ ID NO.: 4807,or encoded by a nucleic acid molecule comprising the nucleic acid SEQ ID NO.: 4806 or a homolog of said nucleic acid molecule or polypeptide, e.g. if the activity of a nucleic acid molecule or a polypeptide comprising the nucleic acid or polypeptide or the consensus sequence or the polypeptide motif, as depicted in Table I, II or IV, column 7 in the respective same line as the nucleic acid molecule SEQ ID NO.: 4806 or polypeptide SEQ ID NO.: 4807, respectively is increased or generated or if the activity “D-xylose transporter subunit” is increased or generated in an organism, preferably

[1201] an increased drought resistance by surviving longer than the wild type control without showing any symptoms of injury for a period between 2.7 and 4 days or more and

[1202] an increased biomass production compared with the wild type control without showing any symptoms of injury for a period between 0.8 and 3 days is conferred in said organism.

[1203] Accordingly, in one embodiment, in case the activity of a polypeptide according to the polypeptide SEQ ID NO.: 5125,or encoded by a nucleic acid molecule comprising the nucleic acid SEQ ID NO.: 5124 or a homolog of said nucleic acid molecule or polypeptide, e.g. if the activity of a nucleic acid molecule or a polypeptide comprising the nucleic acid or polypeptide or the consensus sequence or the polypeptide motif, as depicted in Table I, II or IV, column 7 in the respective same line as the nucleic acid molecule SEQ ID NO.: 5124 or polypeptide SEQ ID NO.: 5125, respectively is increased or generated or if the activity “L-threonine 3-dehydrogenase” is increased or generated in an organism, preferably

[1204] an increased drought resistance by surviving longer than the wild type control without showing any symptoms of injury for a period between 2.5 and 5 days or more and

[1205] an increased biomass production compared with the wild type control without showing any symptoms of injury for a period between 1.1 and 5 days is conferred in said organism.

[1206] Accordingly, in one embodiment, in case the activity of a polypeptide according to the polypeptide SEQ ID NO.: 5125,or encoded by a nucleic acid molecule comprising the nucleic acid SEQ ID NO.: 5124 or a homolog of said nucleic acid molecule or polypeptide, e.g. if the activity of a nucleic acid molecule or a polypeptide comprising the nucleic acid or polypeptide or the consensus sequence or the polypeptide motif, as depicted in Table I, II or IV, column 7 in the respective same line as the nucleic acid molecule SEQ ID NO.: 5124 or polypeptide SEQ ID NO.: 5125, respectively is increased or generated or if the activity “L-threonine 3-dehydrogenase” is increased or generated in an organism, preferably

[1207] an increased drought resistance by surviving longer than the wild type control without showing any symptoms of injury for a period between 2.8 and 5 days or more and

[1208] an increased biomass production compared with the wild type control without showing any symptoms of injury for a period between 1.3 and 3 days is conferred in said organism.

[1209] Accordingly, in one embodiment, in case the activity of a polypeptide according to the polypeptide SEQ ID NO.: 5418,or encoded by a nucleic acid molecule comprising the nucleic acid SEQ ID NO.: 5417 or a homolog of said nucleic acid molecule or polypeptide, e.g. if the activity of a nucleic acid molecule or a polypeptide comprising the nucleic acid or polypeptide or the consensus sequence or the polypeptide motif, as depicted in Table I, II or IV, column 7 in the respective same line as the nucleic acid molecule SEQ ID NO.: 5417 or polypeptide SEQ ID NO.: 5418, respectively is increased or generated or if the activity “predicted hydrolase” is increased or generated in an organism, preferably

[1210] an increased drought resistance by surviving longer than the wild type control without showing any symptoms of injury for a period between 3 and 5 days or more and

[1211] an increased biomass production compared with the wild type control without showing any symptoms of injury for a period between 0.9 and 3 days is conferred in said organism.

[1212] Accordingly, in one embodiment, in case the activity of a polypeptide according to the polypeptide SEQ ID NO.: 5496,or encoded by a nucleic acid molecule comprising the nucleic acid SEQ ID NO.: 5495 or a homolog of said nucleic acid molecule or polypeptide, e.g. if the activity of a nucleic acid molecule or a polypeptide comprising the nucleic acid or polypeptide or the consensus sequence or the polypeptide motif, as depicted in Table I, II or IV, column 7 in the respective same line as the nucleic acid molecule SEQ ID NO.: 5495 or polypeptide SEQ ID NO.: 5496, respectively is increased or generated or if the activity “predicted PTS enzymes (IIB component/IIC component)” is increased or generated in an organism, preferably

[1213] an increased drought resistance by surviving longer than the wild type control without showing any symptoms of injury for a period between 2.5 and 4 days or more and

[1214] an increased biomass production compared with the wild type control without showing any symptoms of injury for a period between 0.8 and 3 days is conferred in said organism.

[1215] Accordingly, in one embodiment, in case the activity of a polypeptide according to the polypeptide SEQ ID NO.: 5586,or encoded by a nucleic acid molecule comprising the nucleic acid SEQ ID NO.: 5585 or a homolog of said nucleic acid molecule or polypeptide, e.g. if the activity of a nucleic acid molecule or a polypeptide comprising the nucleic acid or polypeptide or the consensus sequence or the polypeptide motif, as depicted in Table I, II or IV, column 7 in the respective same line as the nucleic acid molecule SEQ ID NO.: 5585 or polypeptide SEQ ID NO.: 5586, respectively is increased or generated or if the activity “ribonuclease activity regulator protein RraA” is increased or generated in an organism, preferably

[1216] an increased drought resistance by surviving longer than the wild type control without showing any symptoms of injury for a period between 2.3 and 4 days or more and

[1217] an increased biomass production compared with the wild type control without showing any symptoms of injury for a period between 0.7 and 3 days is conferred in said organism.

[1218] Accordingly, in one embodiment, in case the activity of a polypeptide according to the polypeptide SEQ ID NO.: 5801,or encoded by a nucleic acid molecule comprising the nucleic acid SEQ ID NO.: 5800 or a homolog of said nucleic acid molecule or polypeptide, e.g. if the activity of a nucleic acid molecule or a polypeptide comprising the nucleic acid or polypeptide or the consensus sequence or the polypeptide motif, as depicted in Table I, II or IV, column 7 in the respective same line as the nucleic acid molecule SEQ ID NO.: 5800 or polypeptide SEQ ID NO.: 5801, respectively is increased or generated or if the activity “transcriptional repressor protein MetJ” is increased or generated in an organism, preferably

[1219] an increased drought resistance by surviving longer than the wild type control without showing any symptoms of injury for a period between 2.3 and 3 days or more and

[1220] an increased biomass production compared with the wild type control without showing any symptoms of injury for a period between 1.1 and 3 days is conferred in said organism.

[1221] Accordingly, in one embodiment, in case the activity of a polypeptide according to the polypeptide SEQ ID NO.: 5851,or encoded by a nucleic acid molecule comprising the nucleic acid SEQ ID NO.: 5850 or a homolog of said nucleic acid molecule or polypeptide, e.g. if the activity of a nucleic acid molecule or a polypeptide comprising the nucleic acid or polypeptide or the consensus sequence or the polypeptide motif, as depicted in Table I, II or IV, column 7 in the respective same line as the nucleic acid molecule SEQ ID NO.: 5850 or polypeptide SEQ ID NO.: 5851, respectively is increased or generated or if the activity “pantothenate kinase” is increased or generated in an organism, preferably

[1222] an increased drought resistance by surviving longer than the wild type control without showing any symptoms of injury for a period between 2.9 and 5 days or more and

[1223] an increased biomass production compared with the wild type control without showing any symptoms of injury for a period between 1.4 and 2 days is conferred in said organism.

[1224] Accordingly, in one embodiment, in case the activity of a polypeptide according to the polypeptide SEQ ID NO.: 5993,or encoded by a nucleic acid molecule comprising the nucleic acid SEQ ID NO.: 5992 or a homolog of said nucleic acid molecule or polypeptide, e.g. if the activity of a nucleic acid molecule or a polypeptide comprising the nucleic acid or polypeptide or the consensus sequence or the polypeptide motif, as depicted in Table I, II or IV, column 7 in the respective same line as the nucleic acid molecule SEQ ID NO.: 5992 or polypeptide SEQ ID NO.: 5993, respectively is increased or generated or if the activity “heat shock protein” is increased or generated in an organism, preferably

[1225] an increased drought resistance by surviving longer than the wild type control without showing any symptoms of injury for a period between 2.8 and 5 days or more and

[1226] an increased biomass production compared with the wild type control without showing any symptoms of injury for a period between 0.7 and 2 days is conferred in said organism.

[1227] Accordingly, in one embodiment, in case the activity of a polypeptide according to the polypeptide SEQ ID NO.: 6000,or encoded by a nucleic acid molecule comprising the nucleic acid SEQ ID NO.: 5999 or a homolog of said nucleic acid molecule or polypeptide, e.g. if the activity of a nucleic acid molecule or a polypeptide comprising the nucleic acid or polypeptide or the consensus sequence or the polypeptide motif, as depicted in Table I, II or IV, column 7 in the respective same line as the nucleic acid molecule SEQ ID NO.: 5999 or polypeptide SEQ ID NO.: 6000, respectively is increased or generated or if the activity “predicted porin” is increased or generated in an organism, preferably

[1228] an increased drought resistance by surviving longer than the wild type control without showing any symptoms of injury for a period between 3.2 and 5 days or more and

[1229] an increased biomass production compared with the wild type control without showing any symptoms of injury for a period between 0.5 and 3 days is conferred in said organism.

[1230] Accordingly, in one embodiment, in case the activity of a polypeptide according to the polypeptide SEQ ID NO.: 6057,or encoded by a nucleic acid molecule comprising the nucleic acid SEQ ID NO.: 6056 or a homolog of said nucleic acid molecule or polypeptide, e.g. if the activity of a nucleic acid molecule or a polypeptide comprising the nucleic acid or polypeptide or the consensus sequence or the polypeptide motif, as depicted in Table I, II or IV, column 7 in the respective same line as the nucleic acid molecule SEQ ID NO.: 6056 or polypeptide SEQ ID NO.: 6057, respectively is increased or generated or if the activity “aspartate ammonia-lyase” is increased or generated in an organism, preferably

[1231] an increased drought resistance by surviving longer than the wild type control without showing any symptoms of injury for a period between 3.1 and 5 days or more and

[1232] an increased biomass production compared with the wild type control without showing any symptoms of injury for a period between 1.6 and 4 days is conferred in said organism.

[1233] Accordingly, in one embodiment, in case the activity of a polypeptide according to the polypeptide SEQ ID NO.: 6501,or encoded by a nucleic acid molecule comprising the nucleic acid SEQ ID NO.: 6500 or a homolog of said nucleic acid molecule or polypeptide, e.g. if the activity of a nucleic acid molecule or a polypeptide comprising the nucleic acid or polypeptide or the consensus sequence or the polypeptide motif, as depicted in Table I, II or IV, column 7 in the respective same line as the nucleic acid molecule SEQ ID NO.: 6500 or polypeptide SEQ ID NO.: 6501, respectively is increased or generated or if the activity “nicotinamide-nucleotide adenylyltransferase” is increased or generated in an organism, preferably

[1234] an increased drought resistance by surviving longer than the wild type control without showing any symptoms of injury for a period between 3.5 and 6 days or more and

[1235] an increased biomass production compared with the wild type control without showing any symptoms of injury for a period between 0.8 and 3 days is conferred in said organism.

[1236] Accordingly, in one embodiment, in case the activity of a polypeptide according to the polypeptide SEQ ID NO.: 6543,or encoded by a nucleic acid molecule comprising the nucleic acid SEQ ID NO.: 6542 or a homolog of said nucleic acid molecule or polypeptide, e.g. if the activity of a nucleic acid molecule or a polypeptide comprising the nucleic acid or polypeptide or the consensus sequence or the polypeptide motif, as depicted in Table I, II or IV, column 7 in the respective same line as the nucleic acid molecule SEQ ID NO.: 6542 or polypeptide SEQ ID NO.: 6543, respectively is increased or generated or if the activity “polyphosphate kinase” is increased or generated in an organism, preferably

[1237] an increased drought resistance by surviving longer than the wild type control without showing any symptoms of injury for a period between 2.5 and 4 days or more and

[1238] an increased biomass production compared with the wild type control without showing any symptoms of injury for a period between 0.9 and 3 days is conferred in said organism.

[1239] Accordingly, in one embodiment, in case the activity of a polypeptide according to the polypeptide SEQ ID NO.: 6824,or encoded by a nucleic acid molecule comprising the nucleic acid SEQ ID NO.: 6823 or a homolog of said nucleic acid molecule or polypeptide, e.g. if the activity of a nucleic acid molecule or a polypeptide comprising the nucleic acid or polypeptide or the consensus sequence or the polypeptide motif, as depicted in Table I, II or IV, column 7 in the respective same line as the nucleic acid molecule SEQ ID NO.: 6823 or polypeptide SEQ ID NO.: 6824, respectively is increased or generated or if the activity “Ya1049c-protein” is increased or generated in an organism, preferably

[1240] an increased drought resistance by surviving longer than the wild type control without showing any symptoms of injury for a period between 3.5 and 5 days or more and

[1241] an increased biomass production compared with the wild type control without showing any symptoms of injury for a period between 0.7 and 2 days is conferred in said organism.

[1242] Accordingly, in one embodiment, in case the activity of a polypeptide according to the polypeptide SEQ ID NO.: 6871,or encoded by a nucleic acid molecule comprising the nucleic acid SEQ ID NO.: 6870 or a homolog of said nucleic acid molecule or polypeptide, e.g. if the activity of a nucleic acid molecule or a polypeptide comprising the nucleic acid or polypeptide or the consensus sequence or the polypeptide motif, as depicted in Table I, II or IV, column 7 in the respective same line as the nucleic acid molecule SEQ ID NO.: 6870 or polypeptide SEQ ID NO.: 6871, respectively is increased or generated or if the activity “YCR059C-protein” is increased or generated in an organism, preferably

[1243] an increased drought resistance by surviving longer than the wild type control without showing any symptoms of injury for a period between 3.5 and 5 days or more and

[1244] an increased biomass production compared with the wild type control without showing any symptoms of injury for a period between 1 and 3 days is conferred in said organism.

[1245] Accordingly, in one embodiment, in case the activity of a polypeptide according to the polypeptide SEQ ID NO.: 6911,or encoded by a nucleic acid molecule comprising the nucleic acid SEQ ID NO.: 6910 or a homolog of said nucleic acid molecule or polypeptide, e.g. if the activity of a nucleic acid molecule or a polypeptide comprising the nucleic acid or polypeptide or the consensus sequence or the polypeptide motif, as depicted in Table I, II or IV, column 7 in the respective same line as the nucleic acid molecule SEQ ID NO.: 6910 or polypeptide SEQ ID NO.: 6911, respectively is increased or generated or if the activity “3-deoxy-D-arabino-heptulosonate-7-phosphate (DAHP) synthase” is increased or generated in an organism, preferably an increased drought resistance by surviving longer than the wild type control without showing any symptoms of injury for a period between 2.7 and 4 days or more and

[1246] an increased biomass production compared with the wild type control without showing any symptoms of injury for a period between 1.3 and 3 days is conferred in said organism.

[1247] Accordingly, in one embodiment, in case the activity of a polypeptide according to the polypeptide SEQ ID NO.: 7262,or encoded by a nucleic acid molecule comprising the nucleic acid SEQ ID NO.: 7261 or a homolog of said nucleic acid molecule or polypeptide, e.g. if the activity of a nucleic acid molecule or a polypeptide comprising the nucleic acid or polypeptide or the consensus sequence or the polypeptide motif, as depicted in Table I, II or IV, column 7 in the respective same line as the nucleic acid molecule SEQ ID NO.: 7261 or polypeptide SEQ ID NO.: 7262, respectively is increased or generated or if the activity “YELOO5C-protein” is increased or generated in an organism, preferably

[1248] an increased drought resistance by surviving longer than the wild type control without showing any symptoms of injury for a period between 3.6 and 6 days or more and

[1249] an increased biomass production compared with the wild type control without showing any symptoms of injury for a period between 1.1 and 4 days is conferred in said organism.

[1250] Accordingly, in one embodiment, in case the activity of a polypeptide according to the polypeptide SEQ ID NO.: 7266,or encoded by a nucleic acid molecule comprising the nucleic acid SEQ ID NO.: 7265 or a homolog of said nucleic acid molecule or polypeptide, e.g. if the activity of a nucleic acid molecule or a polypeptide comprising the nucleic acid or polypeptide or the consensus sequence or the polypeptide motif, as depicted in Table I, II or IV, column 7 in the respective same line as the nucleic acid molecule SEQ ID NO.: 7265 or polypeptide SEQ ID NO.: 7266, respectively is increased or generated or if the activity “Lsm (Like Sm) protein” is increased or generated in an organism, preferably

[1251] an increased drought resistance by surviving longer than the wild type control without showing any symptoms of injury for a period between 3.1 and 4 days or more and

[1252] an increased biomass production compared with the wild type control without showing any symptoms of injury for a period between 0.8 and 2 days is conferred in said organism.

[1253] Accordingly, in one embodiment, in case the activity of a polypeptide according to the polypeptide SEQ ID NO.: 7302,or encoded by a nucleic acid molecule comprising the nucleic acid SEQ ID NO.: 7301 or a homolog of said nucleic acid molecule or polypeptide, e.g. if the activity of a nucleic acid molecule or a polypeptide comprising the nucleic acid or polypeptide or the consensus sequence or the polypeptide motif, as depicted in Table I, II or IV, column 7 in the respective same line as the nucleic acid molecule SEQ ID NO.: 7301 or polypeptide SEQ ID NO.: 7302, respectively is increased or generated or if the activity “YER156C-protein” is increased or generated in an organism, preferably

[1254] an increased drought resistance by surviving longer than the wild type control without showing any symptoms of injury for a period between 2.2 and 4 days or more and

[1255] an increased biomass production compared with the wild type control without showing any symptoms of injury for a period between 0.1 and 0.1 days is conferred in said organism.

[1256] Accordingly, in one embodiment, in case the activity of a polypeptide according to the polypeptide SEQ ID NO.: 7385,or encoded by a nucleic acid molecule comprising the nucleic acid SEQ ID NO.: 7384 or a homolog of said nucleic acid molecule or polypeptide, e.g. if the activity of a nucleic acid molecule or a polypeptide comprising the nucleic acid or polypeptide or the consensus sequence or the polypeptide motif, as depicted in Table I, II or IV, column 7 in the respective same line as the nucleic acid molecule SEQ ID NO.: 7384 or polypeptide SEQ ID NO.: 7385, respectively is increased or generated or if the activity “Checkpoint protein” is increased or generated in an organism, preferably

[1257] an increased drought resistance by surviving longer than the wild type control without showing any symptoms of injury for a period between 4.3 and 5 days or more and

[1258] an increased biomass production compared with the wild type control without showing any symptoms of injury for a period between 0.2 and 1 days is conferred in said organism.

[1259] Accordingly, in one embodiment, in case the activity of a polypeptide according to the polypeptide SEQ ID NO.: 7408,or encoded by a nucleic acid molecule comprising the nucleic acid SEQ ID NO.: 7407 or a homolog of said nucleic acid molecule or polypeptide, e.g. if the activity of a nucleic acid molecule or a polypeptide comprising the nucleic acid or polypeptide or the consensus sequence or the polypeptide motif, as depicted in Table I, II or IV, column 7 in the respective same line as the nucleic acid molecule SEQ ID NO.: 7407 or polypeptide SEQ ID NO.: 7408, respectively is increased or generated or if the activity “YGL045W-protein” is increased or generated in an organism, preferably

[1260] an increased drought resistance by surviving longer than the wild type control without showing any symptoms of injury for a period between 3.3 and 4 days or more and

[1261] an increased biomass production compared with the wild type control without showing any symptoms of injury for a period between 1.2 and 4 days is conferred in said organism.

[1262] Accordingly, in one embodiment, in case the activity of a polypeptide according to the polypeptide SEQ ID NO.: 7430,or encoded by a nucleic acid molecule comprising the nucleic acid SEQ ID NO.: 7429 or a homolog of said nucleic acid molecule or polypeptide, e.g. if the activity of a nucleic acid molecule or a polypeptide comprising the nucleic acid or polypeptide or the consensus sequence or the polypeptide motif, as depicted in Table I, II or IV, column 7 in the respective same line as the nucleic acid molecule SEQ ID NO.: 7429 or polypeptide SEQ ID NO.: 7430, respectively is increased or generated or if the activity “Protein component of the small (40S) ribosomal subunit” is increased or generated in an organism, preferably

[1263] an increased drought resistance by surviving longer than the wild type control without showing any symptoms of injury for a period between 2.3 and 4 days or more and

[1264] an increased biomass production compared with the wild type control without showing any symptoms of injury for a period between 0.1 and 0.1 days is conferred in said organism.

[1265] Accordingly, in one embodiment, in case the activity of a polypeptide according to the polypeptide SEQ ID NO.: 7559,or encoded by a nucleic acid molecule comprising the nucleic acid SEQ ID NO.: 7558 or a homolog of said nucleic acid molecule or polypeptide, e.g. if the activity of a nucleic acid molecule or a polypeptide comprising the nucleic acid or polypeptide or the consensus sequence or the polypeptide motif, as depicted in Table I, II or IV, column 7 in the respective same line as the nucleic acid molecule SEQ ID NO.: 7558 or polypeptide SEQ ID NO.: 7559, respectively is increased or generated or if the activity “Dihydrouridine synthase” is increased or generated in an organism, preferably

[1266] an increased drought resistance by surviving longer than the wild type control without showing any symptoms of injury for a period between 4.5 and 7 days or more and

[1267] an increased biomass production compared with the wild type control without showing any symptoms of injury for a period between 0.1 and 0.1 days is conferred in said organism.

[1268] Accordingly, in one embodiment, in case the activity of a polypeptide according to the polypeptide SEQ ID NO.: 7607,or encoded by a nucleic acid molecule comprising the nucleic acid SEQ ID NO.: 7606 or a homolog of said nucleic acid molecule or polypeptide, e.g. if the activity of a nucleic acid molecule or a polypeptide comprising the nucleic acid or polypeptide or the consensus sequence or the polypeptide motif, as depicted in Table I, II or IV, column 7 in the respective same line as the nucleic acid molecule SEQ ID NO.: 7606 or polypeptide SEQ ID NO.: 7607, respectively is increased or generated or if the activity “YOR024w-protein” is increased or generated in an organism, preferably

[1269] an increased drought resistance by surviving longer than the wild type control without showing any symptoms of injury for a period between 4.8 and 5 days or more and

[1270] an increased biomass production compared with the wild type control without showing any symptoms of injury for a period between 0.6 and 3 days is conferred in said organism.

[1271] Accordingly, in one embodiment, in case the activity of a polypeptide according to the polypeptide SEQ ID NO.: 7611,or encoded by a nucleic acid molecule comprising the nucleic acid SEQ ID NO.: 7610 or a homolog of said nucleic acid molecule or polypeptide, e.g. if the activity of a nucleic acid molecule or a polypeptide comprising the nucleic acid or polypeptide or the consensus sequence or the polypeptide motif, as depicted in Table I, II or IV, column 7 in the respective same line as the nucleic acid molecule SEQ ID NO.: 7610 or polypeptide SEQ ID NO.: 7611, respectively is increased or generated or if the activity “Glutamine tRNA synthetase” is increased or generated in an organism, preferably

[1272] an increased drought resistance by surviving longer than the wild type control without showing any symptoms of injury for a period between 3.1 and 5 days or more and

[1273] an increased biomass production compared with the wild type control without showing any symptoms of injury for a period between 0.6 and 2 days is conferred in said organism.

[1274] Accordingly, in one embodiment, in case the activity of a polypeptide according to the polypeptide SEQ ID NO.: 7686,or encoded by a nucleic acid molecule comprising the nucleic acid SEQ ID NO.: 7685 or a homolog of said nucleic acid molecule or polypeptide, e.g. if the activity of a nucleic acid molecule or a polypeptide comprising the nucleic acid or polypeptide or the consensus sequence or the polypeptide motif, as depicted in Table I, II or IV, column 7 in the respective same line as the nucleic acid molecule SEQ ID NO.: 7685 or polypeptide SEQ ID NO.: 7686, respectively is increased or generated or if the activity “Splicing factor” is increased or generated in an organism, preferably

[1275] an increased drought resistance by surviving longer than the wild type control without showing any symptoms of injury for a period between 3.9 and 5 days or more and

[1276] an increased biomass production compared with the wild type control without showing any symptoms of injury for a period between 0.1 and 0.1 days is conferred in said organism.

[1277] Accordingly, in one embodiment, in case the activity of a polypeptide according to the polypeptide SEQ ID NO.: 1202,or encoded by a nucleic acid molecule comprising the nucleic acid SEQ ID NO.: 1201 or a homolog of said nucleic acid molecule or polypeptide, e.g. if the activity of a nucleic acid molecule or a polypeptide comprising the nucleic acid or polypeptide or the consensus sequence or the polypeptide motif, as depicted in Table I, II or IV, column 7 in the respective same line as the nucleic acid molecule SEQ ID NO.: 1201 or polypeptide SEQ ID NO.: 1202, respectively is increased or generated or if the activity “gamma-Glu-putrescine synthase” is increased or generated in an organism, preferably

[1278] an increased drought resistance by surviving longer than the wild type control without showing any symptoms of injury for a period between 2.1 and 3 days or more and

[1279] an increased biomass production compared with the wild type control without showing any symptoms of injury for a period between 1.1 and 2 days is conferred in said organism.

[1280] Accordingly, in one embodiment, in case the activity of a polypeptide according to the polypeptide SEQ ID NO.: 7742,or encoded by a nucleic acid molecule comprising the nucleic acid SEQ ID NO.: 7741 or a homolog of said nucleic acid molecule or polypeptide, e.g. if the activity of a nucleic acid molecule or a polypeptide comprising the nucleic acid or polypeptide or the consensus sequence or the polypeptide motif, as depicted in Table I, II or IV, column 7 in the respective same line as the nucleic acid molecule SEQ ID NO.: 7741 or polypeptide SEQ ID NO.: 7742, respectively is increased or generated or if the activity “inner membrane protein” is increased or generated in an organism, preferably

[1281] an increased drought resistance by surviving longer than the wild type control without showing any symptoms of injury for a period between 3.2 and 5 days or more and

[1282] an increased biomass production compared with the wild type control without showing any symptoms of injury for a period between 0.2 and 2 days is conferred in said organism.

[1283] Accordingly, in one embodiment, in case the activity of a polypeptide according to the polypeptide SEQ ID NO.: 7851,or encoded by a nucleic acid molecule comprising the nucleic acid SEQ ID NO.: 7850 or a homolog of said nucleic acid molecule or polypeptide, e.g. if the activity of a nucleic acid molecule or a polypeptide comprising the nucleic acid or polypeptide or the consensus sequence or the polypeptide motif, as depicted in Table I, II or IV, column 7 in the respective same line as the nucleic acid molecule SEQ ID NO.: 7850 or polypeptide SEQ ID NO.: 7851, respectively is increased or generated or if the activity “heat shock protein HtpX” is increased or generated in an organism, preferably

[1284] an increased drought resistance by surviving longer than the wild type control without showing any symptoms of injury for a period between 2.4 and 6 days or more and

[1285] an increased biomass production compared with the wild type control without showing any symptoms of injury for a period between 1 and 3 days is conferred in said organism.

[1286] Accordingly, in one embodiment, in case the activity of a polypeptide according to the polypeptide SEQ ID NO.: 7972,or encoded by a nucleic acid molecule comprising the nucleic acid SEQ ID NO.: 7971 or a homolog of said nucleic acid molecule or polypeptide, e.g. if the activity of a nucleic acid molecule or a polypeptide comprising the nucleic acid or polypeptide or the consensus sequence or the polypeptide motif, as depicted in Table I, II or IV, column 7 in the respective same line as the nucleic acid molecule SEQ ID NO.: 7971 or polypeptide SEQ ID NO.: 7972, respectively is increased or generated or if the activity “DNA-binding transcriptional dual regulator protein” is increased or generated in an organism, preferably

[1287] an increased drought resistance by surviving longer than the wild type control without showing any symptoms of injury for a period between 3.9 and 5 days or more and

[1288] an increased biomass production compared with the wild type control without showing any symptoms of injury for a period between 0.4 and 2 days is conferred in said organism.

[1289] Accordingly, in one embodiment, in case the activity of a polypeptide according to the polypeptide SEQ ID NO.: 8022,or encoded by a nucleic acid molecule comprising the nucleic acid SEQ ID NO.: 8021 or a homolog of said nucleic acid molecule or polypeptide, e.g. if the activity of a nucleic acid molecule or a polypeptide comprising the nucleic acid or polypeptide or the consensus sequence or the polypeptide motif, as depicted in Table I, II or IV, column 7 in the respective same line as the nucleic acid molecule SEQ ID NO.: 8021 or polypeptide SEQ ID NO.: 8022, respectively is increased or generated or if the activity “predicted serine transporter protein” is increased or generated in an organism, preferably

[1290] an increased drought resistance by surviving longer than the wild type control without showing any symptoms of injury for a period between 2.9 and 5 days or more and

[1291] an increased biomass production compared with the wild type control without showing any symptoms of injury for a period between 0.7 and 4 days is conferred in said organism.

[1292] Accordingly, in one embodiment, in case the activity of a polypeptide according to the polypeptide SEQ ID NO.: 8178,or encoded by a nucleic acid molecule comprising the nucleic acid SEQ ID NO.: 8177 or a homolog of said nucleic acid molecule or polypeptide, e.g. if the activity of a nucleic acid molecule or a polypeptide comprising the nucleic acid or polypeptide or the consensus sequence or the polypeptide motif, as depicted in Table I, II or IV, column 7 in the respective same line as the nucleic acid molecule SEQ ID NO.: 8177 or polypeptide SEQ ID NO.: 8178, respectively is increased or generated or if the activity “glutathione-dependent oxidoreductase” is increased or generated in an organism, preferably

[1293] an increased drought resistance by surviving longer than the wild type control without showing any symptoms of injury for a period between 4.5 and 5 days or more and

[1294] an increased biomass production compared with the wild type control without showing any symptoms of injury for a period between 0.1 and 0.1 days is conferred in said organism.

[1295] Accordingly, in one embodiment, in case the activity of a polypeptide according to the polypeptide SEQ ID NO.: 8273,or encoded by a nucleic acid molecule comprising the nucleic acid SEQ ID NO.: 8272 or a homolog of said nucleic acid molecule or polypeptide, e.g. if the activity of a nucleic acid molecule or a polypeptide comprising the nucleic acid or polypeptide or the consensus sequence or the polypeptide motif, as depicted in Table I, II or IV, column 7 in the respective same line as the nucleic acid molecule SEQ ID NO.: 8272 or polypeptide SEQ ID NO.: 8273, respectively is increased or generated or if the activity “Yfr042w-protein” is increased or generated in an organism, preferably

[1296] an increased drought resistance by surviving longer than the wild type control without showing any symptoms of injury for a period between 3.7 and 5 days or more and

[1297] an increased biomass production compared with the wild type control without showing any symptoms of injury for a period between 1 and 4 days is conferred in said organism.

[1298] Accordingly, in one embodiment, in case the activity of a polypeptide according to the polypeptide SEQ ID NO.: 8289,or encoded by a nucleic acid molecule comprising the nucleic acid SEQ ID NO.: 8288 or a homolog of said nucleic acid molecule or polypeptide, e.g. if the activity of a nucleic acid molecule or a polypeptide comprising the nucleic acid or polypeptide or the consensus sequence or the polypeptide motif, as depicted in Table I, II or IV, column 7 in the respective same line as the nucleic acid molecule SEQ ID NO.: 8288 or polypeptide SEQ ID NO.: 8289, respectively is increased or generated or if the activity “Protein component of the small (40S) ribosomal subunit” is increased or generated in an organism, preferably

[1299] an increased drought resistance by surviving longer than the wild type control without showing any symptoms of injury for a period between 3.3 and 5 days or more and

[1300] an increased biomass production compared with the wild type control without showing any symptoms of injury for a period between 1.9 and 4 days is conferred in said organism.

[1301] Accordingly, in one embodiment, in case the activity of a polypeptide according to the polypeptide SEQ ID NO.: 8439,or encoded by a nucleic acid molecule comprising the nucleic acid SEQ ID NO.: 8438 or a homolog of said nucleic acid molecule or polypeptide, e.g. if the activity of a nucleic acid molecule or a polypeptide comprising the nucleic acid or polypeptide or the consensus sequence or the polypeptide motif, as depicted in Table I, II or IV, column 7 in the respective same line as the nucleic acid molecule SEQ ID NO.: 8438 or polypeptide SEQ ID NO.: 8439, respectively is increased or generated or if the activity “transcriptional regulator protein” is increased or generated in an organism, preferably

[1302] an increased drought resistance by surviving longer than the wild type control without showing any symptoms of injury for a period between 2.8 and 5 days or more and

[1303] an increased biomass production compared with the wild type control without showing any symptoms of injury for a period between 0.8 and 4 days is conferred in said organism.

[1304] Accordingly, in one embodiment, in case the activity of a polypeptide according to the polypeptide SEQ ID NO.: 8631,or encoded by a nucleic acid molecule comprising the nucleic acid SEQ ID NO.: 8630 or a homolog of said nucleic acid molecule or polypeptide, e.g. if the activity of a nucleic acid molecule or a polypeptide comprising the nucleic acid or polypeptide or the consensus sequence or the polypeptide motif, as depicted in Table I, II or IV, column 7 in the respective same line as the nucleic acid molecule SEQ ID NO.: 8630 or polypeptide SEQ ID NO.: 8631, respectively is increased or generated or if the activity “predicted oxidoreductase (flavin:NADH component)” is increased or generated in an organism, preferably

[1305] an increased drought resistance by surviving longer than the wild type control without showing any symptoms of injury for a period between 3.3 and 6 days or more and

[1306] an increased biomass production compared with the wild type control without showing any symptoms of injury for a period between 0.6 and 2 days is conferred in said organism.

[1307] Accordingly, in one embodiment, in case the activity of a polypeptide according to the polypeptide SEQ ID NO.: 9269,or encoded by a nucleic acid molecule comprising the nucleic acid SEQ ID NO.: 9268 or a homolog of said nucleic acid molecule or polypeptide, e.g. if the activity of a nucleic acid molecule or a polypeptide comprising the nucleic acid or polypeptide or the consensus sequence or the polypeptide motif, as depicted in Table I, II or IV, column 7 in the respective same line as the nucleic acid molecule SEQ ID NO.: 9268 or polypeptide SEQ ID NO.: 9269, respectively is increased or generated or if the activity “cellobiose/arbutin/salicin-specific PTS enzyme (IIB component/IC component)” is increased or generated in an organism, preferably an increased drought resistance by surviving longer than the wild type control without showing any symptoms of injury for a period between 4 and 5 days or more and

[1308] an increased biomass production compared with the wild type control without showing any symptoms of injury for a period between 0.4 and 2 days is conferred in said organism.

[1309] Accordingly, in one embodiment, in case the activity of a polypeptide according to the polypeptide SEQ ID NO.: 9445,or encoded by a nucleic acid molecule comprising the nucleic acid SEQ ID NO.: 9444 or a homolog of said nucleic acid molecule or polypeptide, e.g. if the activity of a nucleic acid molecule or a polypeptide comprising the nucleic acid or polypeptide or the consensus sequence or the polypeptide motif, as depicted in Table I, II or IV, column 7 in the respective same line as the nucleic acid molecule SEQ ID NO.: 9444 or polypeptide SEQ ID NO.: 9445, respectively is increased or generated or if the activity “predicted PTS enzymes (IIB component/IIC component)” is increased or generated in an organism, preferably

[1310] an increased drought resistance by surviving longer than the wild type control without showing any symptoms of injury for a period between 2.5 and 4 days or more and

[1311] an increased biomass production compared with the wild type control without showing any symptoms of injury for a period between 0.8 and 3 days is conferred in said organism.

[1312] Accordingly, in one embodiment, in case the activity of a polypeptide according to the polypeptide SEQ ID NO.: 9825,or encoded by a nucleic acid molecule comprising the nucleic acid SEQ ID NO.: 9824 or a homolog of said nucleic acid molecule or polypeptide, e.g. if the activity of a nucleic acid molecule or a polypeptide comprising the nucleic acid or polypeptide or the consensus sequence or the polypeptide motif, as depicted in Table I, II or IV, column 7 in the respective same line as the nucleic acid molecule SEQ ID NO.: 9824 or polypeptide SEQ ID NO.: 9825, respectively is increased or generated or if the activity “nicotinamide-nucleotide adenylyltransferase” is increased or generated in an organism, preferably

[1313] an increased drought resistance by surviving longer than the wild type control without showing any symptoms of injury for a period between 3.5 and 6 days or more and

[1314] an increased biomass production compared with the wild type control without showing any symptoms of injury for a period between 0.8 and 3 days is conferred in said organism.

[1315] Accordingly, in one embodiment, in case the activity of a polypeptide according to the polypeptide SEQ ID NO.: 9906,or encoded by a nucleic acid molecule comprising the nucleic acid SEQ ID NO.: 9905 or a homolog of said nucleic acid molecule or polypeptide, e.g. if the activity of a nucleic acid molecule or a polypeptide comprising the nucleic acid or polypeptide or the consensus sequence or the polypeptide motif, as depicted in Table I, II or IV, column 7 in the respective same line as the nucleic acid molecule SEQ ID NO.: 9905 or polypeptide SEQ ID NO.: 9906, respectively is increased or generated or if the activity “YGL045W-protein” is increased or generated in an organism, preferably

[1316] an increased drought resistance by surviving longer than the wild type control without showing any symptoms of injury for a period between 3.3 and 4 days or more and

[1317] an increased biomass production compared with the wild type control without showing any symptoms of injury for a period between 1.2 and 4 days is conferred in said organism.

[1318] Accordingly, in one embodiment, in case the activity of a polypeptide according to the polypeptide SEQ ID NO.: 9194,or encoded by a nucleic acid molecule comprising the nucleic acid SEQ ID NO.: 9193 or a homolog of said nucleic acid molecule or polypeptide, e.g. if the activity of a nucleic acid molecule or a polypeptide comprising the nucleic acid or polypeptide or the consensus sequence or the polypeptide motif, as depicted in Table I, II or IV, column 7 in the respective same line as the nucleic acid molecule SEQ ID NO.: 9193 or polypeptide SEQ ID NO.: 9194, respectively is increased or generated or if the activity “DNA-binding transcriptional dual regulator protein” is increased or generated in an organism, preferably

[1319] an increased drought resistance by surviving longer than the wild type control without showing any symptoms of injury for a period between 3.9 and 5 days or more and

[1320] an increased biomass production compared with the wild type control without showing any symptoms of injury for a period between 0.4 and 2 days is conferred in said organism.

[1321] Accordingly, in one embodiment, in case the activity of a polypeptide according to the polypeptide SEQ ID NO.: 8498,or encoded by a nucleic acid molecule comprising the nucleic acid SEQ ID NO.: 8497 or a homolog of said nucleic acid molecule or polypeptide, e.g. if the activity of a nucleic acid molecule or a polypeptide comprising the nucleic acid or polypeptide or the consensus sequence or the polypeptide motif, as depicted in Table I, II or IV, column 7 in the respective same line as the nucleic acid molecule SEQ ID NO.: 8497 or polypeptide SEQ ID NO.: 8498, respectively is increased or generated or if the activity “methylglyoxal synthase” is increased or generated in an organism, preferably

[1322] an increased drought resistance by surviving longer than the wild type control without showing any symptoms of injury for a period between 4.4 and 5 days or more and

[1323] an increased biomass production compared with the wild type control without showing any symptoms of injury for a period between 0.5 and 2 days is conferred in said organism.

[1324] Accordingly, in one embodiment, in case the activity of a polypeptide according to the polypeptide SEQ ID NO.: 8743,or encoded by a nucleic acid molecule comprising the nucleic acid SEQ ID NO.: 8742 or a homolog of said nucleic acid molecule or polypeptide, e.g. if the activity of a nucleic acid molecule or a polypeptide comprising the nucleic acid or polypeptide or the consensus sequence or the polypeptide motif, as depicted in Table I, II or IV, column 7 in the respective same line as the nucleic acid molecule SEQ ID NO.: 8742 or polypeptide SEQ ID NO.: 8743, respectively is increased or generated or if the activity “gamma-Glu-putrescine synthase” is increased or generated in an organism, preferably

[1325] an increased drought resistance by surviving longer than the wild type control without showing any symptoms of injury for a period between 2.1 and 3 days or more and

[1326] an increased biomass production compared with the wild type control without showing any symptoms of injury for a period between 1.1 and 2 days is conferred in said organism.

[1327] Accordingly, in one embodiment, in case the activity of a polypeptide according to the polypeptide SEQ ID NO.: 8892,or encoded by a nucleic acid molecule comprising the nucleic acid SEQ ID NO.: 8891 or a homolog of said nucleic acid molecule or polypeptide, e.g. if the activity of a nucleic acid molecule or a polypeptide comprising the nucleic acid or polypeptide or the consensus sequence or the polypeptide motif, as depicted in Table I, II or IV, column 7 in the respective same line as the nucleic acid molecule SEQ ID NO.: 8891 or polypeptide SEQ ID NO.: 8892, respectively is increased or generated or if the activity “acid shock protein precursor” is increased or generated in an organism, preferably

[1328] an increased drought resistance by surviving longer than the wild type control without showing any symptoms of injury for a period between 3.7 and 5 days or more and

[1329] an increased biomass production compared with the wild type control without showing any symptoms of injury for a period between 0.1 and 1 days is conferred in said organism.

[1330] Accordingly, in one embodiment, in case the activity of a polypeptide according to the polypeptide SEQ ID NO.: 9032,or encoded by a nucleic acid molecule comprising the nucleic acid SEQ ID NO.: 9031 or a homolog of said nucleic acid molecule or polypeptide, e.g. if the activity of a nucleic acid molecule or a polypeptide comprising the nucleic acid or polypeptide or the consensus sequence or the polypeptide motif, as depicted in Table I, II or IV, column 7 in the respective same line as the nucleic acid molecule SEQ ID NO.: 9031 or polypeptide SEQ ID NO.: 9032, respectively is increased or generated or if the activity “regulator of length of O-antigen component of lipopolysaccharide chains ” is increased or generated in an organism, preferably an increased drought resistance by surviving longer than the wild type control without showing any symptoms of injury for a period between 2.6 and 4 days or more and

[1331] an increased biomass production compared with the wild type control without showing any symptoms of injury for a period between 0.3 and 2 days is conferred in said organism.

[1332] Accordingly, in one embodiment, in case the activity of a polypeptide according to the polypeptide SEQ ID NO.: 9316,or encoded by a nucleic acid molecule comprising the nucleic acid SEQ ID NO.: 9315 or a homolog of said nucleic acid molecule or polypeptide, e.g. if the activity of a nucleic acid molecule or a polypeptide comprising the nucleic acid or polypeptide or the consensus sequence or the polypeptide motif, as depicted in Table I, II or IV, column 7 in the respective same line as the nucleic acid molecule SEQ ID NO.: 9315 or polypeptide SEQ ID NO.: 9316, respectively is increased or generated or if the activity “ornithine decarboxylase” is increased or generated in an organism, preferably

[1333] an increased drought resistance by surviving longer than the wild type control without showing any symptoms of injury for a period between 3.8 and 5 days or more and

[1334] an increased biomass production compared with the wild type control without showing any symptoms of injury for a period between 0.7 and 3 days is conferred in said organism.

[1335] Accordingly, in one embodiment, in case the activity of a polypeptide according to the polypeptide SEQ ID NO.: 9530,or encoded by a nucleic acid molecule comprising the nucleic acid SEQ ID NO.: 9529 or a homolog of said nucleic acid molecule or polypeptide, e.g. if the activity of a nucleic acid molecule or a polypeptide comprising the nucleic acid or polypeptide or the consensus sequence or the polypeptide motif, as depicted in Table I, II or IV, column 7 in the respective same line as the nucleic acid molecule SEQ ID NO.: 9529 or polypeptide SEQ ID NO.: 9530, respectively is increased or generated or if the activity “aspartate ammonia-lyase ” is increased or generated in an organism, preferably

[1336] an increased drought resistance by surviving longer than the wild type control without showing any symptoms of injury for a period between 3.1 and 5 days or more and

[1337] an increased biomass production compared with the wild type control without showing any symptoms of injury for a period between 1.6 and 4 days is conferred in said organism.

[1338] Accordingly, in one embodiment, in case the activity of a polypeptide according to the polypeptide SEQ ID NO.: 8463,or encoded by a nucleic acid molecule comprising the nucleic acid SEQ ID NO.: 8462 or a homolog of said nucleic acid molecule or polypeptide, e.g. if the activity of a nucleic acid molecule or a polypeptide comprising the nucleic acid or polypeptide or the consensus sequence or the polypeptide motif, as depicted in Table I, II or IV, column 7 in the respective same line as the nucleic acid molecule SEQ ID NO.: 8462 or polypeptide SEQ ID NO.: 8463, respectively is increased or generated or if the activity “predicted transporter protein” is increased or generated in an organism, preferably

[1339] an increased drought resistance by surviving longer than the wild type control without showing any symptoms of injury for a period between 2.2 and 5 days or more and

[1340] an increased biomass production compared with the wild type control without showing any symptoms of injury for a period between 1 and 4 days is conferred in said organism.

[1341] Accordingly, in one embodiment, in case the activity of a polypeptide according to the polypeptide SEQ ID NO.: 8974,or encoded by a nucleic acid molecule comprising the nucleic acid SEQ ID NO.: 8973 or a homolog of said nucleic acid molecule or polypeptide, e.g. if the activity of a nucleic acid molecule or a polypeptide comprising the nucleic acid or polypeptide or the consensus sequence or the polypeptide motif, as depicted in Table I, II or IV, column 7 in the respective same line as the nucleic acid molecule SEQ ID NO.: 8973 or polypeptide SEQ ID NO.: 8974, respectively is increased or generated or if the activity “L-arabinose transporter subunit” is increased or generated in an organism, preferably

[1342] an increased drought resistance by surviving longer than the wild type control without showing any symptoms of injury for a period between 2.8 and 4 days or more and

[1343] an increased biomass production compared with the wild type control without showing any symptoms of injury for a period between 1.8 and 3 days is conferred in said organism.

[1344] Accordingly, in one embodiment, in case the activity of a polypeptide according to the polypeptide SEQ ID NO.: 9884,or encoded by a nucleic acid molecule comprising the nucleic acid SEQ ID NO.: 9883 or a homolog of said nucleic acid molecule or polypeptide, e.g. if the activity of a nucleic acid molecule or a polypeptide comprising the nucleic acid or polypeptide or the consensus sequence or the polypeptide motif, as depicted in Table I, II or IV, column 7 in the respective same line as the nucleic acid molecule SEQ ID NO.: 9883 or polypeptide SEQ ID NO.: 9884, respectively is increased or generated or if the activity “Lsm (Like Sm) protein” is increased or generated in an organism, preferably

[1345] an increased drought resistance by surviving longer than the wild type control without showing any symptoms of injury for a period between 3.1 and 4 days or more and

[1346] an increased biomass production compared with the wild type control without showing any symptoms of injury for a period between 0.8 and 2 days is conferred in said organism.

[1347] Accordingly, in one embodiment, in case the activity of a polypeptide according to the polypeptide SEQ ID NO.: 8935,or encoded by a nucleic acid molecule comprising the nucleic acid SEQ ID NO.: 8934 or a homolog of said nucleic acid molecule or polypeptide, e.g. if the activity of a nucleic acid molecule or a polypeptide comprising the nucleic acid or polypeptide or the consensus sequence or the polypeptide motif, as depicted in Table I, II or IV, column 7 in the respective same line as the nucleic acid molecule SEQ ID NO.: 8934 or polypeptide SEQ ID NO.: 8935, respectively is increased or generated or if the activity “neutral amino-acid efflux system” is increased or generated in an organism, preferably

[1348] an increased drought resistance by surviving longer than the wild type control without showing any symptoms of injury for a period between 3.4 and 5 days or more and

[1349] an increased biomass production compared with the wild type control without showing any symptoms of injury for a period between 1 and 4 days is conferred in said organism.

[1350] Accordingly, in one embodiment, in case the activity of a polypeptide according to the polypeptide SEQ ID NO.: 9094,or encoded by a nucleic acid molecule comprising the nucleic acid SEQ ID NO.: 9093 or a homolog of said nucleic acid molecule or polypeptide, e.g. if the activity of a nucleic acid molecule or a polypeptide comprising the nucleic acid or polypeptide or the consensus sequence or the polypeptide motif, as depicted in Table I, II or IV, column 7 in the respective same line as the nucleic acid molecule SEQ ID NO.: 9093 or polypeptide SEQ ID NO.: 9094, respectively is increased or generated or if the activity “b2226-protein” is increased or generated in an organism, preferably

[1351] an increased drought resistance by surviving longer than the wild type control without showing any symptoms of injury for a period between 2.9 and 4 days or more and

[1352] an increased biomass production compared with the wild type control without showing any symptoms of injury for a period between 1.6 and 4 days is conferred in said organism.

[1353] Accordingly, in one embodiment, in case the activity of a polypeptide according to the polypeptide SEQ ID NO.: 9110,or encoded by a nucleic acid molecule comprising the nucleic acid SEQ ID NO.: 9109 or a homolog of said nucleic acid molecule or polypeptide, e.g. if the activity of a nucleic acid molecule or a polypeptide comprising the nucleic acid or polypeptide or the consensus sequence or the polypeptide motif, as depicted in Table I, II or IV, column 7 in the respective same line as the nucleic acid molecule SEQ ID NO.: 9109 or polypeptide SEQ ID NO.: 9110, respectively is increased or generated or if the activity “sensory histidine kinase in two-component regulatory system with NarP (NarL)” is increased or generated in an organism, preferably an increased drought resistance by surviving longer than the wild type control without showing any symptoms of injury for a period between 2.2 and 5 days or more and

[1354] an increased biomass production compared with the wild type control without showing any symptoms of injury for a period between 0.9 and 3 days is conferred in said organism.

[1355] Accordingly, in one embodiment, in case the activity of a polypeptide according to the polypeptide SEQ ID NO.: 9932,or encoded by a nucleic acid molecule comprising the nucleic acid SEQ ID NO.: 9931 or a homolog of said nucleic acid molecule or polypeptide, e.g. if the activity of a nucleic acid molecule or a polypeptide comprising the nucleic acid or polypeptide or the consensus sequence or the polypeptide motif, as depicted in Table I, II or IV, column 7 in the respective same line as the nucleic acid molecule SEQ ID NO.: 9931 or polypeptide SEQ ID NO.: 9932, respectively is increased or generated or if the activity “Glutamine tRNA synthetase” is increased or generated in an organism, preferably

[1356] an increased drought resistance by surviving longer than the wild type control without showing any symptoms of injury for a period between 3.1 and 5 days or more and

[1357] an increased biomass production compared with the wild type control without showing any symptoms of injury for a period between 0.6 and 2 days is conferred in said organism.

[1358] Accordingly, in one embodiment, in case the activity of a polypeptide according to the polypeptide SEQ ID NO.: 10097,or encoded by a nucleic acid molecule comprising the nucleic acid SEQ ID NO.: 10096 or a homolog of said nucleic acid molecule or polypeptide, e.g. if the activity of a nucleic acid molecule or a polypeptide comprising the nucleic acid or polypeptide or the consensus sequence or the polypeptide motif, as depicted in Table I, II or IV, column 7 in the respective same line as the nucleic acid molecule SEQ ID NO.: 10096 or polypeptide SEQ ID NO.: 10097, respectively is increased or generated or if the activity “gluconate transporter” is increased or generated in an organism, preferably

[1359] an increased drought resistance by surviving longer than the wild type control without showing any symptoms of injury for a period between 2.5 and 4 days or more and

[1360] an increased biomass production compared with the wild type control without showing any symptoms of injury for a period between 0.8 and 3 days is conferred in said organism.

[1361] In this embodiment, said molecule, which activity is to be increased in the process of the invention and which is the gene product with an activity of described as a “glutathione-dependent oxidoreductase”, is expressed non-targeted by using the constituteive promoter.

[1362] In one embodiment, according to the method of the invention for an increased tolerance and/or resistance to low temperatur stress and increased biomass production in a plant cell, plant or a part thereof compared to a control or wild type can be achieved.

[1363] Accordingly, in one embodiment, in case the activity of a polypeptide according to the polypeptide SEQ ID NO.: 8178,or encoded by a nucleic acid molecule comprising the nucleic acid SEQ ID NO.: 8177 or a homolog of said nucleic acid molecule or polypeptide, e.g. if the activity of a nucleic acid molecule or a polypeptide comprising the nucleic acid or polypeptide or the consensus sequence or the polypeptide motif, as depicted in Table I, II or IV, column 7 in the respective same line as the nucleic acid molecule SEQ ID NO.: 8177 or polypeptide SEQ ID NO.: 8178, respectively is increased or generated or if the activity “glutathione-dependent oxidoreductase” is increased or generated in an organism, preferably

[1364] an increased low temperature resistance, preferably chilling resistance, by an increased biomass production compared with the wild type control of 5% to 100% or even more, preferably 10% to 90%, 20% to 80%, more preferably 25% to 60%, 35% to 50%, 38% to 45% is conferred in said organism.

[1365] In this embodiment, said molecule, which activity is to be increased in the process of the invention and which is the gene product with an activity of described as a “glutathione-dependent oxidoreductase”, is expressed non-targeted by using the promoter USP (Baumlein et al., Mol Gen Genet. 225(3):459-67 (1991)).

[1366] In one embodiment, according to the method of the invention for an increased tolerance and/or resistance to cycling drought stress and increased biomass production in a plant cell, plant or a part thereof compared to a control or wild type can be achieved.

[1367] Accordingly, in one embodiment, in case the activity of a polypeptide according to the polypeptide SEQ ID NO.: 8178,or encoded by a nucleic acid molecule comprising the nucleic acid SEQ ID NO.: 8177 or a homolog of said nucleic acid molecule or polypeptide, e.g. if the activity of a nucleic acid molecule or a polypeptide comprising the nucleic acid or polypeptide or the consensus sequence or the polypeptide motif, as depicted in Table I, II or IV, column 7 in the respective same line as the nucleic acid molecule SEQ ID NO.: 8177 or polypeptide SEQ ID NO.: 8178, respectively is increased or generated or if the activity “glutathione-dependent oxidoreductase” is increased or generated in an organism, preferably

[1368] an increased resistance to cycling drought, by an increased biomass production compared with the wild type control of 5% to 100% or even more, preferably 10% to 50%, 15% to 40%, more preferably 20% to 30%, 21% to 28%, 21% to 27% is conferred in said organism.

[1369] In this embodiment, said molecule, which activity is to be increased in the process of the invention and which is the gene product with an activity of described as a “glutathione-dependent oxidoreductase”, is expressed plastidic by using the constitutive promoter.

[1370] In one embodiment, according to the method of the invention an increased biomass production in a plant cell, plant or a part thereof compared to a control or wild type can be achieved.

[1371] Accordingly, in one embodiment, in case the activity of a polypeptide according to the polypeptide SEQ ID NO.: 8178,or encoded by a nucleic acid molecule comprising the nucleic acid SEQ ID NO.: 8177 or a homolog of said nucleic acid molecule or polypeptide, e.g. if the activity of a nucleic acid molecule or a polypeptide comprising the nucleic acid or polypeptide or the consensus sequence or the polypeptide motif, as depicted in Table I, II or IV, column 7 in the respective same line as the nucleic acid molecule SEQ ID NO.: 8177 or polypeptide SEQ ID NO.: 8178, respectively is increased or generated or if the activity “glutathione-dependent oxidoreductase” is increased or generated in an organism, preferably

[1372] an increased biomass production compared with the wild type control of 5% to 100% or even more, preferably 10% to 90%, 20% to 80%, more preferably 30% to 70%, 35% to 60%, 40% to 50%, 41% to 45% is conferred in said organism.

[1373] In this embodiment, said molecule, which activity is to be increased in the process of the invention and which is the gene product with an activity of described as a “glutathione-dependent oxidoreductase”, is expressed non-targeted by using the promoter USP.

[1374] In one embodiment, according to the method of the invention an increased resistance to limited nutrient, preferably nitrogen availability by enhanced NUE and an increased biomass production in a plant cell, plant or a part thereof compared to a control or wild type can be achieved.

[1375] Accordingly, in one embodiment, in case the activity of a polypeptide according to the polypeptide SEQ ID NO.: 8178, or encoded by a nucleic acid molecule comprising the nucleic acid SEQ ID NO.: 8177 or a homolog of said nucleic acid molecule or polypeptide, e.g. if the activity of a nucleic acid molecule or a polypeptide comprising the nucleic acid or polypeptide or the consensus sequence or the polypeptide motif, as depicted in Table I, II or IV, column 7 in the respective same line as the nucleic acid molecute SEQ ID NO.: 8177 or polypeptide SEQ ID NO.: 8178, respectively is increased or generated or if the activity “glutathione-dependent oxidoreductase” is increased or generated in an organism, preferably

[1376] an increased biomass production compared with the wild type control of 5% to 100% or even more, preferably 10% to 90%, 20% to 80%, more preferably 25% to 65%, 30% to 60%, is conferred in said organism.

[1377] In this embodiment, said molecule, which activity is to be increased in the process of the invention and which is the gene product with an activity of described as a “glutathione-dependent oxidoreductase”, is expressed non-targeted by using the constituteive promoter.

[1378] In one embodiment, said molecule, which activity is to be increased in the process of the invention and which is the gene product with an activity of described as a “glutathione-dependent oxidoreductase”, is selected from the group consisting of the polypeptides with the with the SEQ IDs NO: 8180, 8182, 8188, 8190, 8198, 8200, 8212, 8214, 8216, 8218, 8234, 8236, 8238, 8240, 8242, 8244, 8246, 8248, 8250, 8252, 8254, 8256, 8258, 8260, 8262, 8264, 8266, 10083 encoded by the SEQ IDs NO: 8179, 8181, 8187, 8189, 8197, 8199, 8211, 8213, 8215, 8217, 8233, 8235, 8237, 8239, 8241, 8243, 8245, 8247, 8249, 8251, 8253, 8255, 8257, 8259, 8261, 8263, 8265, 10082 respectively.

[1379] The term “expression” refers to the transcription and/or translation of a codogenic gene segment or gene. As a rule, the resulting product is an mRNA or a protein. However, expression products can also include functional RNAs such as, for example, antisense, nucleic acids, tRNAs, snRNAs, rRNAs, RNAi, siRNA, ribozymes etc. Expression may be systemic, local or temporal, for example limited to certain cell types, tissues organs or organelles or time periods.

[1380] In one embodiment, the process of the present invention comprises one or more of the following steps

[1381] a) stabilizing a protein conferring the increased expression of a protein encoded by the nucleic acid molecule of the invention or of the polypeptid of the invention having the herein-mentioned activity selected from the group consisting of 2,3-dihydroxy-2,3-dihydrophenylpropionatedehydrogenase, 3-deoxy-D-arabino-heptulosonate-7-phosphate (DAHP) synthase, 3-deoxy-D-arabino-heptulosonate-7-phosphatesynthase, 3-oxoacyl-(acyl carrier protein) synthase, acid shock protein pre-cursor, aspartate ammonia-lyase, b0081-protein, b0482-protein, b0631-protein, b0753-protein, b0866-protein, b1052-protein, b1161-protein, b1423-protein, b1878-protein, b2226-protein, b2475-protein, cellobiose/arbutin/salicin-specific PTS enzyme (IIB component/IC component), Checkpoint protein, CP4-57 prophage/RNase LS, Dihydrouridine synthase, DNA-binding transcriptional dual regulator protein, D-xylose transporter subunit, gamma-Glu-putrescine synthase, gluconate transporter, glucose-1-phosphate thymidylyltransferase, Glutamine tRNA synthetase, glutathione-dependent oxidoreductase, glycine betaine transporter subunit protein, glycogen synthase, GTP cyclohydrolase I, heat shock protein, heat shock protein HtpX, heme lyase (CcmH sub-unit), hexuronate transporter, histidine/lysine/arginine/ornithine transporter subunit protein, HyaA/HyaB-processing protein, inner membrane protein, L-arabinose transporter subunit, Lsm (Like Sm) protein, L-threonine 3-dehydrogenase, methylglyoxal synthase, multidrug efflux system (subunit B), N,N′-diacetylchitobiose-specific enzyme IIA component of PTS, NADH dehydrogenase (subunit N), neutral amino-acid efflux system, nicotinamide-nucleotide adenylyltransferase, ornithine decarboxylase, pantothenate kinase, peptidyl-prolyl cis-trans isomerase A (rotamase A), phosphate transporter, phosphatidylglycerophosphate synthetase, polyphosphate kinase, potassium-transporting ATPase (subunit B), predicted antimicrobial peptide transporter subunit, predicted arginine/ornithine transporter, predicted hydrolase, predicted kinase, predicted ligase, predicted outer membrane lipoprotein, predicted oxidoreductase (flavin:NADH component), predicted porin, predicted PTS enzymes (IIB component/IIC component), predicted serine transporter protein, predicted transporter protein, Protein component of the small (40S) ribosomal subunit, regulator of length of O-antigen component of lipopolysaccharide chains , ribonuclease activity regulator protein RraA, sensory histidine kinase in two-component regulatory system with NarP (NarL), sodium/proton antiporter, Splicing factor, threonine and homoserine efflux system, transcriptional regulator protein, transcriptional repressor protein MetJ, transporter subunit/periplasmic-binding component of ABC superfamily, tRNA pseudouridine synthase, tRNA-specific adenosine deaminase, universal stress protein UP12, Ya1049c-protein, YCR059C-protein, YEL005C-protein, YER156C-protein, Yfr042w-protein, YGL045W-protein, and YOR024w-protein and confering an increased tolerance and/or resistance to environmental stress and increased biomass production as compared to a corresponding non-transformed wild type plant cell, plant or part thereof;

[1382] b) stabilizing a mRNA conferring the increased expression of a protein encoded by the nucleic acid molecule of the invention or its homologs or of a mRNA encoding the polypeptide of the present invention having the herein-mentioned activity selected from the group consisting of 2,3-dihydroxy-2,3-dihydrophenylpropionatedehydrogenase, 3-deoxy-D-arabino-heptulosonate-7-phosphate (DAHP) synthase, 3-deoxy-D-arabino-heptulosonate-7-phosphatesynthase, 3-oxoacyl-(acyl carrier protein) synthase, acid shock protein precursor, aspartate ammonia-lyase, b0081-protein, b0482-protein, b0631-protein, b0753-protein, b0866-protein, b1052-protein, b1161-protein, b1423-protein, b1878-protein, b2226-protein, b2475-protein, cellobiose/arbutin/salicin-specific PTS enzyme (IIB component/IC component), Checkpoint protein, CP4-57 prophage/RNase LS, Dihydrouridine synthase, DNA-binding transcriptional dual regulator protein, D-xylose transporter subunit, gamma-Glu-putrescine synthase, gluconate transporter, glucose-1-phosphate thymidylyl-transferase, Glutamine tRNA synthetase, glutathione-dependent oxidoreductase, glycine betaine transporter subunit protein, glycogen synthase, GTP cyclohydrolase 1, heat shock protein, heat shock protein HtpX, heme lyase (CcmH subunit), hexuronate transporter, histidine/lysine/arginine/ornithine transporter subunit protein, HyaA/HyaB-processing protein, inner membrane protein, L-arabinose transporter subunit, Lsm (Like Sm) protein, L-threonine 3-dehydrogenase, methylglyoxal synthase, multidrug efflux system (subunit B), N,N′-diacetylchitobiose-specific enzyme IIA component of PTS, NADH dehydrogenase (subunit N), neutral amino-acid efflux system, nicotinamide-nucleotide adenylyltransferase, ornithine decarboxylase, pantothenate kinase, peptidyl-prolyl cis-trans isomerase A (rotamase A), phosphate transporter, phosphatidylglycerophosphate synthetase, polyphosphate kinase, potassium-transporting ATPase (sub-unit B), predicted antimicrobial peptide transporter subunit, predicted arginine/ornithine transporter, predicted hydrolase, predicted kinase, predicted ligase, predicted outer membrane lipoprotein, predicted oxidoreductase (flavin:NADH component), predicted porin, predicted PTS enzymes (IIB component/IIC component), predicted serine transporter protein, predicted transporter protein, Protein component of the small (40S) ribosomal subunit, regulator of length of O-antigen component of lipopolysaccharide chains, ribonuclease activity regulator protein RraA, sensory histidine kinase in two-component regulatory system with NarP (NarL), sodium/proton antiporter, Splicing factor, threonine and homoserine efflux system, transcriptional regulator protein, transcriptional repressor protein MetJ, transporter subunit/periplasmic-binding component of ABC superfamily, tRNA pseudouridine synthase, tRNA-specific adenosine deaminase, universal stress protein UP12, Ya1049c-protein, YCR059C-protein, YEL005C-protein, YER156C-protein, Yfr042w-protein, YGL045W-protein, and YOR024w-protein and confering an increased tolerance and/or resistance to environmental stress and increased biomass production as compared to a corresponding non-transformed wild type plant cell, plant or part thereof;

[1383] c) increasing the specific activity of a protein conferring the increased expression of a protein encoded by the nucleic acid molecule of the invention or of the polypeptide of the present invention or decreasing the inhibitory regulation of the polypeptide of the invention;

[1384] d) generating or increasing the expression of an endogenous or artificial transcription factor mediating the expression of a protein conferring the increased expression of a protein encoded by the nucleic acid molecule of the invention or of the polypeptide of the invention having the herein-mentioned activity selected from the group consisting of 2,3-dihydroxy-2,3-dihydrophenylpropionatedehydrogenase, 3-deoxy-D-arabino-heptulosonate-7-phosphate (DAHP) synthase, 3-deoxy-D-arabino-heptulosonate-7-phosphatesynthase, 3-oxoacyl-(acyl carrier protein) synthase, acid shock protein precursor, aspartate ammonia-lyase, b0081-protein, b0482-protein, b0631-protein, b0753-protein, b0866-protein, b1052-protein, b1161-protein, b1423-protein, b1878-protein, b2226-protein, b2475-protein, cellobiose/arbutin/salicin-specific PTS enzyme (IIB component/IC component), Checkpoint protein, CP4-57 prophage/RNase LS, Dihydrouridine synthase, DNA-binding transcriptional dual regulator protein, D-xylose transporter subunit, gamma-Glu-putrescine synthase, gluconate transporter, glucose-1-phosphate thymidylyltransferase, Glutamine tRNA synthetase, glutathione-dependent oxidoreductase, glycine betaine transporter subunit protein, glycogen synthase, GTP cyclohydrolase I, heat shock protein, heat shock protein HtpX, heme lyase (CcmH subunit), hexuronate transporter, histidine/lysine/arginine/ornithine transporter subunit protein, HyaA/HyaB-processing protein, inner membrane protein, L-arabinose transporter subunit, Lsm (Like Sm) protein, L-threonine 3-dehydrogenase, methylglyoxal synthase, multidrug efflux system (subunit B), N,N′-diacetylchitobiose-specific enzyme IIA component of PTS, NADH dehydrogenase (subunit N), neutral amino-acid efflux system, nicotinamide-nucleotide adenylyltransferase, ornithine decarboxylase, pantothenate kinase, peptidyl-prolyl cis-trans isomerase A (rotamase A), phosphate transporter, phosphatidylglycerophosphate synthetase, polyphosphate kinase, potassium-transporting ATPase (subunit B), predicted antimicrobial peptide transporter sub-unit, predicted arginine/ornithine transporter, predicted hydrolase, predicted kinase, predicted ligase, predicted outer membrane lipoprotein, predicted oxidoreductase (flavin:NADH component), predicted porin, predicted PTS enzymes (IIB component/IIC component), predicted serine transporter protein, predicted transporter protein, Protein component of the small (40S) ribosomal subunit, regulator of length of O-antigen component of lipopolysaccharide chains , ribonuclease activity regulator protein RraA, sensory histidine kinase in two-component regulatory system with NarP (NarL), sodium/proton antiporter, Splicing factor, threonine and homoserine efflux system, transcriptional regulator protein, transcriptional repressor protein MetJ, transporter subunit/periplasmic-binding component of ABC superfamily, tRNA pseudouridine synthase, tRNA-specific adenosine deaminase, universal stress protein UP12, YaI049c-protein, YCR059C-protein, YEL005C-protein, YER156C-protein, Yfr042w-protein, YGL045W-protein, and YOR024w-protein and conferring an increased tolerance and/or resistance to environmental stress and increased biomass production as compared to a corresponding non-transformed wild type plant cell, plant or part thereof;

[1385] e) stimulating activity of a protein conferring the increased expression of a protein encoded by the nucleic acid molecule of the present invention or a polypeptide of the present invention having the herein-mentioned activity selected from the group consisting of 2,3-dihydroxy-2,3-dihydrophenylpropionatedehydrogenase, 3-deoxy-D-arabino-heptulosonate-7-phosphate (DAHP) synthase, 3-deoxy-D-arabino-heptulosonate-7-phosphatesynthase, 3-oxoacyl-(acyl carrier protein) synthase, acid shock protein precursor, aspartate ammonia-lyase, b0081-protein, b0482-protein, b0631-protein, b0753-protein, b0866-protein, b1052-protein, b1161-protein, b1423-protein, b1878-protein, b2226-protein, b2475-protein, cellobiose/arbutin/salicin-specific PTS enzyme (IIB component/IC component), Checkpoint protein, CP4-57 prophage/RNase LS, Dihydrouridine synthase, DNA-binding transcriptional dual regulator protein, D-xylose transporter subunit, gamma-Glu-putrescine synthase, gluconate transporter, glucose-1-phosphate thymidylyltransferase, Glutamine tRNA synthetase, glutathione-dependent oxidoreductase, glycine betaine transporter subunit protein, glycogen synthase, GTP cyclohydrolase I, heat shock protein, heat shock protein HtpX, heme lyase (CcmH subunit), hexuronate transporter, histidine/lysine/arginine/ornithine transporter subunit protein, HyaA/HyaB-processing protein, inner membrane protein, L-arabinose transporter subunit, Lsm (Like Sm) protein, L-threonine 3-dehydrogenase, methylglyoxal synthase, multidrug efflux system (subunit B), N,N′-diacetylchitobiose-specific enzyme IIA component of PTS, NADH dehydrogenase (subunit N), neutral amino-acid efflux system, nicotinamide-nucleotide adenylyltransferase, ornithine decarboxylase, pantothenate kinase, peptidyl-prolyl cis-trans isomerase A (rotamase A), phosphate transporter, phosphatidylglycerophosphate synthetase, polyphosphate kinase, potassium-transporting ATPase (subunit B), predicted antimicrobial peptide transporter sub-unit, predicted arginine/ornithine transporter, predicted hydrolase, predicted kinase, predicted ligase, predicted outer membrane lipoprotein, predicted oxidoreductase (flavin:NADH component), predicted porin, predicted PTS enzymes (IIB component/IIC component), predicted serine transporter protein, predicted transporter protein, Protein component of the small (40S) ribosomal subunit, regulator of length of O-antigen component of lipopolysaccharide chains , ribonuclease activity regulator protein RraA, sensory histidine kinase in two-component regulatory system with NarP (NarL), sodium/proton antiporter, Splicing factor, threonine and homoserine efflux system, transcriptional regulator protein, transcriptional repressor protein MetJ, transporter subunit/periplasmic-binding component of ABC superfamily, tRNA pseudouridine synthase, tRNA-specific adenosine deaminase, universal stress protein UP12, Ya1049c-protein, YCR059C-protein, YEL005C-protein, YER156C-protein, Yfr042w-protein, YGL045W-protein, and YOR024w-protein and confering an increased tolerance and/or resistance to environmental stress and increased biomass production as compared to a corresponding non-transformed wild type plant cell, plant or part thereof by adding one or more exogenous inducing factors to the organismus or parts thereof;

[1386] f) expressing a transgenic gene encoding a protein conferring the increased expression of a polypeptide encoded by the nucleic acid molecule of the present invention or a polypeptide of the present invention, having the herein-mentioned activity selected from the group consisting of 2,3-dihydroxy-2,3-dihydrophenylpropionatedehydrogenase, 3-deoxy-D-arabino-heptulosonate-7-phosphate (DAHP) synthase, 3-deoxy-D-arabino-heptulosonate-7-phosphatesynthase, 3-oxoacyl-(acyl carrier protein) synthase, acid shock protein precursor, aspartate ammonia-lyase, b0081-protein, b0482-protein, b0631-protein, b0753-protein, b0866-protein, b1052-protein, b1161-protein, b1423-protein, b1878-protein, b2226-protein, b2475-protein, cellobiose/arbutin/salicin-specific PTS enzyme (IIB component/IC component), Checkpoint protein, CP4-57 prophage/ RNase LS, Dihydrouridine synthase, DNA-binding transcriptional dual regulator protein, D-xylose transporter subunit, gamma-Glu-putrescine synthase, gluconate transporter, glucose-1-phosphate thymidylyl-transferase, Glutamine tRNA synthetase, glutathione-dependent oxidoreductase, glycine betaine transporter subunit protein, glycogen synthase, GTP cyclohydrolase I, heat shock protein, heat shock protein HtpX, heme lyase (CcmH subunit), hexuronate transporter, histidine/lysine/arginine/ornithine transporter subunit protein, HyaA/HyaB-processing protein, inner membrane protein, L-arabinose transporter subunit, Lsm (Like Sm) protein, L-threonine 3-dehydrogenase, methylglyoxal synthase, multidrug efflux system (subunit B), N,N′-diacetylchitobiose-specific enzyme IIA component of PTS, NADH dehydrogenase (subunit N), neutral amino-acid efflux system, nicotinamidenucleotide adenylyltransferase, ornithine decarboxylase, pantothenate kinase, peptidyl-prolyl cis-trans isomerase A (rotamase A), phosphate transporter, phosphatidylglycerophosphate synthetase, polyphosphate kinase, potassium-transporting ATPase (sub-unit B), predicted antimicrobial peptide transporter subunit, predicted arginine/ornithine transporter, predicted hydrolase, predicted kinase, predicted ligase, predicted outer membrane lipoprotein, predicted oxidoreductase (flavin:NADH component), predicted porin, predicted PTS enzymes (IIB component/IIC component), predicted serine transporter protein, predicted transporter protein, Protein component of the small (40S) ribosomal subunit, regulator of length of O-antigen component of lipopolysaccharide chains, ribonuclease activity regulator protein RraA, sensory histidine kinase in two-component regulatory system with NarP (NarL), sodium/proton antiporter, Splicing factor, threonine and homoserine efflux system, transcriptional regulator protein, transcriptional repressor protein MetJ, transporter subunit/periplasmic-binding component of ABC superfamily, tRNA pseudouridine synthase, tRNA-specific adenosine deaminase, universal stress protein UP12, Ya1049c-protein, YCR059C-protein, YEL005C-protein, YER156C-protein, Yfr042w-protein, YGL045W-protein, and YOR024w-protein and confering an increased tolerance and/or resistance to environmental stress and increased biomass production as compared to a corresponding non-transformed wild type plant cell, plant or part thereof; and/or

[1387] g) increasing the copy number of a gene conferring the increased expression of a nucleic acid molecule encoding a polypeptide encoded by the nucleic acid molecule of the invention or the polypeptide of the invention having the herein-mentioned activity selected from the group consisting of 2,3-dihydroxy-2,3-dihydrophenylpropionatedehydrogenase, 3-deoxy-D-arabino-heptulosonate-7-phosphate (DAHP) synthase, 3-deoxy-D-arabino-heptulosonate-7-phosphatesynthase, 3-oxoacyl-(acyl carrier protein) synthase, acid shock protein precursor, aspartate ammonia-lyase, b0081-protein, b0482-protein, b0631-protein, b0753-protein, b0866-protein, b1052-protein, b1161-protein, b1423-protein, b1878-protein, b2226-protein, b2475-protein, cellobiose/arbutin/salicin-specific PTS enzyme (IIB component/IC component), Checkpoint protein, CP4-57 prophage/ RNase LS, Dihydrouridine synthase, DNA-binding transcriptional dual regulator protein, D-xylose transporter subunit, gamma-Glu-putrescine synthase, gluconate transporter, glucose-1-phosphate thymidylyl-transferase, Glutamine tRNA synthetase, glutathione-dependent oxidoreductase, glycine betaine transporter subunit protein, glycogen synthase, GTP cyclohydrolase I, heat shock protein, heat shock protein HtpX, heme lyase (CcmH subunit), hexuronate transporter, histidine/lysine/arginine/ornithine transporter subunit protein, HyaA/HyaB-processing protein, inner membrane protein, L-arabinose transporter subunit, Lsm (Like Sm) protein, L-threonine 3-dehydrogenase, methylglyoxal synthase, multidrug efflux system (subunit B), N,N′-diacetylchitobiose-specific enzyme IIA component of PTS, NADH dehydrogenase (subunit N), neutral amino-acid efflux system, nicotinamide-nucleotide adenylyltransferase, ornithine decarboxylase, pantothenate kinase, peptidyl-prolyl cis-trans isomerase A (rotamase A), phosphate transporter, phosphatidylglycerophosphate synthetase, polyphosphate kinase, potassium-transporting ATPase (sub-unit B), predicted antimicrobial peptide transporter subunit, predicted arginine/ornithine transporter, predicted hydrolase, predicted kinase, predicted ligase, predicted outer membrane lipoprotein, predicted oxidoreductase (flavin:NADH component), predicted porin, predicted PTS enzymes (IIB component/IIC component), predicted serine transporter protein, predicted transporter protein, Protein component of the small (40S) ribosomal subunit, regulator of length of O-antigen component of lipopolysaccharide chains, ribonuclease activity regulator protein RraA, sensory histidine kinase in two-component regulatory system with NarP (NarL), sodium/proton antiporter, Splicing factor, threonine and homoserine efflux system, transcriptional regulator protein, transcriptional repressor protein MetJ, transporter subunit/periplasmic-binding component of ABC superfamily, tRNA pseudouridine synthase, tRNA-specific adenosine deaminase, universal stress protein UP12, Ya1049c-protein, YCR059C-protein, YEL005C-protein, YER156C-protein, Yfr042w-protein, YGL045W-protein, and YOR024w-protein and confering an increased tolerance and/or resistance to environmental stress and increased biomass production as compared to a corresponding non-transformed wild type plant cell, plant or part thereof;

[1388] h) increasing the expression of the endogenous gene encoding the polypeptide of the invention or its homologs by adding positive expression or removing negative expression elements, e.g. homologous recombination can be used to either introduce positive regulatory elements like for plants the 35S enhancer into the promoter or to remove repressor elements form regulatory regions. Further gene conversion methods can be used to disrupt repressor elements or to enhance to activity of positive elements-positive elements can be randomly introduced in plants by T-DNA or transposon mutagenesis and lines can be identified in which the positive elements have been integrated near to a gene of the invention, the expression of which is thereby enhanced; and/or

[1389] i) modulating growth conditions of the plant in such a manner, that the expression or activity of the gene encoding the protein of the invention or the protein itself is enhanced;

[1390] j) selecting of organisms with especially high activity of the proteins of the invention from natural or from mutagenized resources and breeding them into the target organisms, e.g. the elite crops.

[1391] Preferably, said mRNA is the nucleic acid molecule of the present invention and/or the protein conferring the increased expression of a protein encoded by the nucleic acid molecule of the present invention alone or linked to a transit nucleic acid sequence or transit peptide encoding nucleic acid sequence or the polypeptide having the herein mentioned activity, e.g. conferring an increased tolerance and/or resistance to environmental stress and increased biomass production as compared to a corresponding non-transformed wild type plant cell, plant or part thereof after increasing the expression or activity of the encoded polypeptide or having the activity of a polypeptide having an activity as the protein as shown in table II column 3 or its homologs.

[1392] In general, the amount of mRNA or polypeptide in a cell or a compartment of an organism correlates with the amount of encoded protein and thus with the overall activity of the encoded protein in said volume. Said correlation is not always linear, the activity in the volume is dependent on the stability of the molecules or the presence of activating or inhibiting co-factors. Further, product and educt inhibitions of enzymes are well known and described in textbooks, e.g. Stryer, Biochemistry.

[1393] In general, the amount of mRNA, polynucleotide or nucleic acid molecule in a cell or a compartment of an organism correlates with the amount of encoded protein and thus with the overall activity of the encoded protein in said volume. Said correlation is not always linear, the activity in the volume is dependent on the stability of the molecules, the degradation of the molecules or the presence of activating or inhibiting co-factors. Further, product and educt inhibitions of enzymes are well known, e.g. Zinser et al. “Enzyminhibitoren”/Enzyme inhibitors”.

[1394] The activity of the abovementioned proteins and/or polypeptides encoded by the nucleic acid molecule of the present invention can be increased in various ways. For example, the activity in an organism or in a part thereof, like a cell, is increased via increasing the gene product number, e.g. by increasing the expression rate, like introducing a stronger promoter, or by increasing the stability of the mRNA expressed, thus increasing the translation rate, and/or increasing the stability of the gene product, thus reducing the proteins decayed. Further, the activity or turnover of enzymes can be influenced in such a way that a reduction or increase of the reaction rate or a modification (reduction or increase) of the affinity to the substrate results, is reached. A mutation in the catalytic center of an polypeptide of the invention, e.g. as enzyme, can modulate the turn over rate of the enzyme, e.g. a knock out of an essential amino acid can lead to a reduced or completely knock out activity of the enzyme, or the deletion or mutation of regulator binding sites can reduce a negative regulation like a feedback inhibition (or a substrate inhibition, if the substrate level is also increased). The specific activity of an enzyme of the present invention can be increased such that the turn over rate is increased or the binding of a co-factor is improved. Improving the stability of the encoding mRNA or the protein can also increase the activity of a gene product. The stimulation of the activity is also under the scope of the term “increased activity”.

[1395] Moreover, the regulation of the abovementioned nucleic acid sequences may be modified so that gene expression is increased. This can be achieved advantageously by means of heterologous regulatory sequences or by modifying, for example mutating, the natural regulatory sequences which are present. The advantageous methods may also be combined with each other.

[1396] In general, an activity of a gene product in an organism or part thereof, in particular in a plant cell or organelle of a plant cell, a plant, or a plant tissue or a part thereof or in a microorganism can be increased by increasing the amount of the specific encoding mRNA or the corresponding protein in said organism or part thereof. “Amount of protein or mRNA” is understood as meaning the molecule number of polypeptides or mRNA molecules in an organism, a tissue, a cell or a cell compartment. “Increase” in the amount of a protein means the quantitative increase of the molecule number of said protein in an organism, a tissue, a cell or a cell compartment such as an organelle like a plastid or mitochondria or part thereof—for example by one of the methods described herein below—in comparison to a wild type, control or reference.

[1397] The increase in molecule number amounts preferably to at least 1%, preferably to more than 10%, more preferably to 30% or more, especially preferably to 50%, 70% or more, very especially preferably to 100%, most preferably to 500% or more. However, a de novo expression is also regarded as subject of the present invention.

[1398] A modification, i.e. an increase, can be caused by endogenous or exogenous factors. For example, an increase in activity in an organism or a part thereof can be caused by adding a gene product or a precursor or an activator or an agonist to the media or nutrition or can be caused by introducing said subjects into a organism, transient or stable. Furthermore such an increase can be reached by the introduction of the inventive nucleic acid sequence or the encoded protein in the correct cell compartment for example into the , nucleus, or cytoplasm respectively or into plastids either by transformation and/or targeting.

[1399] In one embodiment the increase or decrease in tolerance and/or resistance to environmental stress as compared to a corresponding non-transformed wild type plant cell in the plant or a part thereof, e.g. in a cell, a tissue, a organ, an organelle etc., is achieved by increasing the endogenous level of the polypeptide of the invention. Accordingly, in an embodiment of the present invention, the present invention relates to a process wherein the gene copy number of a gene encoding the polynucleotide or nucleic acid molecule of the invention is increased. Further, the endogenous level of the polypeptide of the invention can for example be increased by modifying the transcriptional or translational regulation of the polypeptide.

[1400] In one embodiment the increased tolerance and/or resistance to environmental stress in the plant or part thereof can be altered by targeted or random mutagenesis of the endogenous genes of the invention. For example homologous recombination can be used to either introduce positive regulatory elements like for plants the 35S enhancer into the promoter or to remove repressor elements form regulatory regions. In addition gene conversion like methods described by Kochevenko and Willmitzer (Plant Physiol. 2003 May;132(1):174-84) and citations therein can be used to disrupt repressor elements or to enhance to activity of positive regulatory elements. Furthermore positive elements can be randomly introduced in (plant) genomes by T-DNA or transposon mutagenesis and lines can be screened for, in which the positive elements has be integrated near to a gene of the invention, the expression of which is thereby enhanced. The activation of plant genes by random integrations of enhancer elements has been described by Hayashi et al., 1992 (Science 258:1350-1353) or Weigel et al., 2000 (Plant Physiol. 122, 1003-1013) and others citated therein. Reverse genetic strategies to identify insertions (which eventually carrying the activation elements) near in genes of interest have been described for various cases e.g., Krysan et al., 1999 (Plant Cell 1999, 11, 2283-2290); Sessions et al., 2002 (Plant Cell 2002, 14, 2985-2994); Young et al., 2001, (Plant Physiol. 2001, 125, 513-518); Koprek et al., 2000 (Plant J. 2000, 24, 253-263) ; Jeon et al., 2000 (Plant J. 2000, 22, 561-570) ; Tissier et al., 1999 (Plant Cell 1999, 11, 1841-1852); Speulmann et al., 1999 (Plant Cell 1999 ,11 , 1853-1866). Briefly material from all plants of a large T-DNA or transposon mutagenized plant population is harvested and genomic DNA prepared. Then the genomic DNA is pooled following specific architectures as described for example in Krysan et al., 1999 (Plant Cell 1999, 11, 2283-2290). Pools of genomics DNAs are then screened by specific multiplex PCR reactions detecting the combination of the insertional mutagen (eg T-DNA or Transposon) and the gene of interest. Therefore PCR reactions are run on the DNA pools with specific combinations of T-DNA or transposon border primers and gene specific primers. General rules for primer design can again be taken from Krysan et al., 1999 (Plant Cell 1999, 11, 2283-2290) Rescreening of lower levels DNA pools lead to the identifcation of individual plants in which the gene of interest is activated by the insertional mutagen. The enhancement of positive regulatory elements or the disruption or weaking of negative regulatory elements can also be achieved through common mutagenesis techniques: The production of chemically or radiation mutated populations is a common technique and known to the skilled worker. Methods for plants are described by Koorneef et al. 1982 and the citations therein and by Lightner and Caspar in “Methods in Molecular Biology” Vol 82. These techniques usually induce pointmutations that can be identified in any known gene using methods such as TILLING (Colbert et al. 2001).

[1401] Accordingly, the expression level can be increased if the endogenous genes encoding a polypeptide conferring an increased expression of the polypeptide of the present invention, in particular genes comprising the nucleic acid molecule of the present invention, are modified via homologous recombination, Tilling approaches or gene conversion. It also possible to add as mentioned herein targeting sequences to the inventive nucleic acid sequences.

[1402] Regulatory sequences preferably in addition to a target sequence or part thereof can be operatively linked to the coding region of an endogenous protein and control its transcription and translation or the stability or decay of the encoding mRNA or the expressed protein. In order to modify and control the expression, promoter, UTRs, splicing sites, processing signals, polyadenylation sites, terminators, enhancers, repressors, post transcriptional or posttranslational modification sites can be changed, added or amended. For example, the activation of plant genes by random integrations of enhancer elements has been described by Hayashi et al., 1992 (Science 258:1350-1353) or Weigel et al., 2000 (Plant Physiol. 122, 1003-1013) and others citated therein. For example, the expression level of the endogenous protein can be modulated by replacing the endogenous promoter with a stronger transgenic promoter or by replacing the endogenous 3′UTR with a 3′UTR, which provides more stability without amending the coding region. Further, the transcriptional regulation can be modulated by introduction of an artificial transcription factor as described in the examples. Alternative promoters, terminators and UTR are described below.

[1403] The activation of an endogenous polypeptide having above-mentioned activity, e.g. having the activity of a protein as shown in table II, column 3 or of the polypeptide of the invention, e.g. conferring the increase of the tolerance and/or resistance to environmental stress and increased biomass production as compared to a corresponding non-transformed wild type plant cell, plant or part thereof after increase of expression or activity in the cytosol and/or in an organelle like a plastid, can also be increased by introducing a synthetic transcription factor, which binds close to the coding region of the gene encoding the protein as shown in table II, column 3 and activates its transcription. A chimeric zinc finger protein can be constructed, which comprises a specific DNA-binding domain and an activation domain as e.g. the VP16 domain of Herpes Simplex virus. The specific binding domain can bind to the regulatory region of the gene encoding the protein as shown in table II, column 3. The expression of the chimeric transcription factor in a organism, in particular in a plant, leads to a specific expression of the protein as shown in table II, column 3, see e.g. in WO01/52620, Oriz, Proc. Natl. Acad. Sci. USA, 2002, Vol. 99, 13290 or Guan, Proc. Natl. Acad. Sci. USA, 2002, Vol. 99, 13296.

[1404] In one further embodiment of the process according to the invention, organisms are used in which one of the abovementioned genes, or one of the above-mentioned nucleic acids, is mutated in a way that the activity of the encoded gene products is less influenced by cellular factors, or not at all, in comparison with the unmutated proteins. For example, well known regulation mechanism of enzymic activity are substrate inhibition or feed back regulation mechanisms. Ways and techniques for the introduction of substitution, deletions and additions of one or more bases, nucleotides or amino acids of a corresponding sequence are described herein below in the corresponding paragraphs and the references listed there, e.g. in Sambrook et al., Molecular Cloning, Cold Spring Habour, N.Y., 1989. The person skilled in the art will be able to identify regulation domains and binding sites of regulators by comparing the sequence of the nucleic acid molecule of the present invention or the expression product thereof with the state of the art by computer software means which comprise algorithms for the identifying of binding sites and regulation domains or by introducing into a nucleic acid molecule or in a protein systematically mutations and assaying for those mutations which will lead to an increased specific activity or an increased activity per volume, in particular per cell.

[1405] It can therefore be advantageous to express in an organism a nucleic acid molecule of the invention or a polypeptide of the invention derived from a evolutionary distantly related organism, as e.g. using a prokaryotic gene in a eukaryotic host, as in these cases the regulation mechanism of the host cell may not weaken the activity (cellular or specific) of the gene or its expression product.

[1406] The mutation is introduced in such a way that the increased tolerance and/or resistance to environmental stress and biomass increase are not adversely affected.

[1407] Less influence on the regulation of a gene or its gene product is understood as meaning a reduced regulation of the enzymatic activity leading to an increased specific or cellular activity of the gene or its product. An increase of the enzymatic activity is understood as meaning an enzymatic activity, which is increased by at least 10%, advantageously at least 20, 30 or 40%, especially advantageously by at least 50, 60 or 70% in comparison with the starting organism. This leads to an increased tolerance and/or resistance to environmental stress and increased biomass production as compared to a corresponding non-transformed wild type plant cell, plant or part thereof .

[1408] The invention provides that the above methods can be performed such that the stress tolerance is increased. It is also possible to obtain a decrease in stress tolerance.

[1409] The invention is not limited to specific nucleic acids, specific polypeptides, specific cell types, specific host cells, specific conditions or specific methods etc. as such, but may vary and numerous modifications and variations therein will be apparent to those skilled in the art. It is also to be understood that the terminology used herein is for the purpose of describing specific embodiments only and is not intended to be limiting.

[1410] The present invention also relates to isolated nucleic acids comprising a nucleic acid molecule selected from the group consisting of:
[1411] a) a nucleic acid molecule encoding the polypeptide shown in column 7 of Table II B;
[1412] b) a nucleic acid molecule shown in column 7 of Table I B;
[1413] c) a nucleic acid molecule, which, as a result of the degeneracy of the genetic code, can be derived from a polypeptide sequence depicted in column 5 or 7 of Table II and confers an increased tolerance and/or resistance to environmental stress and increased biomass production as compared to a corresponding non-transformed wild type plant cell, a plant or a part thereof;
[1414] d) a nucleic acid molecule having at least 30% identity with the nucleic acid molecule sequence of a polynucleotide comprising the nucleic acid molecule shown in column 5 or 7 of Table I and confers an increased tolerance and/or resistance to environmental stress and increased biomass production as compared to a corresponding non-transformed wild type plant cell, a plant or a part thereof ;
[1415] e) a nucleic acid molecule encoding a polypeptide having at least 30% identity with the amino acid sequence of the polypeptide encoded by the nucleic acid molecule of (a) to (c) and having the activity represented by a nucleic acid molecule comprising a polynucleotide as depicted in column 5 of Table I and confers an increased tolerance and/or resistance to environmental stress and increased biomass production as compared to a corresponding non-transformed wild type plant cell, a plant or a part thereof;
[1416] f) nucleic acid molecule which hybridizes with a nucleic acid molecule of (a) to (c) under stringent hybridization conditions and confers an increased tolerance and/or resistance to environmental stress and increased biomass production as compared to a corresponding non-transformed wild type plant cell, a plant or a part thereof;
[1417] g) a nucleic acid molecule encoding a polypeptide which can be isolated with the aid of monoclonal or polyclonal antibodies made against a polypeptide encoded by one of the nucleic acid molecules of (a) to (e) and having the activity represented by the nucleic acid molecule comprising a polynucleotide as depicted in column 5 of Table I;
[1418] h) a nucleic acid molecule encoding a polypeptide comprising the consensus sequence or one or more polypeptide motifs as shown in column 7 of Table IV and preferably having the activity represented by a nucleic acid molecule comprising a polynucleotide as depicted in column 5 of Table II or IV;
[1419] h) a nucleic acid molecule encoding a polypeptide having the activity represented by a protein as depicted in column 5 of Table II and confers an increased tolerance and/or resistance to environmental stress and increased biomass production as compared to a corresponding non-transformed wild type plant cell, a plant or a part thereof;
[1420] i) nucleic acid molecule which comprises a polynucleotide, which is obtained by amplifying a cDNA library or a genomic library using the primers in column 7 of Table III which do not start at their 5′-end with the nucleotides ATA and preferably having the activity represented by a nucleic acid molecule comprising a polynucleotide as depicted in column 5 of Table II or IV;
[1421] and
[1422] j) a nucleic acid molecule which is obtainable by screening a suitable nucleic acid library under stringent hybridization conditions with a probe comprising a complementary sequence of a nucleic acid molecule of (a) or (b) or with a fragment thereof, having at least 15 nt, preferably 20 nt, 30 nt, 50 nt, 100 nt, 200 nt or 500 nt of a nucleic acid molecule complementary to a nucleic acid molecule sequence characterized in (a) to (e) and encoding a polypeptide having the activity represented by a protein comprising a polypeptide as depicted in column 5 of Table II;
   whereby the nucleic acid molecule according to (a) to (j) is at least in one or more nucleotides different from the sequence depicted in column 5 or 7 of Table I A and preferably which encodes a protein which differs at least in one or more amino acids from the protein sequences depicted in column 5 or 7 of Table II A.

[1423] In one embodiment the invention relates to homologs of the aforementioned sequences, which can be isolated advantageously from yeast, fungi, viruses, algae, bacteria, such as Acetobacter (subgen. Acetobacter) aceti; Acidithiobacillus ferrooxidans; Acinetobacter sp.; Actinobacillus sp; Aeromonas salmonicida; Agrobacterium tumefaciens; Aquifex aeolicus; Arcanobacterium pyogenes; Aster yellows phytoplasma; Bacillus sp.; Bifidobacterium sp.; Borrelia burgdorferi; Brevibacterium linens; Brucella melitensis; Buchnera sp.; Butyrivibrio fibrisolvens; Campylobacter jejuni; Caulobacter crescentus; Chlamydia sp.; Chlamydophila sp.; Chlorobium limicola; Citrobacter rodentium; Clostridium sp.; Comamonas testosteroni; Corynebacterium sp.; Coxiella burnetii; Deinococcus radiodurans; Dichelobacter nodosus; Edwardsiella ictaluri; Enterobacter sp.; Erysipelothrix rhusiopathiae; Escherichia coli; Flavobacterium sp.; Francisella tularensis; Frankia sp. Cp11; Fusobacterium nucleatum; Geobacillus stearothermophilus; Gluconobacter oxydans; Haemophilus sp.; Helicobacter pylon; Klebsiella pneumoniae; Lactobacillus sp.; Lactococcus lactis; Listeria sp.; Mannheimia haemolytica; Mesorhizobium loti; Methylophaga thalassica; Microcystis aeruginosa; Microscilla sp. PRE1; Moraxella sp. TA144; Mycobacterium sp.; Mycoplasma sp.; Neisseria sp.; Nitrosomonas sp.; Nostoc sp. PCC 7120; Novosphingobium aromaticivorans; Oenococcus oeni; Pantoea citrea; Pasteurella multocida; Pediococcus pentosaceus; Phormidium foveolarum; Phytoplasma sp.; Plectonema boryanum; Prevotella ruminicola; Propionibacterium sp.; Proteus vulgaris; Pseudomonas sp.; Ralstonia sp.; Rhizobium sp.; Rhodococcus equi; Rhodothermus marinus; Rickettsia sp.; Riemerella anatipestifer; Ruminococcus flavefaciens; Salmonella sp.; Selenomonas ruminantium; Serratia entomophila; Shigella sp.; Sinorhizobium meliloti; Staphylococcus sp.; Streptococcus sp.; Streptomyces sp.; Synechococcus sp.; Synechocystis sp. PCC 6803; Thermotoga maritima; Treponema sp.; Ureaplasma urealyticum; Vibrio cholerae; Vibrio parahaemolyticus; Xylella fastidiosa; Yersinia sp.; Zymomonas mobilis, preferably Salmonella sp. or Escherichia coli or plants, preferably from yeasts such as from the genera Saccharomyces, Pichia, Candida, Hansenula, Torulopsis or Schizosaccharomyces or plants such as Arabidopsis thaliana, maize, wheat, rye, oat, triticale, rice, barley, soybean, peanut, cotton, borage, sunflower, linseed, primrose, rapeseed, canola and turnip rape, manihot, pepper, sunflower, tagetes, solanaceous plant such as potato, tobacco, eggplant and tomato, Vicia species, pea, alfalfa, bushy plants such as coffee, cacao, tea, Salix species, trees such as oil palm, coconut, perennial grass, such as ryegrass and fescue, and forage crops, such as alfalfa and clover and from spruce, pine or fir for example. More preferably homologs of aforementioned sequences can be isolated from Saccharomyces cerevisiae, E. coli or Synechocystis sp. or plants, preferably Brassica napus, Glycine max, Zea mays, cotton, or Oryza sativa.

[1424] The (stress related) proteins of the present invention are preferably produced by recombinant DNA techniques. For example, a nucleic acid molecule encoding the protein is cloned into an expression vector, for example in to a binary vector, the expression vector is introduced into a host cell, for example the Arabidopsis thaliana wild type NASC N906 or any other plant cell as described in the examples see below, and the stress related protein is expressed in said host cell. Examples for binary vectors are pBIN19, pBI101, pBinAR, pGPTV, pCAMBIA, pBIB-HYG, pBecks, pGreen or pPZP (Hajukiewicz, P. et al., 1994, Plant Mol. Biol., 25: 989-994 and Hellens et al, Trends in Plant Science (2000) 5, 446-451.).

[1425] In one embodiment the (stess related) protein of the present inventnion is preferably produced in an compartment of the cell, more preferably in the plastids. Ways of introducing nucleic acids into plastids and producing proteins in this compartment are know to the person skilled in the art have been also described in this application.

[1426] Advantageously, the nucleic acid sequences according to the invention or the gene construct together with at least one reporter gene are cloned into an expression cassette, which is introduced into the organism via a vector or directly into the genome. This reporter gene should allow easy detection via a growth, fluorescence, chemical, bioluminescence or resistance assay or via a photometric measurement. Examples of reporter genes which may be mentioned are antibiotic- or herbicide-resistance genes, hydrolase genes, fluorescence protein genes, bioluminescence genes, sugar or nucleotide metabolic genes or biosynthesis genes such as the Ura3 gene, the IIv2 gene, the luciferase gene, the β-galactosidase gene, the gfp gene, the 2-desoxyglucose-6-phosphate phosphatase gene, the β-glucuronidase gene, β-lactamase gene, the neomycin phosphotransferase gene, the hygromycin phosphotransferase gene, a mutated acetohydroxyacid synthase (AHAS) gene, also known as acetolactate synthase (ALS) gene], a gene for a D-amino acid metabolizing enzmye or the BASTA (=gluphosinate-resistance) gene. These genes permit easy measurement and quantification of the transcription activity and hence of the expression of the genes. In this way genome positions may be identified which exhibit differing productivity.

[1427] In a preferred embodiment a nucleic acid construct, for example an expression cassette, comprises upstream, i.e. at the 5′ end of the encoding sequence, a promoter and downstream, i.e. at the 3′ end, a polyadenylation signal and optionally other regulatory elements which are operably linked to the intervening encoding sequence with one of the nucleic acids of SEQ ID NO as depicted in table I, column 5 and 7. By an operable linkage is meant the sequential arrangement of promoter, encoding sequence, terminator and optionally other regulatory elements in such a way that each of the regulatory elements can fulfill its function in the expression of the encoding sequence in due manner. The sequences preferred for operable linkage are targeting sequences for ensuring subcellular localization in plastids. However, targeting sequences for ensuring subcellular localization in the mitochondrium, in the endoplasmic reticulum (=ER), in the nucleus, in oil corpuscles or other compartments may also be employed as well as translation promoters such as the 5′ lead sequence in tobacco mosaic virus (Gallie et al., Nucl. Acids Res. 15 (1987), 8693 -8711).

[1428] A nucleic acid construct, for example an expression cassette may, for example, contain a constitutive promoter or a tissue-specific promoter (preferably the USP or napin promoter) the gene to be expressed and the ER retention signal. For the ER retention signal the KDEL amino acid sequence (lysine, aspartic acid, glutamic acid, leucine) or the KKX amino acid sequence (lysine-lysine-X-stop, wherein X means every other known amino acid) is preferably employed.

[1429] For expression in a host organism, for example a plant, the expression cassette is advantageously inserted into a vector such as by way of example a plasmid, a phage or other DNA which allows optimal expression of the genes in the host organism. Examples of suitable plasmids are: in E. coli pLG338, pACYC184, pBR series such as e.g. pBR322, pUC series such as pUC18 or pUC19, M113mp series, pKC30, pRep4, pHS1, pHS2, pPLc236, pMBL24, pLG200, pUR290, pIN-III¹¹³-B1, λgt11 or pBdCl; in Streptomyces pIJ101, pIJ364, pIJ702 or pIJ361; in Bacillus pUB110, pC194 or pBD214; in Corynebacterium pSA77 or pAJ667; in fungi pALS1, pIL2 or pBB116; other advantageous fungal vectors are described by Romanos, M. A. et al., [(1992)” Foreign gene expression in yeast: a review“, Yeast 8: 423-488] and by van den Hondel, C. A. M. J. J. et al. [(1991) “Heterologous gene expression in filamentous fungi” as well as in More Gene Manipulations in Fungi [J. W. Bennet & L. L. Lasure, eds., pp. 396-428: Academic Press: San Diego] and in “Gene transfer systems and vector development for filamentous fungi” [van den Hondel, C. A. M. J. J. & Punt, P. J. (1991) in: Applied Molecular Genetics of Fungi, Peberdy, J. F. et al., eds., pp. 1-28, Cambridge University Press: Cambridge]. Examples of advantageous yeast promoters are 2 μM, pAG-1, YEp6, YEp13 or pEMBLYe23. Examples of algal or plant promoters are pLGV23, pGHlac⁺, pBIN19, pAK2004, pVKH or pDH51 (see Schmidt, R. and Willmitzer, L., 1988). The vectors identified above or derivatives of the vectors identified above are a small selection of the possible plasmids. Further plasmids are well known to those skilled in the art and may be found, for example, in the book Cloning Vectors (Eds. Pouwels P. H. et al. Elsevier, Amsterdam-New York-Oxford, 1985 , ISBN 0 444 904018). Suitable plant vectors are described inter alia in “Methods in Plant Molecular Biology and Biotechnology” (CRC Press), Ch. 6/7, pp. 71-119. Advantageous vectors are known as shuttle vectors or binary vectors which replicate in E. coli and Agrobacterium.

[1430] By vectors is meant with the exception of plasmids all other vectors known to those skilled in the art such as by way of example phages, viruses such as SV40, CMV, baculovirus, adenovirus, transposons, IS elements, phasmids, phagemids, cosmids, linear or circular DNA. These vectors can be replicated autonomously in the host organism or be chromosomally replicated, chromosomal replication being preferred.

[1431] In a further embodiment of the vector the expression cassette according to the invention may also advantageously be introduced into the organisms in the form of a linear DNA and be integrated into the genome of the host organism by way of heterologous or homologous recombination. This linear DNA may be composed of a linearized plasmid or only of the expression cassette as vector or the nucleic acid sequences according to the invention.

[1432] In a further advantageous embodiment the nucleic acid sequence according to the invention can also be introduced into an organism on its own.

[1433] If in addition to the nucleic acid sequence according to the invention further genes are to be introduced into the organism, all together with a reporter gene in a single vector or each single gene with a reporter gene in a vector in each case can be introduced into the organism, whereby the different vectors can be introduced simultaneously or successively.

[1434] The vector advantageously contains at least one copy of the nucleic acid sequences according to the invention and/or the expression cassette (=gene construct) according to the invention.

[1435] The invention further provides an isolated recombinant expression vector comprising a nucleic acid encoding a polypeptide as depicted in table II, column 5 or 7, wherein expression of the vector in a host cell results in increased tolerance to environmental stress as compared to a wild type variety of the host cell. As used herein, the term “vector” refers to a nucleic acid molecule capable of transporting another nucleic acid to which it has been linked. One type of vector is a “plasmid,” which refers to a circular double stranded DNA loop into which additional DNA segments can be ligated. Another type of vector is a viral vector, wherein additional DNA segments can be ligated into the viral genome. Certain vectors are capable of autonomous replication in a host cell into which they are introduced (e.g., bacterial vectors having a bacterial origin of replication and episomal mammalian vectors). Other vectors (e.g., non-episomal mammalian vectors) are integrated into the genome of a host cell or a organelle upon introduction into the host cell, and thereby are replicated along with the host or organelle genome. Moreover, certain vectors are capable of directing the expression of genes to which they are operatively linked. Such vectors are referred to herein as “expression vectors.” In general, expression vectors of utility in recombinant DNA techniques are often in the form of plasmids. In the present specification, “plasmid” and “vector” can be used interchangeably as the plasmid is the most commonly used form of vector. However, the invention is intended to include such other forms of expression vectors, such as viral vectors (e.g., replication defective retroviruses, adenoviruses, and adeno-associated viruses), which serve equivalent functions.

[1436] The recombinant expression vectors of the invention comprise a nucleic acid of the invention in a form suitable for expression of the nucleic acid in a host cell, which means that the recombinant expression vectors include one or more regulatory sequences, selected on the basis of the host cells to be used for expression, which is operatively linked to the nucleic acid sequence to be expressed. As used herein with respect to a recombinant expression vector, “operatively linked” is intended to mean that the nucleotide sequence of interest is linked to the regulatory sequence(s) in a manner which allows for expression of the nucleotide sequence (e.g., in an in vitro transcription/translation system or in a host cell when the vector is introduced into the host cell). The term “regulatory sequence” is intended to include promoters, enhancers, and other expression control elements (e.g., polyadenylation signals). Such regulatory sequences are described, for example, in Goeddel, Gene Expression Technology: Methods in Enzymology 185, Academic Press, San Diego, Calif. (1990) and Gruber and Crosby, in: Methods in Plant Molecular Biology and Biotechnology, eds. Glick and Thompson, Chapter 7, 89-108, CRC Press: Boca Raton, Florida, including the references therein. Regulatory sequences include those that direct constitutive expression of a nucleotide sequence in many types of host cells and those that direct expression of the nucleotide sequence only in certain host cells or under certain conditions. It will be appreciated by those skilled in the art that the design of the expression vector can depend on such factors as the choice of the host cell to be transformed, the level of expression of polypeptide desired, etc. The expression vectors of the invention can be introduced into host cells to thereby produce polypeptides or peptides, including fusion polypeptides or peptides, encoded by nucleic acids as described herein (e.g., SRPs, mutant forms of SRPs, fusion polypeptides, etc.).

[1437] The recombinant expression vectors of the invention can be designed for expression of the polypeptide of the invention in plant cells. For example, SRP genes can be expressed in plant cells (See Schmidt, R. and Willmitzer, L., 1988, High efficiency Agrobacterium tumefaciens-mediated transformation of Arabidopsis thaliana leaf and cotyledon explants, Plant Cell Rep. 583-586; Plant Molecular Biology and Biotechnology, C Press, Boca Raton, Fla., chapter 6/7, S.71-119 (1993); F. F. White, B. Jenes et al., Techniques for Gene Transfer, in: Transgenic Plants, Vol. 1, Engineering and Utilization, eds. Kung and R. Wu, 128-43, Academic Press: 1993; Potrykus, 1991, Annu. Rev. Plant Physiol. Plant Molec. Biol. 42:205-225 and references cited therein). Suitable host cells are discussed further in Goeddel, Gene Expression Technology: Methods in Enzymology 185, Academic Press: San Diego, Calif. (1990). Alternatively, the recombinant expression vector can be transcribed and translated in vitro, for example using T7 promoter regulatory sequences and T7 polymerase.

[1438] Expression of polypeptides in prokaryotes is most often carried out with vectors containing constitutive or inducible promoters directing the expression of either fusion or non-fusion polypeptides. Fusion vectors add a number of amino acids to a polypeptide encoded therein, usually to the amino terminus of the recombinant polypeptide but also to the C-terminus or fused within suitable regions in the polypeptides. Such fusion vectors typically serve three purposes: 1) to increase expression of a recombinant polypeptide; 2) to increase the solubility of a recombinant polypeptide; and 3) to aid in the purification of a recombinant polypeptide by acting as a ligand in affinity purification. Often, in fusion expression vectors, a proteolytic cleavage site is introduced at the junction of the fusion moiety and the recombinant polypeptide to enable separation of the recombinant polypeptide from the fusion moiety subsequent to purification of the fusion polypeptide. Such enzymes, and their cognate recognition sequences, include Factor Xa, thrombin, and enterokinase.

[1439] By way of example the plant expression cassette can be installed in the pRT transformation vector ((a) Toepfer et al., 1993, Methods Enzymol., 217: 66-78; (b) Toepfer et al. 1987, Nucl. Acids. Res. 15: 5890 if.).

[1440] Alternatively, a recombinant vector (=expression vector) can also be transcribed and translated in vitro, e.g. by using the T7 promoter and the T7 RNA polymerase.

[1441] Expression vectors employed in prokaryotes frequently make use of inducible systems with and without fusion proteins or fusion oligopeptides, wherein these fusions can ensue in both N-terminal and C-terminal manner or in other useful domains of a protein. Such fusion vectors usually have the following purposes: i.) to increase the RNA expression rate; ii.) to increase the achievable protein synthesis rate; iii.) to increase the solubility of the protein; iv.) or to simplify purification by means of a binding sequence usable for affinity chromatography. Proteolytic cleavage points are also frequently introduced via fusion proteins, which allow cleavage of a portion of the fusion protein and purification. Such recognition sequences for proteases are recognized, e.g. factor Xa, thrombin and enterokinase.

[1442] Typical advantageous fusion and expression vectors are pGEX [Pharmacia Biotech Inc; Smith, D. B. and Johnson, K. S. (1988) Gene 67: 31-40], pMAL (New England Biolabs, Beverly, Mass.) and pRIT5 (Pharmacia, Piscataway, N.J.) which contains glutathione S-transferase (GST), maltose binding protein or protein A.

[1443] In one embodiment, the coding sequence of the polypeptide of the invention is cloned into a pGEX expression vector to create a vector encoding a fusion polypeptide comprising, from the N-terminus to the C-terminus, GST-thrombin cleavage site-X polypeptide. The fusion polypeptide can be purified by affinity chromatography using glutathione-agarose resin. Recombinant PKSRP unfused to GST can be recovered by cleavage of the fusion polypeptide with thrombin.

[1444] Other examples of E. coli expression vectors are pTrc [Amann et al., (1988) Gene 69:301-315] and pET vectors [Studier et al., Gene Expression Technology: Methods in Enzymology 185, Academic Press, San Diego, Calif. (1990) 60-89; Stratagene, Amsterdam, The Netherlands].

[1445] Target gene expression from the pTrc vector relies on host RNA polymerase transcription from a hybrid trp-lac fusion promoter. Target gene expression from the pET 11d vector relies on transcription from a T7 gn10-lac fusion promoter mediated by a co-expressed viral RNA polymerase (T7 gni). This viral polymerase is supplied by host strains BL21(DE3) or HMS174(DE3) from a resident I prophage harboring a T7 gn1 gene under the transcriptional control of the lacUV 5 promoter.

[1446] In a preferred embodiment of the present invention, the SRPs are expressed in plants and plants cells such as unicellular plant cells (e.g. algae) (See Falciatore et al., 1999, Marine Biotechnology 1(3):239-251 and references therein) and plant cells from higher plants (e.g., the spermatophytes, such as crop plants). A nucleic acid molecule coding for SRP as depicted in table II, column 5 or 7 may be “introduced” into a plant cell by any means, including transfection, transformation or transduction, electroporation, particle bombardment, agroinfection, and the like. One transformation method known to those of skill in the art is the dipping of a flowering plant into an Agrobacteria solution, wherein the Agrobacteria contains the nucleic acid of the invention, followed by breeding of the transformed gametes.

[1447] Other suitable methods for transforming or transfecting host cells including plant cells can be found in Sambrook, et al., Molecular Cloning: A Laboratory Manual. 2^{nd}, ed., Cold Spring Harbor Laboratory, Cold Spring Harbor Laboratory Press, Cold Spring Harbor, N.Y., 1989, and other laboratory manuals such as Methods in Molecular Biology, 1995, Vol. 44, Agrobacterium protocols, ed: Gartland and Davey, Humana Press, Totowa, N.J. As biotic and abiotic stress tolerance is a general trait wished to be inherited into a wide variety of plants like maize, wheat, rye, oat, triticale, rice, barley, soybean, peanut, cotton, rapeseed and canola, manihot, pepper, sunflower and tagetes, solanaceous plants like potato, tobacco, eggplant, and tomato, Vicia species, pea, alfalfa, bushy plants (coffee, cacao, tea), Salix species, trees (oil palm, coconut), perennial grasses, and forage crops, these crop plants are also preferred target plants for a genetic engineering as one further embodiment of the present invention. Forage crops include, but are not limited to, Wheatgrass, Canarygrass, Bromegrass, Wildrye Grass, Bluegrass, Orchardgrass, Alfalfa, Salfoin, Birdsfoot Trefoil, Alsike Clover, Red Clover, and Sweet Clover.

[1448] In one embodiment of the present invention, transfection of a nucleic acid molecule coding for SRP as depicted in table II, column 5 or 7 into a plant is achieved by Agrobacterium mediated gene transfer. Agrobacterium mediated plant transformation can be performed using for example the GV3101(pMP90) (Koncz and Schell, 1986, Mol. Gen. Genet. 204:383-396) or LBA4404 (Clontech) Agrobacterium tumefaciens strain. Transformation can be performed by standard transformation and regeneration techniques (Deblaere et al., 1994, Nucl. Acids Res. 13:4777-4788; Gelvin, Stanton B. and Schilperoort, Robert A, Plant Molecular Biology Manual, 2^{nd} Ed.—Dordrecht : Kluwer Academic Publ., 1995.—in Sect., Ringbuc Zentrale Signatur: BT11-P ISBN 0-7923-2731-4; Glick, Bernard R.; Thompson, John E., Methods in Plant Molecular Biology and Biotechnology, Boca Raton : CRC Press, 1993 360 S., ISBN 0-8493-5164-2). For example, rapeseed can be transformed via cotyledon or hypocotyl transformation (Moloney et al., 1989, Plant cell Report 8:238-242; De Block et al., 1989, Plant Physiol. 91:694-701). Use of antibiotics for Agrobacterium and plant selection depends on the binary vector and the Agrobacterium strain used for transformation. Rapeseed selection is normally performed using kanamycin as selectable plant marker. Agrobacterium mediated gene transfer to flax can be performed using, for example, a technique described by Mlynarova et al., 1994, Plant Cell Report 13:282-285. Additionally, transformation of soybean can be performed using for example a technique described in European Patent No. 0424 047, U.S. Pat. No. 5,322,783, European Patent No. 0397 687, U.S. Pat. No. 5,376,543, or U.S. Pat. No. 5,169,770. Transformation of maize can be achieved by particle bombardment, polyethylene glycol mediated DNA uptake or via the silicon carbide fiber technique. (See, for example, Freeling and Walbot “The maize handbook” Springer Verlag: New York (1993) ISBN 3-540-97826-7). A specific example of maize transformation is found in U.S. Pat. No. 5,990,387, and a specific example of wheat transformation can be found in PCT Application No. WO 93/07256.

[1449] According to the present invention, the introduced nucleic acid molecule coding for SRP as depicted in table II, column 5 or 7 may be maintained in the plant cell stably if it is incorporated into a non-chromosomal autonomous replicon or integrated into the plant chromosomes or organelle genome. Alternatively, the introduced SRP may be present on an extra-chromosomal non-replicating vector and be transiently expressed or transiently active.

[1450] In one embodiment, a homologous recombinant microorganism can be created wherein the SRP is integrated into a chromosome, a vector is prepared which contains at least a portion of a nucleic acid molecule coding for SRP as depicted in table II, column 5 or 7 into which a deletion, addition, or substitution has been introduced to thereby alter, e.g., functionally disrupt, the SRP gene. Preferably, the SRP gene is a yeast, E.coli, Synechocystis sp. gene, but it can be a homolog from a related plant or even from a mammalian or insect source. The vector can be designed such that, upon homologous recombination, the endogenous nucleic acid molecule coding for SRP as depicted in table II, column 5 or 7 is mutated or otherwise altered but still encodes a functional polypeptide (e.g., the upstream regulatory region can be altered to thereby alter the expression of the endogenous SRP). In a preferred embodiment the biological activity of the protein of the invention is increased upon homologous recombination. To create a point mutation via homologous recombination, DNA-RNA hybrids can be used in a technique known as chimeraplasty (Cole-Strauss et al., 1999, Nucleic Acids Research 27(5):1323-1330 and Kmiec, 1999 Gene therapy American Scientist. 87(3):240-247). Homologous recombination procedures in Physcomitrella patens are also well known in the art and are contemplated for use herein.

[1451] Whereas in the homologous recombination vector, the altered portion of the nucleic acid molecule coding for SRP as depicted in table II, column 5 or 7 is flanked at its 5′ and 3′ ends by an additional nucleic acid molecule of the SRP gene to allow for homologous recombination to occur between the exogenous SRP gene carried by the vector and an endogenous SRP gene, in a microorganism or plant. The additional flanking SRP nucleic acid molecule is of sufficient length for successful homologous recombination with the endogenous gene. Typically, several hundreds of base pairs up to kilobases of flanking DNA (both at the 5′ and 3′ ends) are included in the vector. See, e.g., Thomas, K. R., and Capecchi, M. R., 1987, Cell 51:503 for a description of homologous recombination vectors or Strepp et al., 1998, PNAS, 95 (8):4368-4373 for cDNA based recombination in Physcomitrella patens). The vector is introduced into a microorganism or plant cell (e.g., via polyethylene glycol mediated DNA), and cells in which the introduced SRP gene has homologously recombined with the endogenous SRP gene are selected using art-known techniques.

[1452] Whether present in an extra-chromosomal non-replicating vector or a vector that is integrated into a chromosome, the nucleic acid molecule coding for SRP as depicted in table II, column 5 or 7 preferably resides in a plant expression cassette. A plant expression cassette preferably contains regulatory sequences capable of driving gene expression in plant cells that are operatively linked so that each sequence can fulfill its function, for example, termination of transcription by polyadenylation signals. Preferred polyadenylation signals are those originating from Agrobacterium tumefaciens t-DNA such as the gene 3 known as octopine synthase of the Ti-plasmid pTi-ACH5 (Gielen et al., 1984, EMBO J. 3:835) or functional equivalents thereof but also all other terminators functionally active in plants are suitable. As plant gene expression is very often not limited on transcriptional levels, a plant expression cassette preferably contains other operatively linked sequences like translational enhancers such as the overdrive-sequence containing the 5′-untranslated leader sequence from tobacco mosaic virus enhancing the polypeptide per RNA ratio (Gallie et al., 1987, Nucl. Acids Research 15:8693-8711). Examples of plant expression vectors include those detailed in: Becker, D. et al., 1992, New plant binary vectors with selectable markers located proximal to the left border, Plant Mol. Biol. 20: 1195-1197; and Bevan, M.W., 1984, Binary Agrobacterium vectors for plant transformation, Nucl. Acid. Res. 12:8711-8721; and Vectors for Gene Transfer in Higher Plants; in: Transgenic Plants, Vol. 1, Engineering and Utilization, eds.: Kung and R. Wu, Academic Press, 1993, S. 15-38.

[1453] “Transformation” is defined herein as a process for introducing heterologous DNA into a plant cell, plant tissue, or plant. It may occur under natural or artificial conditions using various methods well known in the art. Transformation may rely on any known method for the insertion of foreign nucleic acid sequences into aprokaryotic or eukaryotic host cell. The method is selected based on the host cell being transformed and may include, but is not limited to, viral infection, electroporation, lipofection, and particle bombardment. Such “transformed” cells include stably transformed cells in which the inserted DNA is capable of replication either as an autonomously replicating plasmid or as part of the host chromosome. They also include cells which transiently express the inserted DNA or RNA for limited periods of time. Transformed plant cells, plant tissue, or plants are understood to encompass not only the end product of a transformation process, but also transgenic progeny thereof.

[1454] The terms “transformed,” “transgenic,” and “recombinant” refer to a host organism such as a bacterium or a plant into which a heterologous nucleic acid molecule has been introduced. The nucleic acid molecule can be stably integrated into the genome of the host or the nucleic acid molecule can also be present as an extrachromosomal molecule. Such an extrachromosomal molecule can be auto-replicating. Transformed cells, tissues, or plants are understood to encompass not only the end product of a transformation process, but also transgenic progeny thereof. A “non-transformed,” “non-transgenic,” or “non-recombinant” host refers to a wild-type organism, e.g., a bacterium or plant, which does not contain the heterologous nucleic acid molecule.

[1455] A “transgenic plant”, as used herein, refers to a plant which contains a foreign nucleotide sequence inserted into either its nuclear genome or organellar genome. It encompasses further the offspring generations i.e. the T1-, T2- and consecutively generations or BC1-, BC2- and consecutively generation as well as crossbreeds thereof with non-transgenic or other transgenic plants.

[1456] The host organism (=transgenic organism) advantageously contains at least one copy of the nucleic acid according to the invention and/or of the nucleic acid construct according to the invention.

[1457] In principle all plants can be used as host organism. Preferred transgenic plants are, for example, selected from the families Aceraceae, Anacardiaceae, Apiaceae, Asteraceae, Brassicaceae, Cactaceae, Cucurbitaceae, Euphorbiaceae, Fabaceae, Malvaceae, Nymphaeaceae, Papaveraceae, Rosaceae, Salicaceae, Solanaceae, Arecaceae, Bromeliaceae, Cyperaceae, lridaceae, Liliaceae, Orchidaceae, Gentianaceae, Labiaceae, Magnoliaceae, Ranunculaceae, Carifolaceae, Rubiaceae, Scrophulariaceae, Caryophyllaceae, Ericaceae, Polygonaceae, Violaceae, Juncaceae or Poaceae and preferably from a plant selected from the group of the families Apiaceae, Asteraceae, Brassicaceae, Cucurbitaceae, Fabaceae, Papaveraceae, Rosaceae, Solanaceae, Liliaceae or Poaceae. Preferred are crop plants such as plants advantageously selected from the group of the genus peanut, oilseed rape, canola, sunflower, safflower, olive, sesame, hazelnut, almond, avocado, bay, pumpkin/squash, linseed, soya, pistachio, borage, maize, wheat, rye, oats, sorghum and millet, triticale, rice, barley, cassava, potato, sugarbeet, egg plant, alfalfa, and perennial grasses and forage plants, oil palm, vegetables (brassicas, root vegetables, tuber vegetables, pod vegetables, fruiting vegetables, onion vegetables, leafy vegetables and stem vegetables), buckwheat, Jerusalem artichoke, broad bean, vetches, lentil, dwarf bean, lupin, clover and Lucerne for mentioning only some of them.

[1458] In one embodiment of the invention transgenic plants are selected from the group comprising corn, soy, oil seed rape (including canola and winter oil seed reap), cotton, wheat and rice.

[1459] In one prefered embodiment, the host plant is selected from the families Aceraceae, Anacardiaceae, Apiaceae, Asteraceae, Brassicaceae, Cactaceae, Cucurbitaceae, Euphorbiaceae, Fabaceae, Malvaceae, Nymphaeaceae, Papaveraceae, Rosaceae, Salicaceae, Solanaceae, Arecaceae, Bromeliaceae, Cyperaceae, lridaceae, Liliaceae, Orchidaceae, Gentianaceae, Labiaceae, Magnoliaceae, Ranunculaceae, Carifolaceae, Rubiaceae, Scrophulariaceae, Caryophyllaceae, Ericaceae, Polygonaceae, Violaceae, Juncaceae or Poaceae and preferably from a plant selected from the group of the families Apiaceae, Asteraceae, Brassicaceae, Cucurbitaceae, Fabaceae, Papaveraceae, Rosaceae, Solanaceae, Liliaceae or Poaceae. Preferred are crop plants and in particular plants mentioned herein above as host plants such as the families and genera mentioned above for example preferred the species Anacardium occidentale, Calendula officinalis, Carthamus tinctorius, Cichorium intybus, Cynara scolymus, Helianthus annus, Tagetes lucida, Tagetes erecta, Tagetes tenuifolia; Daucus carota; Corylus avellana, Corylus colurna, Borago officinalis; Brassica napus, Brassica rapa ssp., Sinapis arvensis Brassica juncea, Brassica juncea var. juncea, Brassica juncea var. crispifolia, Brassica juncea var. foliosa, Brassica nigra, Brassica sinapioides, Melanosinapis communis, Brassica oleracea, Arabidopsis thaliana, Anana comosus, Ananas ananas, Bromelia comosa, Carica papaya, Cannabis sative, Ipomoea batatus, Ipomoea pandurata, Convolvulus batatas, Convolvulus tiliaceus, Ipomoea fastigiata, Ipomoea tiliacea, Ipomoea triloba, Convolvulus panduratus, Beta vulgaris, Beta vulgaris var. altissima, Beta vulgaris var. vulgaris, Beta maritima, Beta vulgaris var. perennis, Beta vulgaris var. conditiva, Beta vulgaris var. esculenta, Cucurbita maxima, Cucurbita mixta, Cucurbita pepo, Cucurbita moschata, Olea europaea, Manihot utilissima, Janipha manihot, Jatropha manihot, Manihot aipil, Manihot dulcis, Manihot manihot, Manihot melanobasis, Manihot esculenta, Ricinus communis, Pisum sativum, Pisum arvense, Pisum humile, Medicago sativa, Medicago falcata, Medicago varia, Glycine max Dolichos soja, Glycine gracilis, Glycine hispida, Phaseolus max, Soja hispida, Soja max, Cocos nucifera, Pelargonium grossularioides, Oleum cocoas, Laurus nobilis, Persea americana, Arachis hypogaea, Linum usitatissimum, Linum humile, Linum austriacum, Linum bienne, Linum angustifolium, Linum catharticum, Linum flavum, Linum grandiflorum, Adenolinum grandiflorum, Linum lewisii, Linum narbonense, Linum perenne, Linum perenne var. lewisii, Linum pratense, Linum trigynum, Punica granatum, Gossypium hirsutum, Gossypium arboreum, Gossypium barbadense, Gossypium herbaceum, Gossypium thurberi, Musa nana, Musa acuminata, Musa paradisiaca, Musa spp., Elaeis guineensis, Papaver orientale, Papaver rhoeas, Papaver dubium, Sesamum indicum, Piper aduncum, Piper amalago, Piper angustifolium, Piper auritum, Piper betel, Piper cubeba, Piper longum, Piper nigrum, Piper retrofractum, Artanthe adunca, Artanthe elongata, Peperomia elongata, Piper elongatum, Steffensia elongata, Hordeum vulgare, Hordeum jubatum, Hordeum murinum, Hordeum secalinum, Hordeum distichon Hordeum aegiceras, Hordeum hexastichon, Hordeum hexastichum, Hordeum irregulare, Hordeum sativum, Hordeum secalinum, Avena sativa, Avena fatua, Avena byzantina, Avena fatua var. sativa, Avena hybrida, Sorghum bicolor, Sorghum halepense, Sorghum saccharatum, Sorghum vulgare, Andropogon drummondii, Holcus bicolor, Holcus sorghum, Sorghum aethiopicum, Sorghum arundinaceum, Sorghum caffrorum, Sorghum cernuum, Sorghum dochna, Sorghum drummondii, Sorghum durra, Sorghum guineense, Sorghum lanceolatum, Sorghum nervosum, Sorghum saccharatum, Sorghum subglabrescens, Sorghum verticilliflorum, Sorghum vulgare, Holcus halepensis, Sorghum miliaceum millet, Panicum militaceum, Zea mays, Triticum aestivum, Triticum durum, Triticum turgidum, Triticum hybernum, Triticum macha, Triticum sativum or Triticum vulgare, Cofea spp., Coffea arabica, Coffea canephora, Coffea liberica, Capsicum annuum, Capsicum annuum var. glabriusculum, Capsicum frutescens, Capsicum annuum, Nicotiana tabacum, Solanum tuberosum, Solanum melongena, Lycopersicon esculentum, Lycopersicon lycopersicum., Lycopersicon pyriforme, Solanum integrifolium, Solanum lycopersicum Theobroma cacao or Camellia sinensis.

[1460] Anacardiaceae such as the genera Pistacia, Mangifera, Anacardium e.g. the species Pistacia vera [pistachios, Pistazie], Mangifer indica [Mango] or Anacardium occidentale [Cashew]; Asteraceae such as the genera Calendula, Carthamus, Centaurea, Cichoriurn, Cynara, Helianthus, Lactuca, Locusta, Tagetes, Valeriana e.g. the species Calendula officinalis [Marigold], Carthamus tinctorius [safflower], Centaurea cyanus [cornflower], Cichorium intybus [blue daisy], Cynara scolymus [Artichoke], Helianthus annus [sunflower], Lactuca sativa, Lactuca crispa, Lactuca esculenta, Lactuca scariola L. ssp. sativa, Lactuca scariola L. var. integrate, Lactuca scariola L. var. integrifolia, Lactuca sativa subsp. romana, Locusta communis, Valeriana/ocusta [lettuce], Tagetes lucida, Tagetes erecta or Tagetes tenuifolia [Marigold]; Apiaceae such as the genera Daucus e.g. the species Daucus carota [carrot]; Betulaceae such as the genera Corylus e.g. the species Corylus avellana or Corylus columa [hazelnut]; Boraginaceae such as the genera Borago e.g. the species Borago officinalis [borage]; Brassicaceae such as the genera Brassica, Melanosinapis, Sinapis, Arabadopsis e.g. the species Brassica napus, Brassica rapa ssp. [canola, oilseed rape, turnip rape], Sinapis arvensis Brassica juncea, Brassica juncea var. juncea, Brassica juncea var. crispifolia, Brassica juncea var. foliosa, Brassica nigra, Brassica sinapioides, Melanosinapis communis [mustard], Brassica oleracea [fodder beet] or Arabidopsis thaliana; Bromeliaceae such as the genera Anana, Bromelia e.g. the species Anana comosus, Ananas ananas or Bromelia comosa [pineapple]; Caricaceae such as the genera Carica e.g. the species Carica papaya [papaya]; Cannabaceae such as the genera Cannabis e.g. the species Cannabis sative [hemp], Convolvulaceae such as the genera Ipomea, Convolvulus e.g. the species Ipomoea batatus, Ipomoea pandurata, Convolvulus batatas, Convolvulus tiliaceus, Ipomoea fastigiata, Ipomoea tiliacea, Ipomoea triloba or Convolvulus panduratus [sweet potato, Man of the Earth, wild potato], Chenopodiaceae such as the genera Beta, i.e. the species Beta vulgaris, Beta vulgaris var. altissima, Beta vulgaris var. Vulgaris, Beta maritima, Beta vulgaris var. perennis, Beta vulgaris var. conditiva or Beta vulgaris var. esculenta [sugar beet]; Cucurbitaceae such as the genera Cucubita e.g. the species Cucurbita maxima, Cucurbita mixta, Cucurbita pepo or Cucurbita moschata [pumpkin, squash]; Elaeagnaceae such as the genera Elaeagnus e.g. the species Olea europaea [olive]; Ericaceae such as the genera Kalmia e.g. the species Kalmia latifolia, Kalmia angustifolia, Kalmia microphylla, Kalmia polifolia, Kalmia occidentalis, Cistus chamaerhodendros or Kalmia lucida [American laurel, broad-leafed laurel, calico bush, spoon wood, sheep laurel, alpine laurel, bog laurel, western bog-laurel, swamp-laurel]; Euphorbiaceae such as the genera Manihot, Janipha, Jatropha, Ricinus e.g. the species Manihot utilissima, Janipha manihot, Jatropha manihot., Manihot aipil, Manihot dulcis, Manihot manihot, Manihot melanobasis, Manihot esculenta [manihot, arrowroot, tapioca, cassava] or Ricinus communis [castor bean, Castor Oil Bush, Castor Oil Plant, Palma Christi, Wonder Tree]; Fabaceae such as the genera Pisum, Albizia, Cathormion, Feuillea, Inga, Pithecolobium, Acacia, Mimosa, Medicajo, Glycine, Dolichos, Phaseolus, Soja e.g. the species Pisum sativum, Pisum arvense, Pisum humile [pea], Albizia berteriana, Albizia julibrissin, Albizia lebbeck, Acacia berteriana, Acacia littoralis, Albizia berteriana, Albizzia berteriana, Cathormion berteriana, Feuillea berteriana, Inga fragrans, Pithecellobium berterianum, Pithecellobium fragrans, Pithecolobium berterianum, Pseudalbizzia berteriana, Acacia julibrissin, Acacia nemu, Albizia nemu, Feuilleea julibrissin, Mimosa julibrissin, Mimosa speciosa, Sericanrda julibrissin, Acacia lebbeck, Acacia macrophylla, Albizia lebbek, Feuilleea lebbeck, Mimosa lebbeck, Mimosa speciosa [bastard logwood, silk tree, East Indian Walnut], Medicago sativa, Medicago falcata, Medicago varia [alfalfa] Glycine max Dolichos soja, Glycine gracilis, Glycine hispida, Phaseolus max, Soja hispida or Soja max [soybean]; Geraniaceae such as the genera Pelargonium, Cocos, Oleum e.g. the species Cocos nucifera, Pelargonium grossularioides or Oleum cocois [coconut]; Gramineae such as the genera Saccharum e.g. the species Saccharum officinarum; Juglandaceae such as the genera Juglans, Wallia e.g. the species Juglans regia, Juglans ailanthifolia, Juglans sieboldiana, Juglans cinerea, Wallia cinerea, Juglans bixbyi, Juglans californica, Juglans hindsii, Juglans intermedia, Juglans jamaicensis, Juglans major, Juglans microcarpa, Juglans nigra or Wallia nigra [walnut, black walnut, common walnut, persian walnut, white walnut, butternut, black walnut]; Lauraceae such as the genera Persea, Laurus e.g. the species laurel Laurus nobilis [bay, laurel, bay laurel, sweet bay], Persea americana Persea americana, Persea gratissima or Persea persea [avocado]; Leguminosae such as the genera Arachis e.g. the species Arachis hypogaea [peanut]; Linaceae such as the genera Linum, Adenolinum e.g. the species Linum usitatissimum, Linum humile, Linum austriacum, Linum bienne, Linum angustifolium, Linum catharticum, Linum flavum, Linum grandiflorum, Adenolinum grandiflorum, Linum lewisii, Linum narbonense, Linum perenne, Linum perenne var. lewisii, Linum pratense or Linum trigynum [flax, linseed]; Lythrarieae such as the genera Punica e.g. the species Punica granatum [pomegranate]; Malvaceae such as the genera Gossypium e.g. the species Gossypium hirsutum, Gossypium arboreum, Gossypium barbadense, Gossypium herbaceum or Gossypium thurberi [cotton]; Musaceae such as the genera Musa e.g. the species Musa nana, Musa acuminata, Musa paradisiaca, Musa spp. [banana]; Onagraceae such as the genera Camissonia, Oenothera e.g. the species Oenothera biennis or Camissonia brevipes [primrose, evening primrose]; Palmae such as the genera Elacis e.g. the species Elaeis guineensis [oil plam]; Papaveraceae such as the genera Papaver e.g. the species Papaver orientate, Papaver rhoeas, Papaver dubium [poppy, oriental poppy, corn poppy, field poppy, shirley poppies, field poppy, long-headed poppy, long-pod poppy]; Pedaliaceae such as the genera Sesamum e.g. the species Sesamum indicum [sesame]; Piperaceae such as the genera Piper, Artanthe, Peperomia, Steffensia e.g. the species Piper aduncum, Piper amalago, Piper angustifolium, Piper auritum, Piper betel, Piper cubeba, Piper longum, Piper nigrum, Piper retrofractum, Artanthe adunca, Artanthe elongata, Peperomia elongata, Piper elongatum, Steffensia elongata. [Cayenne pepper, wild pepper]; Poaceae such as the genera Hordeum, Secale, Avena, Sorghum, Andropogon, Holcus, Panicum, Oryza, Zea, Triticum e.g. the species Hordeum vulgare, Hordeum jubatum, Hordeum murinum, Hordeum secalinum, Hordeum distichon Hordeum aegiceras, Hordeum hexastichon, Hordeum hexastichum, Hordeum irregulare, Hordeum sativum, Hordeum secalinum [barley, pearl barley, foxtail barley, wall barley, meadow barley], Secale cereale [rye], Avena sativa, Avena fatua, Avena byzantina, Avena fatua var. sativa, Avena hybrida [oat], Sorghum bicolor, Sorghum halepense, Sorghum saccharatum, Sorghum vulgare, Andropogon drummondii, Holcus bicolor, Holcus sorghum, Sorghum aethiopicum, Sorghum arundinaceum, Sorghum caffrorum, Sorghum cernuum, Sorghum dochna, Sorghum drummondii, Sorghum durra, Sorghum guineense, Sorghum lanceolatum, Sorghum nervosum, Sorghum saccharatum, Sorghum subglabrescens, Sorghum verticilliflorum, Sorghum vulgare, Holcus halepensis, Sorghum miliaceum millet, Panicum militaceum [Sorghum, millet], Oryza sativa, Oryza latifolia [rice], Zea mays [corn, maize] Triticum aestivum, Triticum durum, Triticum turgidum, Triticum hybernum, Triticum macha, Triticum sativum or Triticum vulgare [wheat, bread wheat, common wheat], Proteaceae such as the genera Macadamia e.g. the species Macadamia intergrifolia [macadamia]; Rubiaceae such as the genera Coffea e.g. the species Cofea spp., Coffea arabica, Coffea canephora or Coffea liberica [coffee]; Scrophulariaceae such as the genera Verbascum e.g. the species Verbascum blattaria, Verbascum chaixii, Verbascum densiflorum, Verbascum lagurus, Verbascum longifolium, Verbascum lychnitis, Verbascum nigrum, Verbascum olympicum, Verbascum phlomoides, Verbascum phoenicum, Verbascum pulverulentum or Verbascum thapsus [mullein, white moth mullein, nettle-leaved mullein, dense-flowered mullein, silver mullein, long-leaved mullein, white mullein, dark mullein, greek mullein, orange mullein, purple mullein, hoary mullein, great mullein]; Solanaceae such as the genera Capsicum, Nicotiana, Solanum, Lycopersicon e.g. the species Capsicum annuum, Capsicum annuum var. glabriusculum, Capsicum frutescens [pepper], Capsicum annuum [paprika], Nicotiana tabacum, Nicotiana alate, Nicotiana attenuata, Nicotiana glauca, Nicotiana langsdorffii, Nicotiana obtusifolia, Nicotiana quadrivalvis, Nicotiana repanda, Nicotiana rustica, Nicotiana sylvestris [tobacco], Solanum tuberosum [potato], Solanum melongena [egg-plant] (Lycopersicon esculentum, Lycopersicon lycopersicum., Lycopersicon pyriforme, Solanum integrifolium or Solanum lycopersicum [tomato]; Sterculiaceae such as the genera Theobroma e.g. the species Theobroma cacao [cacao]; Theaceae such as the genera Camellia e.g. the species Camellia sinensis) [tea].

[1461] The introduction of the nucleic acids according to the invention, the expression cassette or the vector into organisms, plants for example, can in principle be done by all of the methods known to those skilled in the art. The introduction of the nucleic acid sequences gives rise to recombinant or transgenic organisms.

[1462] Unless otherwise specified, the terms “polynucleotides”, “nucleic acid” and “nucleic acid molecule” as used herein are interchangeably. Unless otherwise specified, the terms “peptide”, “polypeptide” and “protein” are interchangeably in the present context. The term “sequence” may relate to polynucleotides, nucleic acids, nucleic acid molecules, peptides, polypeptides and proteins, depending on the context in which the term “sequence” is used. The terms “gene(s)”, “polynucleotide”, “nucleic acid sequence”, “nucleotide sequence”, or “nucleic acid molecule(s)” as used herein refers to a polymeric form of nucleotides of any length, either ribonucleotides or deoxyribonucleotides. The terms refer only to the primary structure of the molecule.

[1463] Thus, the terms “gene(s)”, “polynucleotide”, “nucleic acid sequence”, “nucleotide sequence”, or “nucleic acid molecule(s)” as used herein include double- and single-stranded DNA and RNA. They also include known types of modifications, for example, methylation, “caps”, substitutions of one or more of the naturally occurring nucleotides with an analog. Preferably, the DNA or RNA sequence of the invention comprises a coding sequence encoding the herein defined polypeptide.

[1464] The genes of the invention, coding for an activity selected from the group consisting of: 2,3-dihydroxy-2,3-dihydrophenylpropionatedehydrogenase, 3-deoxy-D-arabino-heptulosonate-7-phosphate (DAHP) synthase, 3-deoxy-D-arabino-heptulosonate-7-phosphatesynthase, 3-oxoacyl-(acyl carrier protein) synthase, acid shock protein precursor, aspartate ammonia-lyase, b0081-protein, b0482-protein, b0631-protein, b0753-protein, b0866-protein, b1052-protein, b1161-protein, b1423-protein, b1878-protein, b2226-protein, b2475-protein, cellobiose/arbutin/salicin-specific PTS enzyme (IIB component/IC component), Checkpoint protein, CP4-57 prophage/RNase LS, Dihydrouridine synthase, DNA-binding transcriptional dual regulator protein, D-xylose transporter subunit, gamma-Glu-putrescine synthase, gluconate transporter, glucose-1-phosphate thymidylyltransferase, Glutamine tRNA synthetase, glutathione-dependent oxidoreductase, glycine betaine transporter subunit protein, glycogen synthase, GTP cyclohydrolase I, heat shock protein, heat shock protein HtpX, heme lyase (CcmH subunit), hexuronate transporter, histidine/lysine/arginine/ornithine transporter subunit protein, HyaA/HyaB-processing protein, inner membrane protein, L-arabinose transporter subunit, Lsm (Like Sm) protein, L-threonine 3-dehydrogenase, methylglyoxal synthase, multidrug efflux system (subunit B), N,N′-diacetylchitobiose-specific enzyme IIA component of PTS, NADH dehydrogenase (subunit N), neutral amino-acid efflux system, nicotinamide-nucleotide adenylyltransferase, ornithine decarboxylase, pantothenate kinase, peptidyl-prolyl cis-trans isomerase A (rotamase A), phosphate transporter, phosphatidylglycerophosphate synthetase, polyphosphate kinase, potassium-transporting ATPase (subunit B), predicted antimicrobial peptide transporter subunit, predicted arginine/ornithine transporter, predicted hydrolase, predicted kinase, predicted ligase, predicted outer membrane lipoprotein, predicted oxidoreductase (flavin:NADH component), predicted porin, predicted PTS enzymes (IIB component/IIC component), predicted serine transporter protein, predicted transporter protein, Protein component of the small (40S) ribosomal subunit, regulator of length of O-antigen component of lipopolysaccharide chains, ribonuclease activity regulator protein RraA, sensory histidine kinase in two-component regulatory system with NarP (NarL), sodium/proton antiporter, Splicing factor, threonine and homoserine efflux system, transcriptional regulator protein, transcriptional repressor protein MetJ, transporter subunit/periplasmic-binding component of ABC superfamily, tRNA pseudouridine synthase, tRNA-specific adenosine deaminase, universal stress protein UP12, Yal049c-protein, YCR059C-protein, YEL005C-protein, YER156C-protein, Yfr042w-protein, YGL045W-protein, and YOR024w-protein are also called “SRP gene”.

[1465] A “coding sequence” is a nucleotide sequence, which is transcribed into mRNA and/or translated into a polypeptide when placed under the control of appropriate regulatory sequences. The boundaries of the coding sequence are determined by a translation start codon at the 5′-terminus and a translation stop codon at the 3′-terminus. A coding sequence can include, but is not limited to mRNA, cDNA, recombinant nucleotide sequences or genomic DNA, while introns may be present as well under certain circumstances.

[1466] The transfer of foreign genes into the genome of a plant is called transformation. In doing this the methods described for the transformation and regeneration of plants from plant tissues or plant cells are utilized for transient or stable transformation. Suitable methods are protoplast transformation by poly(ethylene glycol)-induced DNA uptake, the “biolistic” method using the gene cannon—referred to as the particle bombardment method, electroporation, the incubation of dry embryos in DNA solution, microinjection and gene transfer mediated by Agrobacterium. Said methods are described by way of example in B. Jenes et al., Techniques for Gene Transfer, in: Transgenic Plants, Vol. 1, Engineering and Utilization, eds. S. D. Kung and R. Wu, Academic Press (1993) 128-143 and in Potrykus Annu. Rev. Plant Physiol. Plant Molec. Biol. 42 (1991) 205-225). The nucleic acids or the construct to be expressed is preferably cloned into a vector which is suitable for transforming Agrobacterium tumefaciens, for example pBin19 (Bevan et al., Nucl. Acids Res. 12 (1984) 8711). Agrobacteria transformed by such a vector can then be used in known manner for the transformation of plants, in particular of crop plants such as by way of example tobacco plants, for example by bathing bruised leaves or chopped leaves in an agrobacterial solution and then culturing them in suitable media. The transformation of plants by means of Agrobacterium tumefaciens is described, for example, by Höfgen and Willmitzer in Nucl. Acid Res. (1988) 16, 9877 or is known inter alia from F. F. White, Vectors for Gene Transfer in Higher Plants; in Transgenic Plants, Vol. 1, Engineering and Utilization, eds. S. D. Kung and R. Wu, Academic Press, 1993, pp. 15-38.

[1467] Agrobacteria transformed by an expression vector according to the invention may likewise be used in known manner for the transformation of plants such as test plants like Arabidopsis or crop plants such as cereal crops, corn, oats, rye, barley, wheat, soybean, rice, cotton, sugar beet, canola, sunflower, flax, hemp, potatoes, tobacco, tomatoes, carrots, paprika, oilseed rape, tapioca, cassava, arrowroot, tagetes, alfalfa, lettuce and the various tree, nut and vine species, in particular of oil-containing crop plants such as soybean, peanut, castor oil plant, sunflower, corn, cotton, flax, oilseed rape, coconut, oil palm, safflower (Carthamus tinctorius) or cocoa bean, e.g. by bathing bruised leaves or chopped leaves in an agrobacterial solution and then culturing them in suitable media.

[1468] The genetically modified plant cells may be regenerated by all of the methods known to those skilled in the art. Appropriate methods can be found in the publications referred to above by S. D. Kung and R. Wu, Potrykus or Höfgen and Willmitzer.

[1469] Accordingly, a further aspect of the invention relates to transgenic organisms transformed by at least one nucleic acid sequence, expression cassette or vector according to the invention as well as cells, cell cultures, tissue, parts—such as, for example, leaves, roots, etc. in the case of plant organisms—or reproductive material derived from such organisms. The terms “host organism”, “host cell”, “recombinant (host) organism” and “transgenic (host) cell” are used here interchangeably. Of course these terms relate not only to the particular host organism or the particular target cell but also to the descendants or potential descendants of these organisms or cells. Since, due to mutation or environmental effects certain modifications may arise in successive generations, these descendants need not necessarily be identical with the parental cell but nevertheless are still encompassed by the term as used here.

[1470] For the purposes of the invention “transgenic” or “recombinant” means with regard for example to a nucleic acid sequence, an expression cassette (=gene construct, nucleic acid construct) or a vector containing the nucleic acid sequence according to the invention or an organism transformed by the nucleic acid sequences, expression cassette or vector according to the invention all those constructions produced by genetic engineering methods in which either

[1471] a) the nucleic acid sequence depicted in table I, column 5 or 7 or its derivatives or parts thereof or

[1472] b) a genetic control sequence functionally linked to the nucleic acid sequence described under (a), for example a 3′- and/or 5′-genetic control sequence such as a promoter or terminator, or

[1473] c) (a) and (b)

[1474] are not found in their natural, genetic environment or have been modified by genetic engineering methods, wherein the modification may by way of example be a substitution, addition, deletion, inversion or insertion of one or more nucleotide residues. Natural genetic environment means the natural genomic or chromosomal locus in the organism of origin or inside the host organism or presence in a genomic library. In the case of a genomic library the natural genetic environment of the nucleic acid sequence is preferably retained at least in part. The environment borders the nucleic acid sequence at least on one side and has a sequence length of at least 50 bp, preferably at least 500 bp, particularly preferably at least 1,000 bp, most particularly preferably at least 5,000 bp. A naturally occurring expression cassette—for example the naturally occurring combination of the natural promoter of the nucleic acid sequence according to the invention with the corresponding delta-8-desaturase, delta-9-elongase and/or delta-5-desaturase gene—turns into a transgenic expression cassette when the latter is modified by unnatural, synthetic (“artificial”) methods such as by way of example a mutagenation. Appropriate methods are described by way of example in U.S. Pat. No. 5,565,350 or WO 00/15815.

[1475] Suitable organisms or host organisms for the nucleic acid, expression cassette or vector according to the invention are advantageously in principle all organisms, which are suitable for the expression of recombinant genes as described above. Further examples which may be mentioned are plants such as Arabidopsis, Asteraceae such as Calendula or crop plants such as soybean, peanut, castor oil plant, sunflower, flax, corn, cotton, flax, oilseed rape, coconut, oil palm, safflower (Carthamus tinctorius) or cocoa bean.

[1476] In one embodiment of the invention host plants for the nucleic acid, expression cassette or vector according to the invention are selected from the group comprising corn, soy, oil seed rape (including canola and winter oil seed reap), cotton, wheat and rice.

[1477] A further object of the invention relates to the use of a nucleic acid construct, e.g. an expression cassette, containing DNA sequences encoding polypeptides shown in table II or DNA sequences hybridizing therewith for the transformation of plant cells, tissues or parts of plants.

[1478] In doing so, depending on the choice of promoter, the sequences of shown in table I can be expressed specifically in the leaves, in the seeds, the nodules, in roots, in the stem or other parts of the plant. Those transgenic plants overproducing sequences as depicted in table I, the reproductive material thereof, together with the plant cells, tissues or parts thereof are a further object of the present invention.

[1479] The expression cassette or the nucleic acid sequences or construct according to the invention containing sequences according to table I can, moreover, also be employed for the transformation of the organisms identified by way of example above such as bacteria, yeasts, filamentous fungi and plants.

[1480] Within the framework of the present invention, increased tolerance and/or resistance to environmental stress means, for example, the artificially acquired trait of increased environmental stress resistance due to functional over expression of polypeptide sequences of table II encoded by the corresponding nucleic acid molecules as depicted in table I, column 5 or 7 and/or homologs in the organisms according to the invention, advantageously in the transgenic plants according to the invention, by comparison with the nongenetically modified initial plants at least for the duration of at least one plant generation.

[1481] A constitutive expression of the polypeptide sequences of the of table II encoded by the corresponding nucleic acid molecule as depicted in table I, column 5 or 7 and/or homologs is, moreover, advantageous. On the other hand, however, an inducible expression may also appear desirable. Expression of the polypeptide sequences of the invention can be either direct to the cytoplasm or the organelles preferably the plastids of the host cells, preferably the plant cells.

[1482] The efficiency of the expression of the sequences of the of table II encoded by the corresponding nucleic acid molecule as depicted in table I, column 5 or 7 and/or homologs can be determined, for example, in vitro by shoot meristem propagation. In addition, an expression of the sequences of table II encoded by the corresponding nucleic acid molecule as depicted in table I, column 5 or 7 and/or homologs modified in nature and level and its effect on the metabolic pathways performance can be tested on test plants in greenhouse trials.

[1483] An additional object of the invention comprises transgenic organisms such as transgenic plants transformed by an expression cassette containing sequences of as depicted in table I, column 5 or 7 according to the invention or DNA sequences hybridizing therewith, as well as transgenic cells, tissue, parts and reproduction material of such plants. Particular preference is given in this case to transgenic crop plants such as by way of example barley, wheat, rye, oats, corn, soybean, rice, cotton, sugar beet, oilseed rape and canola, sunflower, flax, hemp, thistle, potatoes, tobacco, tomatoes, tapioca, cassava, arrowroot, alfalfa, lettuce and the various tree, nut and vine species.

[1484] In one embodiment of the invention transgenic plants transformed by an expression cassette containing sequences of as depicted in table I, column 5 or 7 according to the invention or DNA sequences hybridizing therewith are selected from the group comprising corn, soy, oil seed rape (including canola and winter oil seed rape), cotton, wheat and rice.

[1485] For the purposes of the invention plants are mono- and dicotyledonous plants, mosses or algae.

[1486] A further refinement according to the invention are transgenic plants as described above which contain a nucleic acid sequence or construct according to the invention or a expression cassette according to the invention.

[1487] However, transgenic also means that the nucleic acids according to the invention are located at their natural position in the genome of an organism, but that the sequence has been modified in comparison with the natural sequence and/or that the regulatory sequences of the natural sequences have been modified. Preferably, transgenic/recombinant is to be understood as meaning the transcription of the nucleic acids of the invention and shown in table I, occurs at a non-natural position in the genome, that is to say the expression of the nucleic acids is homologous or, preferably, heterologous. This expression can be transiently or of a sequence integrated stably into the genome.

[1488] The term “transgenic plants” used in accordance with the invention also refers to the progeny of a transgenic plant, for example the T₁, T₂, T₃ and subsequent plant generations or the BC₁, BC₂, BC₃ and subsequent plant generations. Thus, the transgenic plants according to the invention can be raised and selfed or crossed with other individuals in order to obtain further transgenic plants according to the invention. Transgenic plants may also be obtained by propagating transgenic plant cells vegetatively. The present invention also relates to transgenic plant material, which can be derived from a transgenic plant population according to the invention. Such material includes plant cells and certain tissues, organs and parts of plants in all their manifestations, such as seeds, leaves, anthers, fibers, tubers, roots, root hairs, stems, embryo, calli, cotelydons, petioles, harvested material, plant tissue, reproductive tissue and cell cultures, which are derived from the actual transgenic plant and/or can be used for bringing about the transgenic plant.

[1489] Any transformed plant obtained according to the invention can be used in a conventional breeding scheme or in in vitro plant propagation to produce more transformed plants with the same characteristics and/or can be used to introduce the same characteristic in other varieties of the same or related species. Such plants are also part of the invention. Seeds obtained from the transformed plants genetically also contain the same characteristic and are part of the invention. As mentioned before, the present invention is in principle applicable to any plant and crop that can be transformed with any of the transformation method known to those skilled in the art.

[1490] Advantageous inducible plant promoters are by way of example the PRP1 promoter [Ward et al., Plant. Mol. Biol. 22(1993), 361-366], a promoter inducible by benzenesulfonamide (EP 388 186), a promoter inducible by tetracycline [Gatz et al., (1992) Plant J. 2,397-404], a promoter inducible by salicylic acid (WO 95/19443), a promoter inducible by abscisic acid (EP 335 528) and a promoter inducible by ethanol or cyclohexanone (WO93/21334). Other examples of plant promoters which can advantageously be used are the promoter of cytosolic FBPase from potato, the ST-LSI promoter from potato (Stockhaus et al., EMBO J. 8 (1989) 2445-245), the promoter of phosphoribosyl pyrophosphate amidotransferase from Glycine max (see also gene bank accession number U87999) or a nodiene-specific promoter as described in EP 249 676. Particular advantageous are those promoters which ensure expression upon the early onset of environmental stress like for example drought or cold.

[1491] In one embodiment seed-specific promoters may be used for monocotylodonous or dicotylodonous plants.

[1492] In principle all natural promoters with their regulation sequences can be used like those named above for the expression cassette according to the invention and the method according to the invention. Over and above this, synthetic promoters may also advantageously be used.

[1493] In the preparation of an expression cassette various DNA fragments can be manipulated in order to obtain a nucleotide sequence, which usefully reads in the correct direction and is equipped with a correct reading frame. To connect the DNA fragments (=nucleic acids according to the invention) to one another adaptors or linkers may be attached to the fragments.

[1494] The promoter and the terminator regions can usefully be provided in the transcription direction with a linker or polylinker containing one or more restriction points for the insertion of this sequence. Generally, the linker has 1 to 10, mostly 1 to 8, preferably 2 to 6, restriction points. In general the size of the linker inside the regulatory region is less than 100 bp, frequently less than 60 bp, but at least 5 bp. The promoter may be both native or homologous as well as foreign or heterologous to the host organism, for example to the host plant. In the 5′-3′ transcription direction the expression cassette contains the promoter, a DNA sequence which shown in table I and a region for transcription termination. Different termination regions can be exchanged for one another in any desired fashion.

[1495] As also used herein, the terms “nucleic acid” and “nucleic acid molecule” are intended to include DNA molecules (e.g., cDNA or genomic DNA) and RNA molecules (e.g., mRNA) and analogs of the DNA or RNA generated using nucleotide analogs. This term also encompasses untranslated sequence located at both the 3′ and 5′ ends of the coding region of the gene: at least about 1000 nucleotides of sequence upstream from the 5′ end of the coding region and at least about 200 nucleotides of sequence downstream from the 3′ end of the coding region of the gene. The nucleic acid molecule can be single-stranded or double-stranded, but preferably is double-stranded DNA.

[1496] An “isolated” nucleic acid molecule is one that is substantially separated from other nucleic acid molecules, which are present in the natural source of the nucleic acid. That means other nucleic acid molecules are present in an amount less than 5% based on weight of the amount of the desired nucleic acid, preferably less than 2% by weight, more preferably less than 1% by weight, most preferably less than 0.5% by weight. Preferably, an “isolated” nucleic acid is free of some of the sequences that naturally flank the nucleic acid (i.e., sequences located at the 5′ and 3′ ends of the nucleic acid) in the genomic DNA of the organism from which the nucleic acid is derived. For example, in various embodiments, the isolated stress related protein encoding nucleic acid molecule can contain less than about 5 kb, 4 kb, 3 kb, 2 kb, 1 kb, 0.5 kb or 0.1 kb of nucleotide sequences which naturally flank the nucleic acid molecule in genomic DNA of the cell from which the nucleic acid is derived. Moreover, an “isolated” nucleic acid molecule, such as a cDNA molecule, can be free from some of the other cellular material with which it is naturally associated, or culture medium when produced by recombinant techniques, or chemical precursors or other chemicals when chemically synthesized.

[1497] A nucleic acid molecule of the present invention, e.g., a nucleic acid molecule encoding an SRP or a portion thereof which confers tolerance and/or resistance to environmental stress and increased biomass production in plants, can be isolated using standard molecular biological techniques and the sequence information provided herein. For example, an Arabidopsis thaliana stress related protein encoding cDNA can be isolated from a A. thaliana c-DNA library or a Synechocystis sp., Brassica napus, Glycine max, Zea mays or Oryza sativa stress related protein encoding cDNA can be isolated from a Synechocystis sp., Brassica napus, Glycine max, Zea mays or Oryza sativa c-DNA library respectively using all or portion of one of the sequences shown in table I. Moreover, a nucleic acid molecule encompassing all or a portion of one of the sequences of table I can be isolated by the polymerase chain reaction using oligonucleotide primers designed based upon this sequence. For example, mRNA can be isolated from plant cells (e.g., by the guanidinium-thiocyanate extraction procedure of Chirgwin et al., 1979 Biochemistry 18:5294-5299) and cDNA can be prepared using reverse transcriptase (e.g., Moloney MLV reverse transcriptase, available from Gibco/BRL, Bethesda, Md.; or AMV reverse transcriptase, available from Seikagaku America, Inc., St. Petersburg, Fla.). Synthetic oligonucleotide primers for polymerase chain reaction amplification can be designed based upon one of the nucleotide sequences shown in table I. A nucleic acid molecule of the invention can be amplified using cDNA or, alternatively, genomic DNA, as a template and appropriate oligonucleotide primers according to standard PCR amplification techniques. The nucleic acid molecule so amplified can be cloned into an appropriate vector and characterized by DNA sequence analysis. Furthermore, oligonucleotides corresponding to a SRP encoding nucleotide sequence can be prepared by standard synthetic techniques, e.g., using an automated DNA synthesizer.

[1498] In a preferred embodiment, an isolated nucleic acid molecule of the invention comprises one of the nucleotide sequences shown in table I encoding the SRP (i.e., the “coding region”), as well as 5′ untranslated sequences and 3′ untranslated sequences.

[1499] Moreover, the nucleic acid molecule of the invention can comprise only a portion of the coding region of one of the sequences of the nucleic acid of table I, for example, a fragment which can be used as a probe or primer or a fragment encoding a biologically active portion of a SRP.

[1500] Portions of proteins encoded by the SRP encoding nucleic acid molecules of the invention are preferably biologically active portions described herein. As used herein, the term “biologically active portion of” a SRP is intended to include a portion, e.g., a domain/motif, of stress related protein that participates in a stress tolerance and/or resistance response in a plant. To determine whether a SRP, or a biologically active portion thereof, results in increased stress tolerance in a plant, a stress analysis of a plant comprising the SRP may be performed. Such analysis methods are well known to those skilled in the art, as detailed in the Examples. More specifically, nucleic acid fragments encoding biologically active portions of a SRP can be prepared by isolating a portion of one of the sequences of the nucleic acid of table I expressing the encoded portion of the SRP or peptide (e.g., by recombinant expression in vitro) and assessing the activity of the encoded portion of the SRP or peptide.

[1501] Biologically active portions of a SRP are encompassed by the present invention and include peptides comprising amino acid sequences derived from the amino acid sequence of a SRP encoding gene, or the amino acid sequence of a protein homologous to a SRP, which include fewer amino acids than a full length SRP or the full length protein which is homologous to a SRP, and exhibits at least some enzymatic or biological activity of a SRP. Typically, biologically active portions (e.g., peptides which are, for example, 5, 10, 15, 20, 30, 35, 36, 37, 38, 39, 40, 50, 100 or more amino acids in length) comprise a domain or motif with at least one activity of a SRP. Moreover, other biologically active portions in which other regions of the protein are deleted, can be prepared by recombinant techniques and evaluated for one or more of the activities described herein. Preferably, the biologically active portions of a SRP include one or more selected domains/motifs or portions thereof having biological activity.

[1502] The term “biological active portion” or “biological activity” means a polypeptide as depicted in table II, column 3 or a portion of said polypeptide which still has at least 10% or 20%, preferably 20%, 30%, 40% or 50%, especially preferably 60%, 70% or 80% of the enzymatic or biological activity of the natural or starting enzyme or protein.

[1503] In the process according to the invention nucleic acid sequences can be used, which, if appropriate, contain synthetic, non-natural or modified nucleotide bases, which can be incorporated into DNA or RNA. Said synthetic, non-natural or modified bases can for example increase the stability of the nucleic acid molecule outside or inside a cell. The nucleic acid molecules of the invention can contain the same modifications as aforementioned.

[1504] As used in the present context the term “nucleic acid molecule” may also encompass the untranslated sequence located at the 3′ and at the 5′ end of the coding gene region, for example at least 500, preferably 200, especially preferably 100, nucleotides of the sequence upstream of the 5′ end of the coding region and at least 100, preferably 50, especially preferably 20, nucleotides of the sequence downstream of the 3′ end of the coding gene region. It is often advantageous only to choose the coding region for cloning and expression purposes.

[1505] Preferably, the nucleic acid molecule used in the process according to the invention or the nucleic acid molecule of the invention is an isolated nucleic acid molecule.

[1506] An “isolated” polynucleotide or nucleic acid molecule is separated from other polynucleotides or nucleic acid molecules, which are present in the natural source of the nucleic acid molecule. An isolated nucleic acid molecule may be a chromosomal fragment of several kb, or preferably, a molecule only comprising the coding region of the gene. Accordingly, an isolated nucleic acid molecule of the invention may comprise chromosomal regions, which are adjacent 5′ and 3′ or further adjacent chromosomal regions, but preferably comprises no such sequences which naturally flank the nucleic acid molecule sequence in the genomic or chromosomal context in the organism from which the nucleic acid molecule originates (for example sequences which are adjacent to the regions encoding the 5′- and 3′-UTRs of the nucleic acid molecule). In various embodiments, the isolated nucleic acid molecule used in the process according to the invention may, for example comprise less than approximately 5 kb, 4 kb, 3 kb, 2 kb, 1 kb, 0.5 kb or 0.1 kb nucleotide sequences which naturally flank the nucleic acid molecule in the genomic DNA of the cell from which the nucleic acid molecule originates.

[1507] The nucleic acid molecules used in the process, for example the polynucleotide of the invention or of a part thereof can be isolated using molecular-biological standard techniques and the sequence information provided herein. Also, for example a homologous sequence or homologous, conserved sequence regions at the DNA or amino acid level can be identified with the aid of comparison algorithms. The former can be used as hybridization probes under standard hybridization techniques (for example those described in Sambrook et al., Molecular Cloning: A Laboratory Manual. 2nd Ed., Cold Spring Harbor Laboratory, Cold Spring Harbor Laboratory Press, Cold Spring Harbor, N.Y., 1989) for isolating further nucleic acid sequences useful in this process.

[1508] A nucleic acid molecule encompassing a complete sequence of the nucleic acid molecules used in the process, for example the polynucleotide of the invention, or a part thereof may additionally be isolated by polymerase chain reaction, oligonucleotide primers based on this sequence or on parts thereof being used. For example, a nucleic acid molecule comprising the complete sequence or part thereof can be isolated by polymerase chain reaction using oligonucleotide primers which have been generated on the basis of this very sequence. For example, mRNA can be isolated from cells (for example by means of the guanidinium thiocyanate extraction method of Chirgwin et al. (1979) Biochemistry 18:5294-5299) and cDNA can be generated by means of reverse transcriptase (for example Moloney MLV reverse transcriptase, available from Gibco/BRL, Bethesda, Md., or AMV reverse transcriptase, obtainable from Seikagaku America, Inc., St. Petersburg, Fla.).

[1509] Synthetic oligonucleotide primers for the amplification, e.g. as shown in table III, column 7, by means of polymerase chain reaction can be generated on the basis of a sequence shown herein, for example the sequence shown in table I, columns 5 and 7 or the sequences derived from table II, columns 5 and 7.

[1510] Moreover, it is possible to identify conserved protein by carrying out protein sequence alignments with the polypeptide encoded by the nucleic acid molecules of the present invention, in particular with the sequences encoded by the nucleic acid molecule shown in, column 5 or 7 of Table I, from which conserved regions, and in turn, degenerate primers can be derived.

[1511] Conserved regions are those, which show a very little variation in the amino acid in one particular position of several homologs from different origin. The consensus sequence and polypeptide motifs shown in column 7 of Table IV are derived from said alignments. Moreover, it is possible to identify conserved regions from various organisms by carrying out protein sequence alignments with the polypeptide encoded by the nucleic acid of the present invention, in particular with the sequences encoded by the polypeptide molecule shown in column 5 or 7 of Table II, from which conserved regions, and in turn, degenerate primers can be derived.

[1512] In one advantageous embodiment, in the method of the present invention the activity of a polypeptide is increased comprising or consisting of a consensus sequence or a polypeptide motif shown in table IV column 7 and in one another embodiment, the present invention relates to a polypeptide comprising or consisting of a consensus sequence or a polypeptide motif shown in table IV, column 7 whereby 20 or less, preferably 15 or 10, preferably 9, 8, 7, or 6, more preferred 5 or 4, even more preferred 3, even more preferred 2, even more preferred 1, most preferred 0 of the amino acids positions indicated can be replaced by any amino acid. In one embodiment not more than 15%, preferably 10%, even more preferred 5%, 4%, 3%, or 2%, most preferred 1% or 0% of the amino acid position indicated by a letter are/is replaced another amino acid. In one embodiment 20 or less, preferably 15 or 10, preferably 9, 8, 7, or 6, more preferred 5 or 4, even more preferred 3, even more preferred 2, even more preferred 1, most preferred 0 amino acids are inserted into a consensus sequence or protein motif.

[1513] The consensus sequence was derived from a multiple alignment of the sequences as listed in table II. The letters represent the one letter amino acid code and indicate that the amino acids are conserved in at least 80% of the aligned proteins, whereas the letter X stands for amino acids, which are not conserved in at least 80% of the aligned sequences. The consensus sequence starts with the first conserved amino acid in the alignment, and ends with the last conserved amino acid in the alignment of the investigated sequences. The number of given X indicates the distances between conserved amino acid residues, e.g. Y-x(21,23)-F means that conserved tyrosine and phenylalanine residues in the alignment are separated from each other by minimum 21 and maximum 23 amino acid residues in the alignment of all investigated sequences.

[1514] Conserved domains were identified from all sequences and are described using a subset of the standard Prosite notation, e.g the pattern Y-x(21,23)-[FW] means that a conserved tyrosine is separated by minimum 21 and maximum 23 amino acid residues from either a phenylalanine or tryptophane. Patterns had to match at least 80% of the investigated proteins.

[1515] Conserved patterns were identified with the software tool MEME version 3.5.1 or manually. MEME was developed by Timothy L. Bailey and Charles Elkan, Dept. of Computer Science and Engineering, University of California, San Diego, USA and is described by Timothy L. Bailey and Charles Elkan [Fitting a mixture model by expectation maximization to discover motifs in biopolymers, Proceedings of the Second International Conference on Intelligent Systems for Molecular Biology, pp. 28-36, AAAI Press, Menlo Park, Calif., 1994]. The source code for the stand-alone program is public available from the San Diego Supercomputer center (http://meme.sdsc.edu).

[1516] For identifying common motifs in all sequences with the software tool MEME, the following settings were used: -maxsize 500000, -nmotifs 15, -evt 0.001, -maxw 60, -distance 1e-3, -minsites number of sequences used for the analysis. Input sequences for MEME were non-aligned sequences in Fasta format. Other parameters were used in the default settings in this software version.

[1517] Prosite patterns for conserved domains were generated with the software tool Pratt version 2.1 or manually. Pratt was developed by Inge Jonassen, Dept. of Informatics, University of Bergen, Norway and is described by Jonassen et al. [I. Jonassen, J. F. Collins and D. G. Higgins, Finding flexible patterns in unaligned protein sequences, Protein Science 4 (1995), pp. 1587-1595; I. Jonassen, Efficient discovery of conserved patterns using a pattern graph, Submitted to CABIOS February 1997]. The source code (ANSI C) for the stand-alone program is public available, e.g. at established Bioinformatic centers like EBI (European Bioinformatics Institute).

[1518] For generating patterns with the software tool Pratt, following settings were used: PL (max Pattern Length): 100, PN (max Nr of Pattern Symbols): 100, PX (max Nr of consecutive x's): 30, FN (max Nr of flexible spacers): 5, FL (max Flexibility): 30, FP (max Flex.Product): 10, ON (max number patterns): 50. Input sequences for Pratt were distinct regions of the protein sequences exhibiting high similarity as identified from software tool MEME. The minimum number of sequences, which have to match the generated patterns (CM, min Nr of Seqs to Match) was set to at least 80% of the provided sequences. Parameters not mentioned here were used in their default settings.

[1519] The Prosite patterns of the conserved domains can be used to search for protein sequences matching this pattern. Various established Bioinformatic centers provide public internet portals for using those patterns in database searches (e.g. PIR [Protein Information Resource, located at Georgetown University Medical Center] or ExPASy [Expert Protein Analysis System]). Alternatively, stand-alone software is available, like the program Fuzzpro, which is part of the EMBOSS software package. For example, the program Fuzzpro not only allows to search for an exact pattern-protein match but also allows to set various ambiguities in the performed search.

[1520] The alignment was performed with the software ClustalW (version 1.83) and is described by Thompson et al. [Thompson, J. D., Higgins, D. G. and Gibson, T. J. (1994) CLUSTAL W: improving the sensitivity of progressive multiple sequence alignment through sequence weighting, positions-specific gap penalties and weight matrix choice. Nucleic Acids Research, 22:4673-4680]. The source code for the stand-alone program is public available from the European Molecular Biology Laboratory; Heidelberg, Germany. The analysis was performed using the default parameters of ClustalW v1.83 (gap open penalty: 10.0; gap extension penalty: 0.2; protein matrix: Gonnet; pprotein/DNA endgap: −1; protein/DNA gapdist: 4).

[1521] Degenerated primers can then be utilized by PCR for the amplification of fragments of novel proteins having above-mentioned activity, e.g. conferring the increased tolerance and/or resistance to environmental stress and increased biomass production as compared to a corresponding non-transformed wild type plant cell, plant or part thereof after increasing the expression or activity or having the activity of a protein as shown in table II, column 3 or further functional homologs of the polypeptide of the invention from other organisms.

[1522] These fragments can then be utilized as hybridization probe for isolating the complete gene sequence. As an alternative, the missing 5′ and 3′ sequences can be isolated by means of RACE-PCR. A nucleic acid molecule according to the invention can be amplified using cDNA or, as an alternative, genomic DNA as template and suitable oligonucleotide primers, following standard PCR amplification techniques. The nucleic acid molecule amplified thus can be cloned into a suitable vector and characterized by means of DNA sequence analysis. Oligonucleotides, which correspond to one of the nucleic acid molecules used in the process can be generated by standard synthesis methods, for example using an automatic DNA synthesizer.

[1523] Nucleic acid molecules which are advantageously for the process according to the invention can be isolated based on their homology to the nucleic acid molecules disclosed herein using the sequences or part thereof as hybridization probe and following standard hybridization techniques under stringent hybridization conditions. In this context, it is possible to use, for example, isolated nucleic acid molecules of at least 15, 20, 25, 30, 35, 40, 50, 60 or more nucleotides, preferably of at least 15, 20 or 25 nucleotides in length which hybridize under stringent conditions with the above-described nucleic acid molecules, in particular with those which encompass a nucleotide sequence of the nucleic acid molecule used in the process of the invention or encoding a protein used in the invention or of the nucleic acid molecule of the invention. Nucleic acid molecules with 30, 50, 100, 250 or more nucleotides may also be used.

[1524] The term “homology” means that the respective nucleic acid molecules or encoded proteins are functionally and/or structurally equivalent. The nucleic acid molecules that are homologous to the nucleic acid molecules described above and that are derivatives of said nucleic acid molecules are, for example, variations of said nucleic acid molecules which represent modifications having the same biological function, in particular encoding proteins with the same or substantially the same biological function. They may be naturally occurring variations, such as sequences from other plant varieties or species, or mutations. These mutations may occur naturally or may be obtained by mutagenesis techniques. The allelic variations may be naturally occurring allelic variants as well as synthetically produced or genetically engineered variants. Structurally equivalents can, for example, be identified by testing the binding of said polypeptide to antibodies or computer based predictions. Structurally equivalent have the similar immunological characteristic, e.g. comprise similar epitopes.

[1525] By “hybridizing” it is meant that such nucleic acid molecules hybridize under conventional hybridization conditions, preferably under stringent conditions such as described by, e.g., Sambrook (Molecular Cloning; A Laboratory Manual, 2nd Edition, Cold Spring Harbor Laboratory Press, Cold Spring Harbor, N.Y. (1989)) or in Current Protocols in Molecular Biology, John Wiley & Sons, N.Y. (1989), 6.3.1-6.3.6.

[1526] According to the invention, DNA as well as RNA molecules of the nucleic acid of the invention can be used as probes. Further, as template for the identification of functional homologues Northern blot assays as well as Southern blot assays can be performed. The Northern blot assay advantageously provides further informations about the expressed gene product: e.g. expression pattern, occurrence of processing steps, like splicing and capping, etc. The Southern blot assay provides additional information about the chromosomal localization and organization of the gene encoding the nucleic acid molecule of the invention.

[1527] A preferred, nonlimiting example of stringent hybridization conditions are hybridizations in 6×sodium chloride/sodium citrate (=SSC) at approximately 45° C., followed by one or more wash steps in 0.2×SSC, 0.1% SDS at 50 to 65° C., for example at 50° C., 55° C. or 60° C. The skilled worker knows that these hybridization conditions differ as a function of the type of the nucleic acid and, for example when organic solvents are present, with regard to the temperature and concentration of the buffer. The temperature under “standard hybridization conditions” differs for example as a function of the type of the nucleic acid between 42° C. and 58° C., preferably between 45° C. and 50° C. in an aqueous buffer with a concentration of 0.1×0.5×, 1×, 2×, 3×, 4× or 5×SSC (pH 7.2). If organic solvent(s) is/are present in the abovementioned buffer, for example 50% formamide, the temperature under standard conditions is approximately 40° C., 42° C. or 45° C. The hybridization conditions for DNA:DNA hybrids are preferably for example 0.1×SSC and 20° C., 25° C., 30° C., 35° C., 40° C. or 45° C., preferably between 30° C. and 45° C. The hybridization conditions for DNA:RNA hybrids are preferably for example 0.1×SSC and 30° C., 35° C., 40° C., 45° C., 50° C. or 55° C., preferably between 45° C. and 55° C. The abovementioned hybridization temperatures are determined for example for a nucleic acid approximately 100 bp (=base pairs) in length and a G+C content of 50% in the absence of formamide. The skilled worker knows to determine the hybridization conditions required with the aid of textbooks, for example the ones mentioned above, or from the following textbooks: Sambrook et al., “Molecular Cloning”, Cold Spring Harbor Laboratory, 1989; Hames and Higgins (Ed.) 1985, “Nucleic Acids Hybridization: A Practical Approach”, IRL Press at Oxford University Press, Oxford; Brown (Ed.) 1991, “Essential Molecular Biology: A Practical Approach”, IRL Press at Oxford University Press, Oxford.

[1528] A further example of one such stringent hybridization condition is hybridization at 4×SSC at 65° C., followed by a washing in 0.1×SSC at 65° C. for one hour. Alternatively, an exemplary stringent hybridization condition is in 50% formamide, 4×SSC at 42° C. Further, the conditions during the wash step can be selected from the range of conditions delimited by low-stringency conditions (approximately 2×SSC at 50° C.) and high-stringency conditions (approximately 0.2×SSC at 50° C., preferably at 65° C.) (20×SSC: 0.3M sodium citrate, 3M NaCl, pH 7.0). In addition, the temperature during the wash step can be raised from low-stringency conditions at room temperature, approximately 22° C., to higher-stringency conditions at approximately 65° C. Both of the parameters salt concentration and temperature can be varied simultaneously, or else one of the two parameters can be kept constant while only the other is varied. Denaturants, for example formamide or SDS, may also be employed during the hybridization. In the presence of 50% formamide, hybridization is preferably effected at 42° C. Relevant factors like i) length of treatment, ii) salt conditions, iii) detergent conditions, iv) competitor DNAs, v) temperature and vi) probe selection can be combined case by case so that not all possibilities can be mentioned herein.

[1529] Thus, in a preferred embodiment, Northern blots are prehybridized with Rothi-Hybri-Quick buffer (Roth, Karlsruhe) at 68° C. for 2 h. Hybridization with radioactive labelled probe is done overnight at 68° C. Subsequent washing steps are performed at 68° C. with 1×SSC.

[1530] For Southern blot assays the membrane is prehybridized with Rothi-Hybri-Quick buffer (Roth, Karlsruhe) at 68° C. for 2 h. The hybridization with radioactive labelled probe is conducted over night at 68° C. Subsequently the hybridization buffer is discarded and the filter shortly washed using 2×SSC; 0.1% SDS. After discarding the washing buffer new 2×SSC; 0.1% SDS buffer is added and incubated at 68° C. for 15 minutes. This washing step is performed twice followed by an additional washing step using 1×SSC; 0.1% SDS at 68° C. for 10 min.

[1531] Some examples of conditions for DNA hybridization (Southern blot assays) and wash step are shown hereinbelow:
[1532] (1) Hybridization conditions can be selected, for example, from the following conditions:
[1533] a) 4×SSC at 65° C.,
[1534] b) 6×SSC at 45° C.,
[1535] c) 6×SSC, 100 mg/ml denatured fragmented fish sperm DNA at 68° C.,
[1536] d) 6×SSC, 0.5% SDS, 100 mg/ml denatured salmon sperm DNA at 68° C.,
[1537] e) 6×SSC, 0.5% SDS, 100 mg/ml denatured fragmented salmon sperm DNA, 50% formamide at 42° C.,
[1538] f) 50% formamide, 4×SSC at 42° C.,
[1539] g) 50% (vol/vol) formamide, 0.1% bovine serum albumin, 0.1% Ficoll, 0.1% polyvinylpyrrolidone, 50 mM sodium phosphate buffer pH 6.5, 750 mM NaCl, 75 mM sodium citrate at 42° C.,
[1540] h) 2× or 4×SSC at 50° C. (low-stringency condition), or
[1541] i) 30 to 40% formamide, 2× or 4×SSC at 42° C. (low-stringency condition).
[1542] (2) Wash steps can be selected, for example, from the following conditions:
[1543] a) 0.015 M NaCl/0.0015 M sodium citrate/0.1% SDS at 50° C.
[1544] b) 0.1×SSC at 65° C.
[1545] c) 0.1×SSC, 0.5% SDS at 68° C.
[1546] d) 0.1×SSC, 0.5% SDS, 50% formamide at 42° C.
[1547] e) 0.2×SSC, 0.1% SDS at 42° C.
[1548] f) 2×SSC at 65° C. (low-stringency condition).

[1549] Polypeptides having above-mentioned activity, i.e. conferring the increased tolerance and/or resistance to environmental stress and increased biomass production as compared to a corresponding non-transformed wild type plant cell, plant or part thereof, derived from other organisms, can be encoded by other DNA sequences which hybridize to the sequences shown in table I, columns 5 and 7 under relaxed hybridization conditions and which code on expression for peptides conferring the increased tolerance and/or resistance to environmental stress and increased biomass production as compared to a corresponding non-transformed wild type plant cell, plant or part thereof.

[1550] Further, some applications have to be performed at low stringency hybridization conditions, without any consequences for the specificity of the hybridization. For example, a Southern blot analysis of total DNA could be probed with a nucleic acid molecule of the present invention and washed at low stringency (55° C. in 2×SSPE, 0.1% SDS). The hybridisation analysis could reveal a simple pattern of only genes encoding polypeptides of the present invention or used in the process of the invention, e.g. having herein-mentioned activity of increasing the tolerance and/or resistance to environmental stress and the biomass production as compared to a corresponding non-transformed wild type plant cell, plant or part thereof. A further example of such low-stringent hybridization conditions is 4×SSC at 50° C. or hybridization with 30 to 40% formamide at 42° C. Such molecules comprise those which are fragments, analogues or derivatives of the polypeptide of the invention or used in the process of the invention and differ, for example, by way of amino acid and/or nucleotide deletion(s), insertion(s), substitution(s), addition(s) and/or recombination(s) or any other modification(s) known in the art either alone or in combination from the above-described amino acid sequences or their underlying nucleotide sequence(s). However, it is preferred to use high stringency hybridization conditions.

[1551] Hybridization should advantageously be carried out with fragments of at least 5, 10, 15, 20, 25, 30, 35 or 40 bp, advantageously at least 50, 60, 70 or 80 bp, preferably at least 90, 100 or 110 bp. Most preferably are fragments of at least 15, 20, 25 or 30 bp. Preferably are also hybridizations with at least 100 bp or 200, very especially preferably at least 400 bp in length. In an especially preferred embodiment, the hybridization should be carried out with the entire nucleic acid sequence with conditions described above.

[1552] The terms “fragment”, “fragment of a sequence” or “part of a sequence” mean a truncated sequence of the original sequence referred to. The truncated sequence (nucleic acid or protein sequence) can vary widely in length; the minimum size being a sequence of sufficient size to provide a sequence with at least a comparable function and/or activity of the original sequence referred to or hybridizing with the nucleic acid molecule of the invention or used in the process of the invention under stringent conditions, while the maximum size is not critical. In some applications, the maximum size usually is not substantially greater than that required to provide the desired activity and/or function(s) of the original sequence.

[1553] Typically, the truncated amino acid sequence will range from about 5 to about 310 amino acids in length. More typically, however, the sequence will be a maximum of about 250 amino acids in length, preferably a maximum of about 200 or 100 amino acids. It is usually desirable to select sequences of at least about 10, 12 or 15 amino acids, up to a maximum of about 20 or 25 amino acids.

[1554] The term “epitope” relates to specific immunoreactive sites within an antigen, also known as antigenic determinates. These epitopes can be a linear array of monomers in a polymeric composition—such as amino acids in a protein—or consist of or comprise a more complex secondary or tertiary structure. Those of skill will recognize that immunogens (i.e., substances capable of eliciting an immune response) are antigens; however, some antigen, such as haptens, are not immunogens but may be made immunogenic by coupling to a carrier molecule. The term “antigen” includes references to a substance to which an antibody can be generated and/or to which the antibody is specifically immunoreactive.

[1555] In one embodiment the present invention relates to a epitope of the polypeptide of the present invention or used in the process of the present invention and confers an increased tolerance and/or resistance to environmental stress and increased biomass production as compared to a corresponding non-transformed wild type plant cell, plant or part thereof.

[1556] The term “one or several amino acids” relates to at least one amino acid but not more than that number of amino acids, which would result in a homology of below 50% identity. Preferably, the identity is more than 70% or 80%, more preferred are 85%, 90%, 91%, 92%, 93%, 94% or 95%, even more preferred are 96%, 97%, 98%, or 99% identity.

[1557] Further, the nucleic acid molecule of the invention comprises a nucleic acid molecule, which is a complement of one of the nucleotide sequences of above mentioned nucleic acid molecules or a portion thereof. A nucleic acid molecule which is complementary to one of the nucleotide sequences shown in table I, columns 5 and 7 is one which is sufficiently complementary to one of the nucleotide sequences shown in table I, columns 5 and 7 such that it can hybridize to one of the nucleotide sequences shown in table I, columns 5 and 7, thereby forming a stable duplex. Preferably, the hybridisation is performed under stringent hybrization conditions. However, a complement of one of the herein disclosed sequences is preferably a sequence complement thereto according to the base pairing of nucleic acid molecules well known to the skilled person. For example, the bases A and G undergo base pairing with the bases T and U or C, resp. and visa versa. Modifications of the bases can influence the base-pairing partner.

[1558] The nucleic acid molecule of the invention comprises a nucleotide sequence which is at least about 30%, 35%, 40% or 45%, preferably at least about 50%, 55%, 60% or 65%, more preferably at least about 70%, 80%, or 90%, and even more preferably at least about 95%, 97%, 98%, 99% or more homologous to a nucleotide sequence shown in table I, columns 5 and 7, or a portion thereof and preferably has above mentioned activity, in particular having a tolerance and/or resistance to environmental stress and biomass production increasing activity after increasing the acitivity or an activity of a gene product as shown in table II, column 3 by for example expression either in the cytsol or in an organelle such as a plastid or mitochondria or both, preferably in plastids.

[1559] The nucleic acid molecule of the invention comprises a nucleotide sequence which hybridizes, preferably hybridizes under stringent conditions as defined herein, to one of the nucleotide sequences shown in table I, columns 5 and 7, or a portion thereof and encodes a protein having above-mentioned activity, e.g. conferring an increased tolerance and/or resistance to environmental stress and increased biomass production as compared to a corresponding non-transformed wild type plant cell, plant or part thereof by for example expression either in the cytsol or in an organelle such as a plastid or mitochondria or both, preferably in plastids, and optionally, the activity selected from the group consisting of: 2,3-dihydroxy-2,3-dihydrophenylpropionatedehydrogenase, 3-deoxy-D-arabino-heptulosonate-7-phosphate (DAHP) synthase, 3-deoxy-D-arabino-heptulosonate-7-phosphatesynthase, 3-oxoacyl-(acyl carrier protein) synthase, acid shock protein precursor, aspartate ammonia-lyase, b0081-protein, b0482-protein, b0631-protein, b0753-protein, b0866-protein, b1052-protein, b1161-protein, b1423-protein, b1878-protein, b2226-protein, b2475-protein, cellobiose/arbutin/salicin-specific PTS enzyme (IIB component/IC component), Checkpoint protein, CP4-57 prophage/RNase LS, Dihydrouridine synthase, DNA-binding transcriptional dual regulator protein, D-xylose transporter subunit, gamma-Glu-putrescine synthase, gluconate transporter, glucose-1-phosphate thymidylyltransferase, Glutamine tRNA synthetase, glutathione-dependent oxidoreductase, glycine betaine transporter subunit protein, glycogen synthase, GTP cyclohydrolase I, heat shock protein, heat shock protein HtpX, heme lyase (CcmH subunit), hexuronate transporter, histidine/lysine/arginine/ornithine transporter subunit protein, HyaA/HyaB-processing protein, inner membrane protein, L-arabinose transporter subunit, Lsm (Like Sm) protein, L-threonine 3-dehydrogenase, methylglyoxal synthase, multidrug efflux system (subunit B), N,N′-diacetylchitobiose-specific enzyme IIA component of PTS, NADH dehydrogenase (subunit N), neutral amino-acid efflux system, nicotinamide-nucleotide adenylyltransferase, ornithine decarboxylase, pantothenate kinase, peptidylprolyl cis-trans isomerase A (rotamase A), phosphate transporter, phosphatidylglycerophosphate synthetase, polyphosphate kinase, potassium-transporting ATPase (subunit B), predicted antimicrobial peptide transporter subunit, predicted arginine/ornithine transporter, predicted hydrolase, predicted kinase, predicted ligase, predicted outer membrane lipoprotein, predicted oxidoreductase (flavin:NADH component), predicted porin, predicted PTS enzymes (IIB component/IIC component), predicted serine transporter protein, predicted transporter protein, Protein component of the small (40S) ribosomal subunit, regulator of length of O-antigen component of lipopolysaccharide chains, ribonuclease activity regulator protein RraA, sensory histidine kinase in two-component regulatory system with NarP (NarL), sodium/proton antiporter, Splicing factor, threonine and homoserine efflux system, transcriptional regulator protein, transcriptional repressor protein MetJ, transporter subunit/periplasmic-binding component of ABC superfamily, tRNA pseudouridine synthase, tRNA-specific adenosine deaminase, universal stress protein UP12, Yal049c-protein, YCR059C-protein, YEL005C-protein, YER156C-protein, Yfr042w-protein, YGL045W-protein, and YOR024w-protein.

[1560] Moreover, the nucleic acid molecule of the invention can comprise only a portion of the coding region of one of the sequences shown in table I, columns 5 and 7, for example a fragment which can be used as a probe or primer or a fragment encoding a biologically active portion of the polypeptide of the present invention or of a polypeptide used in the process of the present invention, i.e. having above-mentioned activity, e.g. conferring an increase of the tolerance and/or resistance to environmental stress and biomass production as compared to a corresponding non-transformed wild type plant cell, plant or part thereof if its activity is increased by for example expression either in the cytsol or in an organelle such as a plastid or mitochondria or both, preferably in plastids. The nucleotide sequences determined from the cloning of the present protein-according-to-the-invention-encoding gene allows for the generation of probes and primers designed for use in identifying and/or cloning its homologues in other cell types and organisms. The probe/primer typically comprises substantially purified oligonucleotide. The oligonucleotide typically comprises a region of nucleotide sequence that hybridizes under stringent conditions to at least about 12, 15 preferably about 20 or 25, more preferably about 40, 50 or 75 consecutive nucleotides of a sense strand of one of the sequences set forth, e.g., in table I, columns 5 and 7, an anti-sense sequence of one of the sequences, e.g., set forth in table I, columns 5 and 7, or naturally occurring mutants thereof. Primers based on a nucleotide of invention can be used in PCR reactions to clone homologues of the polypeptide of the invention or of the polypeptide used in the process of the invention, e.g. as the primers described in the examples of the present invention, e.g. as shown in the examples. A PCR with the primers shown in table III, column 7 will result in a fragment of the gene product as shown in table II, column 3.

[1561] Primer sets are interchangable. The person skilled in the art knows to combine said primers to result in the desired product, e.g. in a full length clone or a partial sequence. Probes based on the sequences of the nucleic acid molecule of the invention or used in the process of the present invention can be used to detect transcripts or genomic sequences encoding the same or homologous proteins. The probe can further comprise a label group attached thereto, e.g. the label group can be a radioisotope, a fluorescent compound, an enzyme, or an enzyme co-factor. Such probes can be used as a part of a genomic marker test kit for identifying cells which express an polypeptide of the invention or used in the process of the present invention, such as by measuring a level of an encoding nucleic acid molecule in a sample of cells, e.g., detecting mRNA levels or determining, whether a genomic gene comprising the sequence of the polynucleotide of the invention or used in the process of the present invention has been mutated or deleted.

[1562] The nucleic acid molecule of the invention encodes a polypeptide or portion thereof which includes an amino acid sequence which is sufficiently homologous to the amino acid sequence shown in table II, columns 5 and 7 such that the protein or portion thereof maintains the ability to participate in the increase of tolerance and/or resistance to environmental stress and increase of biomass production as compared to a corresponding non-transformed wild type plant cell, plant or part thereof, in particular increasing the activity as mentioned above or as described in the examples in plants is comprised.

[1563] As used herein, the language “sufficiently homologous” refers to proteins or portions thereof which have amino acid sequences which include a minimum number of identical or equivalent amino acid residues (e.g., an amino acid residue which has a similar side chain as an amino acid residue in one of the sequences of the polypeptide of the present invention) to an amino acid sequence shown in table II, columns 5 and 7 such that the protein or portion thereof is able to participate in the increase of the increase of tolerance and/or resistance to environmental stress and increase of biomass production as compared to a corresponding non-transformed wild type plant cell, plant or part thereof. For examples having the activity of a protein as shown in table II, column 3 and as described herein.

[1564] In one embodiment, the nucleic acid molecule of the present invention comprises a nucleic acid that encodes a portion of the protein of the present invention. The protein is at least about 30%, 35%, 40%, 45% or 50%, preferably at least about 55%, 60%, 65% or 70%, and more preferably at least about 75%, 80%, 85%, 90%, 91%, 92%, 93% or 94% and most preferably at least about 95%, 97%, 98%, 99% or more homologous to an entire amino acid sequence of table II, columns 5 and 7 and having above-mentioned activity, e.g. conferring an increased tolerance and/or resistance to environmental stress and increased biomass production as compared to a corresponding non-transformed wild type plant cell, plant or part thereof by for example expression either in the cytsol or in an organelle such as a plastid or mitochondria or both, preferably in plastids.

[1565] Portions of proteins encoded by the nucleic acid molecule of the invention are preferably biologically active, preferably having above-mentioned annotated activity, e.g. conferring an increase in tolerance and/or resistance to environmental stress and increase in biomass production as compared to a corresponding non-transformed wild type plant cell, plant or part thereof after increase of activity.

[1566] As mentioned herein, the term “biologically active portion” is intended to include a portion, e.g., a domain/motif, that confers increase in tolerance and/or resistance to environmental stress and increase in biomass production as compared to a corresponding non-transformed wild type plant cell, plant or part thereof or has an immunological activity such that it is binds to an antibody binding specifially to the polypeptide of the present invention or a polypeptide used in the process of the present invention for increased tolerance and/or resistance to environmental stress and increased biomass production as compared to a corresponding non-transformed wild type plant cell, plant or part thereof.

[1567] The invention further relates to nucleic acid molecules that differ from one of the nucleotide sequences shown in table I A, columns 5 and 7 (and portions thereof) due to degeneracy of the genetic code and thus encode a polypeptide of the present invention, in particular a polypeptide having above mentioned activity, e.g. as that polypeptides depicted by the sequence shown in table II, columns 5 and 7 or the functional homologues. Advantageously, the nucleic acid molecule of the invention comprises, or in an other embodiment has, a nucleotide sequence encoding a protein comprising, or in an other embodiment having, an amino acid sequence shown in table II, columns 5 and 7 or the functional homologues. In a still further embodiment, the nucleic acid molecule of the invention encodes a full length protein which is substantially homologous to an amino acid sequence shown in table II, columns 5 and 7 or the functional homologues. However, in a preferred embodiment, the nucleic acid molecule of the present invention does not consist of the sequence shown in table I, preferably table IA, columns 5 and 7.

[1568] In addition, it will be appreciated by those skilled in the art that DNA sequence polymorphisms that lead to changes in the amino acid sequences may exist within a population. Such genetic polymorphism in the gene encoding the polypeptide of the invention or comprising the nucleic acid molecule of the invention may exist among individuals within a population due to natural variation.

[1569] As used herein, the terms “gene” and “recombinant gene” refer to nucleic acid molecules comprising an open reading frame encoding the polypeptide of the invention or comprising the nucleic acid molecule of the invention or encoding the polypeptide used in the process of the present invention, preferably from a crop plant or from a microorgansim useful for the method of the invention. Such natural variations can typically result in 1-5% variance in the nucleotide sequence of the gene. Any and all such nucleotide variations and resulting amino acid polymorphisms in genes encoding a polypeptide of the invention or comprising a the nucleic acid molecule of the invention that are the result of natural variation and that do not alter the functional activity as described are intended to be within the scope of the invention.

[1570] Nucleic acid molecules corresponding to natural variants homologues of a nucleic acid molecule of the invention, which can also be a cDNA, can be isolated based on their homology to the nucleic acid molecules disclosed herein using the nucleic acid molecule of the invention, or a portion thereof, as a hybridization probe according to standard hybridization techniques under stringent hybridization conditions.

[1571] Accordingly, in another embodiment, a nucleic acid molecule of the invention is at least 15, 20, 25 or 30 nucleotides in length. Preferably, it hybridizes under stringent conditions to a nucleic acid molecule comprising a nucleotide sequence of the nucleic acid molecule of the present invention or used in the process of the present invention, e.g. comprising the sequence shown in table I, columns 5 and 7. The nucleic acid molecule is preferably at least 20, 30, 50, 100, 250 or more nucleotides in length.

[1572] The term “hybridizes under stringent conditions” is defined above. In one embodiment, the term “hybridizes under stringent conditions” is intended to describe conditions for hybridization and washing under which nucleotide sequences at least 30%, 40%, 50% or 65% identical to each other typically remain hybridized to each other. Preferably, the conditions are such that sequences at least about 70%, more preferably at least about 75% or 80%, and even more preferably at least about 85%, 90% or 95% or more identical to each other typically remain hybridized to each other.

[1573] Preferably, nucleic acid molecule of the invention that hybridizes under stringent conditions to a sequence shown in table I, columns 5 and 7 corresponds to a naturally-occurring nucleic acid molecule of the invention. As used herein, a “naturally-occurring” nucleic acid molecule refers to an RNA or DNA molecule having a nucleotide sequence that occurs in nature (e.g., encodes a natural protein). Preferably, the nucleic acid molecule encodes a natural protein having above-mentioned activity, e.g. conferring the tolerance and/or resistance to environmental stress and biomass production increase after increasing the expression or activity thereof or the activity of a protein of the invention or used in the process of the invention by for example expression the nucleic acid sequence of the gene product in the cytsol and/or in an organelle such as a plastid or mitochondria, preferably in plastids.

[1574] In addition to naturally-occurring variants of the sequences of the polypeptide or nucleic acid molecule of the invention as well as of the polypeptide or nucleic acid molecule used in the process of the invention that may exist in the population, the skilled artisan will further appreciate that changes can be introduced by mutation into a nucleotide sequence of the nucleic acid molecule encoding the polypeptide of the invention or used in the process of the present invention, thereby leading to changes in the amino acid sequence of the encoded said polypeptide, without altering the functional ability of the polypeptide, preferably not decreasing said activity.

[1575] For example, nucleotide substitutions leading to amino acid substitutions at “non-essential” amino acid residues can be made in a sequence of the nucleic acid molecule of the invention or used in the process of the invention, e.g. shown in table I, columns 5 and 7.

[1576] A “non-essential” amino acid residue is a residue that can be altered from the wild-type sequence of one without altering the activity of said polypeptide, whereas an “essential” amino acid residue is required for an activity as mentioned above, e.g. leading to an increase in the tolerance and/or resistance to environmental stress and biomass production as compared to a corresponding non-transformed wild type plant cell, plant or part thereof in an organism after an increase of activity of the polypeptide. Other amino acid residues, however, (e.g., those that are not conserved or only semi-conserved in the domain having said activity) may not be essential for activity and thus are likely to be amenable to alteration without altering said activity.

[1577] Further, a person skilled in the art knows that the codon usage between organisms can differ. Therefore, he may adapt the codon usage in the nucleic acid molecule of the present invention to the usage of the organism or the cell compartment for example of the plastid or mitochondria in which the polynucleotide or polypeptide is expressed.

[1578] Accordingly, the invention relates to nucleic acid molecules encoding a polypeptide having above-mentioned activity, in an organisms or parts thereof by for example expression either in the cytsol or in an organelle such as a plastid or mitochondria or both, preferably in plastids that contain changes in amino acid residues that are not essential for said activity. Such polypeptides differ in amino acid sequence from a sequence contained in the sequences shown in table II, columns 5 and 7 yet retain said activity described herein. The nucleic acid molecule can comprise a nucleotide sequence encoding a polypeptide, wherein the polypeptide comprises an amino acid sequence at least about 50% identical to an amino acid sequence shown in table II, columns 5 and 7 and is capable of participation in the increase of tolerance and/or resistance to environmental stress and increased biomass production as compared to a corresponding non-transformed wild type plant cell, plant or part thereof after increasing its activity, e.g. its expression by for example expression either in the cytsol or in an organelle such as a plastid or mitochondria or both, preferably in plastids. Preferably, the protein encoded by the nucleic acid molecule is at least about 60% identical to the sequence shown in table II, columns 5 and 7, more preferably at least about 70% identical to one of the sequences shown in table II, columns 5 and 7, even more preferably at least about 80%, 90%, 95% homologous to the sequence shown in table II, columns 5 and 7, and most preferably at least about 96%, 97%, 98%, or 99% identical to the sequence shown in table II, columns 5 and 7.

[1579] To determine the percentage homology (=identity, herein used interchangeably) of two amino acid sequences or of two nucleic acid molecules, the sequences are written one underneath the other for an optimal comparison (for example gaps may be inserted into the sequence of a protein or of a nucleic acid in order to generate an optimal alignment with the other protein or the other nucleic acid).

[1580] The amino acid residues or nucleic acid molecules at the corresponding amino acid positions or nucleotide positions are then compared. If a position in one sequence is occupied by the same amino acid residue or the same nucleic acid molecule as the corresponding position in the other sequence, the molecules are homologous at this position (i.e. amino acid or nucleic acid “homology” as used in the present context corresponds to amino acid or nucleic acid “identity”. The percentage homology between the two sequences is a function of the number of identical positions shared by the sequences (i.e. % homology=number of identical positions/total number of positions×100). The terms “homology” and “identity” are thus to be considered as synonyms.

[1581] For the determination of the percentage homology (=identity) of two or more amino acids or of two or more nucleotide sequences several computer software programs have been developed. The homology of two or more sequences can be calculated with for example the software fasta, which presently has been used in the version fasta 3 (W. R. Pearson and D. J. Lipman (1988), Improved Tools for Biological Sequence Comparison. PNAS 85:2444-2448; W. R. Pearson (1990) Rapid and Sensitive Sequence Comparison with FASTP and FASTA, Methods in Enzymology 183:63-98; W. R. Pearson and D. J. Lipman (1988) Improved Tools for Biological Sequence Comparison. PNAS 85:2444-2448; W. R. Pearson (1990); Rapid and Sensitive Sequence Comparison with FASTP and FASTAMethods in Enzymology 183:63-98). Another useful program for the calculation of homologies of different sequences is the standard blast program, which is included in the Biomax pedant software (Biomax, Munich, Federal Republic of Germany). This leads unfortunately sometimes to suboptimal results since blast does not always include complete sequences of the subject and the query. Nevertheless as this program is very efficient it can be used for the comparison of a huge number of sequences. The following settings are typically used for such a comparisons of sequences:

[1582] -p Program Name [String]; -d Database [String]; default=nr; -i Query File [File In]; default=stdin; -e Expectation value (E) [Real]; default=10.0; -m alignment view options: 0=pairwise; 1=query-anchored showing identities; 2=query-anchored no identities; 3=flat query-anchored, show identities; 4=flat query-anchored, no identities; 5=query-anchored no identities and blunt ends; 6=flat query-anchored, no identities and blunt ends; 7=XML Blast output; 8=tabular; 9 tabular with comment lines [Integer]; default=0; -o BLAST report Output File [File Out] Optional; default=stdout; -F Filter query sequence (DUST with blastn, SEG with others) [String]; default=T; -G Cost to open a gap (zero invokes default behavior) [Integer]; default=0; -E Cost to extend a gap (zero invokes default behavior) [Integer]; default=0; -X X dropoff value for gapped alignment (in bits) (zero invokes default behavior); blastn 30, megablast 20, tblastx 0, all others 15 [Integer]; default=0; -I Show GI's in deflines [T/F]; default=F; -q Penalty for a nucleotide mismatch (blastn only) [Integer]; default=−3; -r Reward for a nucleotide match (blastn only) [Integer]; default=1; -v Number of database sequences to show one-line descriptions for (V) [Integer]; default=500; -b Number of database sequence to show alignments for (B) [Integer]; default=250; -f Threshold for extending hits, default if zero; blastp 11, blastn 0, blastx 12, tblastn 13; tblastx 13, megablast 0 [Integer]; default=0; -g Perfom gapped alignment (not available with tblastx) [T/F]; default=T; -Q Query Genetic code to use [Integer]; default=1; -D DB Genetic code (for tblast[nx] only) [Integer]; default=1; -a Number of processors to use [Integer]; default=1; -O SeqAlign file [File Out] Optional; -J Believe the query defline [T/F]; default=F; -M Matrix [String]; default=BLOSUM62; -W Word size, default if zero (blastn 11, megablast 28, all others 3) [Integer]; default=0; -z Effective length of the database (use zero for the real size) [Real]; default=0; -K Number of best hits from a region to keep (off by default, if used a value of 100 is recommended) [Integer]; default=0; -P 0 for multiple hit, 1 for single hit [Integer]; default=0; -Y Effective length of the search space (use zero for the real size) [Real]; default=0; -S Query strands to search against database (for blast[nx], and tblastx); 3 is both, 1 is top, 2 is bottom [Integer]; default=3; -T Produce HTML output [T/F]; default=F; -I Restrict search of database to list of GI's [String] Optional; -U Use lower case filtering of FASTA sequence [T/F] Optional; default=F; -y X dropoff value for ungapped extensions in bits (0.0 invokes default behavior); blastn 20, megablast 10, all others 7 [Real]; default=0.0; -Z X dropoff value for final gapped alignment in bits (0.0 invokes default behavior); blastn/megablast 50, tblastx 0, all others 25 [Integer]; default=0; -R PSI-TBLASTN checkpoint file [File In] Optional; -n MegaBlast search [T/F]; default=F; -L Location on query sequence [String] Optional; -A Multiple Hits window size, default if zero (blastn/megablast 0, all others 40 [Integer]; default=0; -w Frame shift penalty (OOF algorithm for blastx) [Integer]; default=0; -t Length of the largest intron allowed in tblastn for linking HSPs (0 disables linking) [Integer]; default=0.

[1583] Results of high quality are reached by using the algorithm of Needleman and Wunsch or Smith and Waterman. Therefore programs based on said algorithms are preferred. Advantageously the comparisons of sequences can be done with the program PileUp (J. Mol. Evolution., 25, 351 (1987), Higgins et al., CABIOS 5, 151 (1989)) or preferably with the programs “Gap” and “Needle”, which are both based on the algorithms of Needleman and Wunsch (J. Mol. Biol. 48; 443 (1970)), and “BestFit”, which is based on the algorithm of Smith and Waterman (Adv. Appl. Math. 2; 482 (1981)). “Gap” and “BestFit” are part of the GCG software-package (Genetics Computer Group, 575 Science Drive, Madison, Wis., USA 53711 (1991); Altschul et al., (Nucleic Acids Res. 25, 3389 (1997)), “Needle” is part of the The European Molecular Biology Open Software Suite (EMBOSS) (Trends in Genetics 16 (6), 276 (2000)). Therefore preferably the calculations to determine the percentages of sequence homology are done with the programs “Gap” or “Needle” over the whole range of the sequences. The following standard adjustments for the comparison of nucleic acid sequences were used for “Needle”: matrix: EDNAFULL, Gap_penalty: 10.0, Extend_penalty: 0.5. The following standard adjustments for the comparison of nucleic acid sequences were used for “Gap”: gap weight: 50, length weight: 3, average match: 10.000, average mismatch: 0.000.

[1584] For example a sequence, which has 80% homology with sequence SEQ ID NO: 38 at the nucleic acid level is understood as meaning a sequence which, upon comparison with the sequence SEQ ID NO: 38 by the above program “Needle” with the above parameter set, has a 80% identity.

[1585] Homology between two polypeptides is understood as meaning the identity of the amino acid sequence over in each case the entire sequence length which is calculated by comparison with the aid of the above program “Needle” using Matrix: EBLOSUM62, Gap_penalty: 8.0, Extend_penalty: 2.0.

[1586] For example a sequence which has a 80% homology with sequence SEQ ID NO: 39 at the protein level is understood as meaning a sequence which, upon comparison with the sequence SEQ ID NO: 39 by the above program “Needle” with the above parameter set, has a 80% identity.

[1587] Functional equivalents derived from one of the polypeptides as shown in table II, columns 5 and 7 according to the invention by substitution, insertion or deletion have at least 30%, 35%, 40%, 45% or 50%, preferably at least 55%, 60%, 65% or 70% by preference at least 80%, especially preferably at least 85% or 90%, 91%, 92%, 93% or 94%, very especially preferably at least 95%, 97%, 98% or 99% homology with one of the polypeptides as shown in table II, columns 5 and 7 according to the invention and are distinguished by essentially the same properties as the polypeptide as shown in table II, columns 5 and 7.

[1588] Functional equivalents derived from the nucleic acid sequence as shown in table I, columns 5 and 7 according to the invention by substitution, insertion or deletion have at least 30%, 35%, 40%, 45% or 50%, preferably at least 55%, 60%, 65% or 70% by preference at least 80%, especially preferably at least 85% or 90%, 91%, 92%, 93% or 94%, very especially preferably at least 95%, 97%, 98% or 99% homology with one of the polypeptides as shown in table II, columns 5 and 7 according to the invention and encode polypeptides having essentially the same properties as the polypeptide as shown in table II, columns 5 and 7.

[1589] “Essentially the same properties” of a functional equivalent is above all understood as meaning that the functional equivalen has above mentioned acitivty, by for example expression either in the cytsol or in an organelle such as a plastid or mitochondria or both, preferably in plastids while increasing the amount of protein, activity or function of said functional equivalent in an organism, e.g. a microorgansim, a plant or plant or animal tissue, plant or animal cells or a part of the same.

[1590] A nucleic acid molecule encoding an homologous to a protein sequence of table II, columns 5 and 7 can be created by introducing one or more nucleotide substitutions, additions or deletions into a nucleotide sequence of the nucleic acid molecule of the present invention, in particular of table I, columns 5 and 7 such that one or more amino acid substitutions, additions or deletions are introduced into the encoded protein. Mutations can be introduced into the encoding sequences of table I, columns 5 and 7 by standard techniques, such as site-directed mutagenesis and PCR-mediated mutagenesis.

[1591] Preferably, conservative amino acid substitutions are made at one or more predicted non-essential amino acid residues. A “conservative amino acid substitution” is one in which the amino acid residue is replaced with an amino acid residue having a similar side chain. Families of amino acid residues having similar side chains have been defined in the art. These families include amino acids with basic side chains (e.g., lysine, arginine, histidine), acidic side chains (e.g., aspartic acid, glutamic acid), uncharged polar side chains (e.g., glycine, asparagine, glutamine, serine, threonine, tyrosine, cysteine), nonpolar side chains (e.g., alanine, valine, leucine, isoleucine, proline, phenylalanine, methionine, tryptophane), beta-branched side chains (e.g., threonine, valine, isoleucine) and aromatic side chains (e.g., tyrosine, phenylalanine, tryptophane, histidine).

[1592] Thus, a predicted nonessential amino acid residue in a polypeptide of the invention or a polypeptide used in the process of the invention is preferably replaced with another amino acid residue from the same family. Alternatively, in another embodiment, mutations can be introduced randomly along all or part of a coding sequence of a nucleic acid molecule of the invention or used in the process of the invention, such as by saturation mutagenesis, and the resultant mutants can be screened for activity described herein to identify mutants that retain or even have increased above mentioned activity, e.g. conferring an increased tolerance and/or resistance to environmental stress and increased biomass production as compared to a corresponding non-transformed wild type plant cell, plant or part thereof.

[1593] Following mutagenesis of one of the sequences of shown herein, the encoded protein can be expressed recombinantly and the activity of the protein can be determined using, for example, assays described herein (see Examples).

[1594] The highest homology of the nucleic acid molecule used in the process according to the invention was found for the following database entries by Gap search.

[1595] Homologues of the nucleic acid sequences used, with the sequence shown in table I, columns 5 and 7, comprise also allelic variants with at least approximately 30%, 35%, 40% or 45% homology, by preference at least approximately 50%, 60% or 70%, more preferably at least approximately 90%, 91%, 92%, 93%, 94% or 95% and even more preferably at least approximately 96%, 97%, 98%, 99% or more homology with one of the nucleotide sequences shown or the abovementioned derived nucleic acid sequences or their homologues, derivatives or analogues or parts of these. Allelic variants encompass in particular functional variants which can be obtained by deletion, insertion or substitution of nucleotides from the sequences shown, preferably from table I, columns 5 and 7, or from the derived nucleic acid sequences, the intention being, however, that the enzyme activity or the biological activity of the resulting proteins synthesized is advantageously retained or increased.

[1596] In one embodiment of the present invention, the nucleic acid molecule of the invention or used in the process of the invention comprises the sequences shown in any of the table I, columns 5 and 7. It is preferred that the nucleic acid molecule comprises as little as possible other nucleotides not shown in any one of table I, columns 5 and 7. In one embodiment, the nucleic acid molecule comprises less than 500, 400, 300, 200, 100, 90, 80, 70, 60, 50 or 40 further nucleotides. In a further embodiment, the nucleic acid molecule comprises less than 30, 20 or 10 further nucleotides. In one embodiment, the nucleic acid molecule use in the process of the invention is identical to the sequences shown in table I, columns 5 and 7.

[1597] Also preferred is that the nucleic acid molecule used in the process of the invention encodes a polypeptide comprising the sequence shown in table II, columns 5 and 7. In one embodiment, the nucleic acid molecule encodes less than 150, 130, 100, 80, 60, 50, 40 or 30 further amino acids. In a further embodiment, the encoded polypeptide comprises less than 20, 15, 10, 9, 8, 7, 6 or 5 further amino acids. In one embodiment used in the inventive process, the encoded polypeptide is identical to the sequences shown in table II, columns 5 and 7.

[1598] In one embodiment, the nucleic acid molecule of the invention or used in the process encodes a polypeptide comprising the sequence shown in table II, columns 5 and 7 comprises less than 100 further nucleotides. In a further embodiment, said nucleic acid molecule comprises less than 30 further nucleotides. In one embodiment, the nucleic acid molecule used in the process is identical to a coding sequence of the sequences shown in table I, columns 5 and 7.

[1599] Polypeptides (=proteins), which still have the essential biological or enzymatic activity of the polypeptide of the present invention conferring an increase tolerance and/or resistance to environmental stress and increased biomass production as compared to a corresponding non-transformed wild type plant cell, plant or part thereof i.e. whose activity is essentially not reduced, are polypeptides with at least 10% or 20%, by preference 30% or 40%, especially preferably 50% or 60%, very especially preferably 80% or 90 or more of the wild type biological activity or enzyme activity, advantageously, the activity is essentially not reduced in comparison with the activity of a polypeptide shown in table II, columns 5 and 7 expressed under identical conditions.

[1600] Homologues of table I, columns 5 and 7 or of the derived sequences of table II, columns 5 and 7 also mean truncated sequences, cDNA, single-stranded DNA or RNA of the coding and noncoding DNA sequence. Homologues of said sequences are also understood as meaning derivatives, which comprise noncoding regions such as, for example, UTRs, terminators, enhancers or promoter variants. The promoters upstream of the nucleotide sequences stated can be modified by one or more nucleotide substitution(s), insertion(s) and/or deletion(s) without, however, interfering with the functionality or activity either of the promoters, the open reading frame (=ORF) or with the 3′-regulatory region such as terminators or other 3′ regulatory regions, which are far away from the ORF. It is furthermore possible that the activity of the promoters is increased by modification of their sequence, or that they are replaced completely by more active promoters, even promoters from heterologous organisms. Appropriate promoters are known to the person skilled in the art and are mentioned herein below.

[1601] In addition to the nucleic acid molecules encoding the SRPs described above, another aspect of the invention pertains to negative regulators of the activity of a nucleic acid molecules selected from the group according to table I, column 5 and/or 7, preferably column 7. Antisense polynucleotides thereto are thought to inhibit the downregulating activity of those negative regulators by specifically binding the target polynucleotide and interfering with transcription, splicing, transport, translation, and/or stability of the target polynucleotide. Methods are described in the prior art for targeting the antisense polynucleotide to the chromosomal DNA, to a primary RNA transcript, or to a processed mRNA. Preferably, the target regions include splice sites, translation initiation codons, translation termination codons, and other sequences within the open reading frame.

[1602] The term “antisense,” for the purposes of the invention, refers to a nucleic acid comprising a polynucleotide that is sufficiently complementary to all or a portion of a gene, primary transcript, or processed mRNA, so as to interfere with expression of the endogenous gene. “Complementary” polynucleotides are those that are capable of base pairing according to the standard Watson-Crick complementarity rules. Specifically, purines will base pair with pyrimidines to form a combination of guanine paired with cytosine (G:C) and adenine paired with either thymine (A:T) in the case of DNA, or adenine paired with uracil (A:U) in the case of RNA. It is understood that two polynucleotides may hybridize to each other even if they are not completely complementary to each other, provided that each has at least one region that is substantially complementary to the other. The term “antisense nucleic acid” includes single stranded RNA as well as double-stranded DNA expression cassettes that can be transcribed to produce an antisense RNA. “Active” antisense nucleic acids are antisense RNA molecules that are capable of selectively hybridizing with a negative regulator of the activity of a nucleic acid molecules encoding a polypeptide having at least 80% sequence identity with the polypeptide selected from the group according to table II, column 5 and/or 7, preferably column 7.

[1603] The antisense nucleic acid can be complementary to an entire negative regulator strand, or to only a portion thereof. In an embodiment, the antisense nucleic acid molecule is antisense to a “noncoding region” of the coding strand of a nucleotide sequence encoding a SRP. The term “noncoding region” refers to 5′ and 3′ sequences that flank the coding region that are not translated into amino acids (i.e., also referred to as 5′ and 3′ untranslated regions). The antisense nucleic acid molecule can be complementary to only a portion of the noncoding region of SRP mRNA. For example, the antisense oligonucleotide can be complementary to the region surrounding the translation start site of SRP mRNA. An antisense oligonucleotide can be, for example, about 5, 10, 15, 20, 25, 30, 35, 40, 45 or 50 nucleotides in length. Typically, the antisense molecules of the present invention comprise an RNA having 60-100% sequence identity with at least 14 consecutive nucleotides of a noncoding region of one of the nucleic acid of table I. Preferably, the sequence identity will be at least 70%, more preferably at least 75%, 80%, 85%, 90%, 95%, 98% and most preferably 99%.

[1604] An antisense nucleic acid of the invention can be constructed using chemical synthesis and enzymatic ligation reactions using procedures known in the art. For example, an antisense nucleic acid (e.g., an antisense oligonucleotide) can be chemically synthesized using naturally occurring nucleotides or variously modified nucleotides designed to increase the biological stability of the molecules or to increase the physical stability of the duplex formed between the antisense and sense nucleic acids, e.g., phosphorothioate derivatives and acridine substituted nucleotides can be used. Examples of modified nucleotides which can be used to generate the antisense nucleic acid include 5-fluorouracil, 5-bromouracil, 5-chlorouracil, 5-iodouracil, hypoxanthine, xanthine, 4-acetylcytosine, 5-(carboxyhydroxylmethyl)uracil, 5-carboxymethylaminomethyl-2-thiouridine, 5-carboxymethylaminomethyluracil, dihydrouracil, beta-D-galactosylqueosine, inosine, N6-isopentenyladenine, 1-methylguanine, 1-methylinosine, 2,2-dimethylguanine, 2-methyladenine, 2-methylguanine, 3-methylcytosine, 5-methylcytosine, N6-adenine, 7-methylguanine, 5-methylaminomethyluracil, 5-methoxyaminomethyl-2-thiouracil, beta-D-mannosylqueosine, 5′-methoxycarboxymethyluracil, 5-methoxyuracil, 2-methylthio-N6-isopentenyladenine, uracil-5-oxyacetic acid (v), wybutoxosine, pseudouracil, queosine, 2-thiocytosine, 5-methyl-2-thiouracil, 2-thiouracil, 4-thiouracil, 5-methyluracil, uracil-5-oxyacetic acid methylester, uracil-5-oxyacetic acid (v), 5-methyl-2-thiouracil, 3-(3-amino-3-N-2-carboxypropyl)uracil, (acp3)w, and 2,6-diaminopurine. Alternatively, the antisense nucleic acid can be produced biologically using an expression vector into which a nucleic acid has been subcloned in an antisense orientation (i.e., RNA transcribed from the inserted nucleic acid will be of an antisense orientation to a target nucleic acid of interest, described further in the following subsection).

[1605] In yet another embodiment, the antisense nucleic acid molecule of the invention is an alpha-anomeric nucleic acid molecule. An alpha-anomeric nucleic acid molecule forms specific double-stranded hybrids with complementary RNA in which, contrary to the usual b-units, the strands run parallel to each other (Gaultier et al., 1987, Nucleic Acids. Res. 15:6625-6641). The antisense nucleic acid molecule can also comprise a 2′-o-methylribonucleotide (Inoue et al., 1987, Nucleic Acids Res. 15:6131-6148) or a chimeric RNA-DNA analogue (Inoue et al., 1987, FEBS Lett. 215:327-330).

[1606] The antisense nucleic acid molecules of the invention are typically administered to a cell or generated in situ such that they hybridize with or bind to cellular mRNA and/or genomic DNA. The hybridization can be by conventional nucleotide complementarity to form a stable duplex, or, for example, in the case of an antisense nucleic acid molecule which binds to DNA duplexes, through specific interactions in the major groove of the double helix. The antisense molecule can be modified such that it specifically binds to a receptor or an antigen expressed on a selected cell surface, e.g., by linking the antisense nucleic acid molecule to a peptide or an antibody which binds to a cell surface receptor or antigen. The antisense nucleic acid molecule can also be delivered to cells using the vectors described herein. To achieve sufficient intracellular concentrations of the antisense molecules, vector constructs in which the antisense nucleic acid molecule is placed under the control of a strong prokaryotic, viral, or eukaryotic (including plant) promoter are preferred.

[1607] As an alternative to antisense polynucleotides, ribozymes, sense polynucleotides, or double stranded RNA (dsRNA) can be used to reduce expression of a SRP polypeptide. By “ribozyme” is meant a catalytic RNA-based enzyme with ribonuclease activity which is capable of cleaving a single-stranded nucleic acid, such as an mRNA, to which it has a complementary region. Ribozymes (e.g., hammerhead ribozymes described in Haselhoff and Gerlach, 1988, Nature 334:585-591) can be used to catalytically cleave SRP mRNA transcripts to thereby inhibit translation of SRP mRNA. A ribozyme having specificity for a SRP-encoding nucleic acid can be designed based upon the nucleotide sequence of a SRP cDNA, as disclosed herein or on the basis of a heterologous sequence to be isolated according to methods taught in this invention. For example, a derivative of a Tetrahymena L-19 IVS RNA can be constructed in which the nucleotide sequence of the active site is complementary to the nucleotide sequence to be cleaved in a SRP-encoding mRNA. See, e.g., U.S. Pat. Nos. 4,987,071 and 5,116,742 to Cech et al. Alternatively, SRP mRNA can be used to select a catalytic RNA having a specific ribonuclease activity from a pool of RNA molecules. See, e.g., Bartel, D. and Szostak, J. W., 1993, Science 261:1411-1418. In preferred embodiments, the ribozyme will contain a portion having at least 7, 8, 9, 10, 12, 14, 16, 18 or 20 nucleotides, and more preferably 7 or 8 nucleotides, that have 100% complementarity to a portion of the target RNA. Methods for making ribozymes are known to those skilled in the art. See, e.g., U.S. Pat. Nos. 6,025,167; 5,773,260; and 5,496,698.

[1608] The term “dsRNA,” as used herein, refers to RNA hybrids comprising two strands of RNA. The dsRNAs can be linear or circular in structure. In a preferred embodiment, dsRNA is specific for a polynucleotide encoding either the polypeptide according to table II or a polypeptide having at least 70% sequence identity with a polypeptide according to table II. The hybridizing RNAs may be substantially or completely complementary. By “substantially complementary,” is meant that when the two hybridizing RNAs are optimally aligned using the BLAST program as described above, the hybridizing portions are at least 95% complementary. Preferably, the dsRNA will be at least 100 base pairs in length. Typically, the hybridizing RNAs will be of identical length with no over hanging 5′ or 3′ ends and no gaps. However, dsRNAs having 5′ or 3′ overhangs of up to 100 nucleotides may be used in the methods of the invention.

[1609] The dsRNA may comprise ribonucleotides or ribonucleotide analogs, such as 2′-O-methyl ribosyl residues, or combinations thereof. See, e.g., U.S. Pat. Nos. 4,130,641 and 4,024,222. A dsRNA polyriboinosinic acid:polyribocytidylic acid is described in U.S. Pat. No. 4,283,393. Methods for making and using dsRNA are known in the art. One method comprises the simultaneous transcription of two complementary DNA strands, either in vivo, or in a single in vitro reaction mixture. See, e.g., U.S. Pat. No. 5,795,715. In one embodiment, dsRNA can be introduced into a plant or plant cell directly by standard transformation procedures. Alternatively, dsRNA can be expressed in a plant cell by transcribing two complementary RNAs.

[1610] Other methods for the inhibition of endogenous gene expression, such as triple helix formation (Moser et al., 1987, Science 238:645-650 and Cooney et al., 1988, Science 241:456-459) and cosuppression (Napoli et al., 1990, The Plant Cell 2:279-289) are known in the art. Partial and full-length cDNAs have been used for the cosuppression of endogenous plant genes. See, e.g., U.S. Pat. Nos. 4,801,340, 5,034,323, 5,231,020, and 5,283,184; Van der Kroll et al., 1990, The Plant Cell 2:291-299; Smith et al., 1990, Mol. Gen. Genetics 224:477-481 and Napoli et al., 1990, The Plant Cell 2:279-289.

[1611] For sense suppression, it is believed that introduction of a sense polynucleotide blocks transcription of the corresponding target gene. The sense polynucleotide will have at least 65% sequence identity with the target plant gene or RNA. Preferably, the percent identity is at least 80%, 90%, 95% or more. The introduced sense polynucleotide need not be full length relative to the target gene or transcript. Preferably, the sense polynucleotide will have at least 65% sequence identity with at least 100 consecutive nucleotides of one of the nucleic acids as depicted in Table I. The regions of identity can comprise introns and and/or exons and untranslated regions. The introduced sense polynucleotide may be present in the plant cell transiently, or may be stably integrated into a plant chromosome or extrachromosomal replicon.

[1612] Further, object of the invention is an expression vector comprising a nucleic acid molecule comprising a nucleic acid molecule selected from the group consisting of:
[1613] a) a nucleic acid molecule encoding the polypeptide shown in column 5 or 7 of Table II;
[1614] b) a nucleic acid molecule shown in column 5 or 7 of Table I;
[1615] c) a nucleic acid molecule, which, as a result of the degeneracy of the genetic code, can be derived from a polypeptide sequence depicted in column 5 or 7 of Table II and confers an increased tolerance and/or resistance to environmental stress and increased biomass production as compared to a corresponding non-transformed wild type plant cell, a plant or a part thereof;
[1616] d) a nucleic acid molecule having at least 30% identity with the nucleic acid molecule sequence of a polynucleotide comprising the nucleic acid molecule shown in column 5 or 7 of Table I and confers an increased tolerance and/or resistance to environmental stress and increased biomass production as compared to a corresponding non-transformed wild type plant cell, a plant or a part thereof;
[1617] e) a nucleic acid molecule encoding a polypeptide having at least 30% identity with the amino acid sequence of the polypeptide encoded by the nucleic acid molecule of (a) to (c) and having the activity represented by a nucleic acid molecule comprising a polynucleotide as depicted in column 5 of Table I and confers an increased tolerance and/or resistance to environmental stress and increased biomass production as compared to a corresponding non-transformed wild type plant cell, a plant or a part thereof;
[1618] f) nucleic acid molecule which hybridizes with a nucleic acid molecule of (a) to (c) under stringent hybridization conditions and confers an increased tolerance and/or resistance to environmental stress and increased biomass production as compared to a corresponding non-transformed wild type plant cell, a plant or a part thereof;
[1619] g) a nucleic acid molecule encoding a polypeptide which can be isolated with the aid of monoclonal or polyclonal antibodies made against a polypeptide encoded by one of the nucleic acid molecules of (a) to (e) and having the activity represented by the nucleic acid molecule comprising a polynucleotide as depicted in column 5 of Table I;
[1620] h) a nucleic acid molecule encoding a polypeptide comprising the consensus sequence or one or more polypeptide motifs as shown in column 7 of Table IV and preferably having the activity represented by a nucleic acid molecule comprising a polynucleotide as depicted in column 5 of Table II or IV;
[1621] h) a nucleic acid molecule encoding a polypeptide having the activity represented by a protein as depicted in column 5 of Table II and confers an increased tolerance and/or resistance to environmental stress and increased biomass production as compared to a corresponding non-transformed wild type plant cell, a plant or a part thereof;
[1622] i) nucleic acid molecule which comprises a polynucleotide, which is obtained by amplifying a cDNA library or a genomic library using the primers in column 7 of Table III which do not start at their 5′-end with the nucleotides ATA and preferably having the activity represented by a nucleic acid molecule comprising a polynucleotide as depicted in column 5 of Table II or IV; and
[1623] j) a nucleic acid molecule which is obtainable by screening a suitable nucleic acid library under stringent hybridization conditions with a probe comprising a complementary sequence of a nucleic acid molecule of (a) or (b) or with a fragment thereof, having at least 15 nt, preferably 20 nt, 30 nt, 50 nt, 100 nt, 200 nt or 500 nt of a nucleic acid molecule complementary to a nucleic acid molecule sequence characterized in (a) to (e) and encoding a polypeptide having the activity represented by a protein comprising a polypeptide as depicted in column 5 of Table II;

[1624] The invention further provides an isolated recombinant expression vector comprising a stress related protein encoding nucleic acid as described above, wherein expression of the vector or stress related protein encoding nucleic acid, respectively in a host cell results in increased tolerance and/or resistance to environmental stress as compared to the corresponding non-transformed wild type of the host cell. As used herein, the term “vector” refers to a nucleic acid molecule capable of transporting another nucleic acid to which it has been linked. One type of vector is a “plasmid”, which refers to a circular double stranded DNA loop into which additional DNA segments can be ligated. Another type of vector is a viral vector, wherein additional DNA segments can be ligated into the viral genome. Further types of vectors can be linearized nucleic acid sequences, such as transposons, which are pieces of DNA which can copy and insert themselves. There have been 2 types of transposons found: simple transposons, known as Insertion Sequences and composite transposons, which can have several genes as well as the genes that are required for transposition.

[1625] Certain vectors are capable of autonomous replication in a host cell into which they are introduced (e.g., bacterial vectors having a bacterial origin of replication and episomal mammalian vectors). Other vectors (e.g., non-episomal mammalian vectors) are integrated into the genome of a host cell upon introduction into the host cell, and thereby are replicated along with the host genome. Moreover, certain vectors are capable of directing the expression of genes to which they are operatively linked. Such vectors are referred to herein as “expression vectors”. In general, expression vectors of utility in recombinant DNA techniques are often in the form of plasmids. In the present specification, “plasmid” and “vector” can be used interchangeably as the plasmid is the most commonly used form of vector. However, the invention is intended to include such other forms of expression vectors, such as viral vectors (e.g., replication defective retroviruses, adenoviruses and adeno-associated viruses), which serve equivalent functions.

[1626] A plant expression cassette preferably contains regulatory sequences capable of driving gene expression in plant cells and operably linked so that each sequence can fulfill its function, for example, termination of transcription by polyadenylation signals. Preferred polyadenylation signals are those originating from Agrobacterium tumefaciens T-DNA such as the gene 3 known as octopine synthase of the Ti-plasmid pTiACH5 (Gielen et al., 1984 EMBO J. 3:835) or functional equivalents thereof but also all other terminators functionally active in plants are suitable.

[1627] As plant gene expression is very often not limited on transcriptional levels, a plant expression cassette preferably contains other operably linked sequences like translational enhancers such as the overdrive-sequence containing the 5′-untranslated leader sequence from tobacco mosaic virus enhancing the protein per RNA ratio (Gallie et al., 1987 Nucl. Acids Research 15:8693-8711).

[1628] Plant gene expression has to be operably linked to an appropriate promoter conferring gene expression in a timely, cell or tissue specific manner. Preferred are promoters driving constitutive expression (Benfey et al., 1989 EMBO J. 8:2195-2202) like those derived from plant viruses like the 35S CaMV (Franck et al., 1980 Cell 21:285-294), the 19S CaMV (see also U.S. Pat. No. 5,352,605 and PCT Application No. WO 8402913) or plant promoters like those from Rubisco small subunit described in U.S. Pat. No. 4,962,028.

[1629] Additional advantageous regulatory sequences are, for example, included in the plant promoters such as CaMV/35S [Franck et al., Cell 21 (1980) 285-294], PRP1 [Ward et al., Plant. Mol. Biol. 22 (1993)], SSU, OCS, lib4, usp, STLS1, B33, LEB4, nos or in the ubiquitin, napin or phaseolin promoter. Also advantageous in this connection are inducible promoters such as the promoters described in EP-A-0 388 186 (benzyl sulfonamide inducible), Plant J. 2, 1992: 397-404 (Gatz et al., Tetracyclin inducible), EP-A-0 335 528 (abscisic acid inducible) or WO 93/21334 (ethanol or cyclohexenol inducible). Additional useful plant promoters are the cytosolic FBPase promotor or ST-LSI promoter of the potato (Stockhaus et al., EMBO J. 8, 1989, 2445), the phosphorybosyl phyrophoshate amido transferase promoter of Glycine max (gene bank accession No. U87999) or the noden specific promoter described in EP-A-0 249 676. Additional particularly advantageous promoters are seed specific promoters which can be used for monokotyledones or dikotyledones and are described in U.S. Pat. No. 5,608,152 (napin promoter from rapeseed), WO 98/45461 (phaseolin promoter from Arabidopsis), U.S. Pat. No. 5,504,200 (phaseolin promoter from Phaseolus vulgaris), WO 91/13980 (Bce4 promoter from Brassica) and Baeumlein et al., Plant J., 2, 2, 1992: 233-239 (LEB4 promoter from leguminosa). Said promoters are useful in dikotyledones. The following promoters are useful for example in monokotyledones Ipt-2- or Ipt-1-promoter from barley (WO 95/15389 and WO 95/23230) or hordein promoter from barley. Other useful promoters are described in WO 99/16890.

[1630] It is possible in principle to use all natural promoters with their regulatory sequences like those mentioned above for the novel process. It is also possible and advantageous in addition to use synthetic promoters.

[1631] The gene construct may also comprise further genes which are to be inserted into the organisms and which are for example involved in stress resistance and biomass production increase. It is possible and advantageous to insert and express in host organisms regulatory genes such as genes for inducers, repressors or enzymes which intervene by their enzymatic activity in the regulation, or one or more or all genes of a biosynthetic pathway. These genes can be heterologous or homologous in origin. The inserted genes may have their own promoter or else be under the control of same promoter as the sequences of the nucleic acid of table I or their homologs.

[1632] The gene construct advantageously comprises, for expression of the other genes present, additionally 3′ and/or 5′ terminal regulatory sequences to enhance expression, which are selected for optimal expression depending on the selected host organism and gene or genes.

[1633] These regulatory sequences are intended to make specific expression of the genes and protein expression possible as mentioned above. This may mean, depending on the host organism, for example that the gene is expressed or overexpressed only after induction, or that it is immediately expressed and/or overexpressed.

[1634] The regulatory sequences or factors may moreover preferably have a beneficial effect on expression of the introduced genes, and thus increase it. It is possible in this way for the regulatory elements to be enhanced advantageously at the transcription level by using strong transcription signals such as promoters and/or enhancers. However, in addition, it is also possible to enhance translation by, for example, improving the stability of the mRNA.

[1635] Other preferred sequences for use in plant gene expression cassettes are targeting-sequences necessary to direct the gene product in its appropriate cell compartment (for review see Kermode, 1996 Crit. Rev. Plant Sci. 15(4):285-423 and references cited therein) such as the vacuole, the nucleus, all types of plastids like amyloplasts, chloroplasts, chromoplasts, the extracellular space, mitochondria, the endoplasmic reticulum, oil bodies, peroxisomes and other compartments of plant cells.

[1636] Plant gene expression can also be facilitated via an inducible promoter (for review see Gatz, 1997 Annu. Rev. Plant Physiol. Plant Mol. Biol. 48:89-108). Chemically inducible promoters are especially suitable if gene expression is wanted to occur in a time specific manner.

[1637] Table VI lists several examples of promoters that may be used to regulate transcription of the stress related protein nucleic acid coding sequences.

TABLE VI
Examples of tissue-specific and stress inducible promoters in plants

| Expression | Reference |
|---|---|
| Cor78- Cold, drought, | Ishitani, et al., Plant Cell 9: 1935-1949 |
| salt, ABA, wounding- | (1997). Yamaguchi-Shinozaki and |
| inducible | Shinozaki, Plant Cell 6: 251-264 (1994). |
| Rci2A - Cold, | Capel et al., Plant Physiol 115: 569-576 |
| dehydration-inducible | (1997) |
| Rd22 - Drought, salt | Yamaguchi-Shinozaki and Shinozaki, Mol |
| | Gen Genet 238: 17-25 (1993). |
| Cor15A - Cold, | Baker et al., Plant Mol. Biol. 24: 701-713 |
| dehydration, ABA | (1994). |
| GH3- Auxin inducible | Liu et al., Plant Cell 6: 645-657 (1994) |
| ARSK1-Root, salt | Hwang and Goodman, Plant J 8: 37-43 |
| inducible | (1995). |
| PtxA - Root, salt | GenBank accession X67427 |
| inducible | |
| SbHRGP3 - Root specific | Ahn et al., Plant Cell 8: 1477-1490 (1998). |
| KST1 - Guard cell | Plesch et al., Plant Journal 28(4): 455-64 |
| specific | (2001). |
| KAT1 - Guard cell | Plesch et al., Gene 249: 83-89 (2000) |
| specific | Nakamura et al., Plant Physiol. 109: |
| | 371-374 (1995) |
| salicylic acid inducible | PCT Application No. WO 95/19443 |
| tetracycline inducible | Gatz et al. Plant J. 2: 397-404 (1992) |
| Ethanol inducible | PCT Application No. WO 93/21334 |
| pathogen inducible PRP1 | Ward et al., 1993 Plant. Mol. Biol. 22: |
| | 361-366 |
| heat inducible hsp80 | U.S. Pat. No. 5,187,267 |
| cold inducible alpha- | PCT Application No. WO 96/12814 |
| amylase | |
| Wound-inducible pinll | European Patent No. 375091 |
| RD29A - salt-inducible | Yamaguchi-Shinozalei et al. (1993) Mol. |
| | Gen. Genet. 236: 331-340 |
| plastid-specific viral | PCT Application No. WO 95/16783 and |
| RNA-polymerase | WO 97/06250 |

[1638] Other promotors, e.g. superpromotor (Ni et al,., Plant Journal 7, 1995: 661-676), Ubiquitin promotor (Callis et al., J. Biol. Chem., 1990, 265: 12486-12493; U.S. Pat. No. 5,510,474; U.S. Pat. No. 6,020,190; Kawalleck et al., Plant. Molecular Biology, 1993, 21: 673-684) or 34S promotor (GenBank Accession numbers M59930 and X16673) were similar useful for the present invention and are known to a person skilled in the art.

[1639] Developmental stage-preferred promoters are preferentially expressed at certain stages of development. Tissue and organ preferred promoters include those that are preferentially expressed in certain tissues or organs, such as leaves, roots, seeds, or xylem. Examples of tissue preferred and organ preferred promoters include, but are not limited to fruit-preferred, ovule-preferred, male tissue-preferred, seed-preferred, integument-preferred, tuber-preferred, stalk-preferred, pericarp-preferred, and leaf-preferred, stigma-preferred, pollen-preferred, anther-preferred, a petal-preferred, sepal-preferred, pedicel-preferred, silique-preferred, stem-preferred, root-preferred promoters, and the like. Seed preferred promoters are preferentially expressed during seed development and/or germination. For example, seed preferred promoters can be embryo-preferred, endosperm preferred, and seed coat-preferred. See Thompson et al., 1989, BioEssays 10:108. Examples of seed preferred promoters include, but are not limited to, cellulose synthase (celA), Cim1, gamma-zein, globulin-1, maize 19 kD zein (cZ19B1), and the like.

[1640] Other promoters useful in the expression cassettes of the invention include, but are not limited to, the major chlorophyll a/b binding protein promoter, histone promoters, the Ap3 promoter, the β-conglycin promoter, the napin promoter, the soybean lectin promoter, the maize 15 kD zein promoter, the 22 kD zein promoter, the 27 kD zein promoter, the g-zein promoter, the waxy, shrunken 1, shrunken 2 and bronze promoters, the Zm13 promoter (U.S. Pat. No. 5,086,169), the maize polygalacturonase promoters (PG) (U.S. Pat. Nos. 5,412,085 and 5,545,546), and the SGB6 promoter (U.S. Pat. No. 5,470,359), as well as synthetic or other natural promoters.

[1641] Additional flexibility in controlling heterologous gene expression in plants may be obtained by using DNA binding domains and response elements from heterologous sources (i.e., DNA binding domains from non-plant sources). An example of such a heterologous DNA binding domain is the LexA DNA binding domain (Brent and Ptashne, 1985, Cell 43:729-736).

[1642] The invention further provides a recombinant expression vector comprising a SRP DNA molecule of the invention cloned into the expression vector in an antisense orientation. That is, the DNA molecule is operatively linked to a regulatory sequence in a manner that allows for expression (by transcription of the DNA molecule) of an RNA molecule that is antisense to a SRP mRNA. Regulatory sequences operatively linked to a nucleic acid molecule cloned in the antisense orientation can be chosen which direct the continuous expression of the antisense RNA molecule in a variety of cell types. For instance, viral promoters and/or enhancers, or regulatory sequences can be chosen which direct constitutive, tissue specific, or cell type specific expression of antisense RNA. The antisense expression vector can be in the form of a recombinant plasmid, phagemid, or attenuated virus wherein antisense nucleic acids are produced under the control of a high efficiency regulatory region. The activity of the regulatory region can be determined by the cell type into which the vector is introduced. For a discussion of the regulation of gene expression using antisense genes, see Weintraub, H. et al., 1986, Antisense RNA as a molecular tool for genetic analysis, Reviews—Trends in Genetics, Vol. 1(1), and Mol et al., 1990, FEBS Letters 268:427-430.

[1643] Another aspect of the invention pertains to isolated SRPs, and biologically active portions thereof. An “isolated” or “purified” polypeptide or biologically active portion thereof is free of some of the cellular material when produced by recombinant DNA techniques, or chemical precursors or other chemicals when chemically synthesized. The language “substantially free of cellular material” includes preparations of SRP in which the polypeptide is separated from some of the cellular components of the cells in which it is naturally or recombinantly produced. In one embodiment, the language “substantially free of cellular material” includes preparations of a SRP having less than about 30% (by dry weight) of non-SRP material (also referred to herein as a “contaminating polypeptide”), more preferably less than about 20% of non-SRP material, still more preferably less than about 10% of non-SRP material, and most preferably less than about 5% non-SRP material.

[1644] When the SRP or biologically active portion thereof is recombinantly produced, it is also preferably substantially free of culture medium, i.e., culture medium represents less than about 20%, more preferably less than about 10%, and most preferably less than about 5% of the volume of the polypeptide preparation. The language “substantially free of chemical precursors or other chemicals” includes preparations of SRP in which the polypeptide is separated from chemical precursors or other chemicals that are involved in the synthesis of the polypeptide. In one embodiment, the language “substantially free of chemical precursors or other chemicals” includes preparations of a SRP having less than about 30% (by dry weight) of chemical precursors or non-SRP chemicals, more preferably less than about 20% chemical precursors or non-SRP chemicals, still more preferably less than about 10% chemical precursors or non-SRP chemicals, and most preferably less than about 5% chemical precursors or non-SRP chemicals. In preferred embodiments, isolated polypeptides, or biologically active portions thereof, lack contaminating polypeptides from the same organism from which the SRP is derived. Typically, such polypeptides are produced by recombinant expression of, for example, a Saccharomyces cerevisiae, E. coli or Brassica napus, Glycine max, Zea mays or Oryza sativa SRP in plants other than Saccharomyces cerevisiae, E. coli, or microorganisms such as C. glutamicum, ciliates, algae or fungi.

[1645] The nucleic acid molecules, polypeptides, polypeptide homologs, fusion polypeptides, primers, vectors, and host cells described herein can be used in one or more of the following methods: identification of Saccharomyces cerevisiae, E. coli or Brassica napus, Glycine max, Zea mays or Oryza sativa and related organisms; mapping of genomes of organisms related to Saccharomyces cerevisiae, E. coli; identification and localization of Saccharomyces cerevisiae, E. coli or Brassica napus, Glycine max, Zea mays or Oryza sativa sequences of interest; evolutionary studies; determination of SRP regions required for function; modulation of a SRP activity; modulation of the metabolism of one or more cell functions; modulation of the transmembrane transport of one or more compounds; modulation of stress resistance; and modulation of expression of SRP nucleic acids.

[1646] The SRP nucleic acid molecules of the invention are also useful for evolutionary and polypeptide structural studies. The metabolic and transport processes in which the molecules of the invention participate are utilized by a wide variety of prokaryotic and eukaryotic cells; by comparing the sequences of the nucleic acid molecules of the present invention to those encoding similar enzymes from other organisms, the evolutionary relatedness of the organisms can be assessed. Similarly, such a comparison permits an assessment of which regions of the sequence are conserved and which are not, which may aid in determining those regions of the polypeptide that are essential for the functioning of the enzyme. This type of determination is of value for polypeptide engineering studies and may give an indication of what the polypeptide can tolerate in terms of mutagenesis without losing function.

[1647] Manipulation of the SRP nucleic acid molecules of the invention may result in the production of SRPs having functional differences from the wild-type SRPs. These polypeptides may be improved in efficiency or activity, may be present in greater numbers in the cell than is usual, or may be decreased in efficiency or activity.

[1648] There are a number of mechanisms by which the alteration of a SRP of the invention may directly affect stress response and/or stress tolerance. In the case of plants expressing SRPs, increased transport can lead to improved salt and/or solute partitioning within the plant tissue and organs. By either increasing the number or the activity of transporter molecules which export ionic molecules from the cell, it may be possible to affect the salt and cold tolerance of the cell.

[1649] The effect of the genetic modification in plants, on stress tolerance can be assessed by growing the modified plant under less than suitable conditions and then analyzing the growth characteristics and/or metabolism of the plant. Such analysis techniques are well known to one skilled in the art, and include dry weight, wet weight, polypeptide synthesis, carbohydrate synthesis, lipid synthesis, evapotranspiration rates, general plant and/or crop yield, flowering, reproduction, seed setting, root growth, respiration rates, photosynthesis rates, etc. (Applications of HPLC in Biochemistry in: Laboratory Techniques in Biochemistry and Molecular Biology, vol. 17; Rehm et al., 1993 Biotechnology, vol. 3, Chapter III: Product recovery and purification, page 469-714, VCH: Weinheim; Belter, P. A. et al., 1988, Bioseparations: downstream processing for biotechnology, John Wiley and Sons; Kennedy, J. F. and Cabral, J. M. S., 1992, Recovery processes for biological materials, John Wiley and Sons; Shaeiwitz, J. A. and Henry, J. D., 1988, Biochemical separations, in: Ulmann's Encyclopedia of Industrial Chemistry, vol. B3, Chapter 11, page 1-27, VCH: Weinheim; and Dechow, F. J., 1989, Separation and purification techniques in biotechnology, Noyes Publications).

[1650] For example, yeast expression vectors comprising the nucleic acids disclosed herein, or fragments thereof, can be constructed and transformed into Saccharomyces cerevisiae using standard protocols. The resulting transgenic cells can then be assayed for fail or alteration of their tolerance to drought, salt, and cold stress. Similarly, plant expression vectors comprising the nucleic acids disclosed herein, or fragments thereof, can be constructed and transformed into an appropriate plant cell such as Arabidopsis, soy, rape, maize, cotton, rice, wheat, Medicago truncatula, etc., using standard protocols. The resulting transgenic cells and/or plants derived therefrom can then be assayed for fail or alteration of their tolerance to drought, salt, cold stress.

[1651] The engineering of one or more genes according to table I and coding for the SRP of table II of the invention may also result in SRPs having altered activities which indirectly impact the stress response and/or stress tolerance of algae, plants, ciliates, or fungi, or other microorganisms like C. glutamicum.

[1652] Additionally, the sequences disclosed herein, or fragments thereof, can be used to generate knockout mutations in the genomes of various organisms, such as bacteria, mammalian cells, yeast cells, and plant cells (Girke, T., 1998, The Plant Journal 15:39-48). The resultant knockout cells can then be evaluated for their ability or capacity to tolerate various stress conditions, their response to various stress conditions, and the effect on the phenotype and/or genotype of the mutation. For other methods of gene inactivation, see U.S. Pat. No. 6,004,804 “Non-Chimeric Mutational Vectors” and Puttaraju et al., 1999, Spliceosome-mediated RNA trans-splicing as a tool for gene therapy, Nature Biotechnology 17:246-252.

[1653] The aforementioned mutagenesis strategies for SRPs resulting in increased stress resistance are not meant to be limiting; variations on these strategies will be readily apparent to one skilled in the art. Using such strategies, and incorporating the mechanisms disclosed herein, the nucleic acid and polypeptide molecules of the invention may be utilized to generate algae, ciliates, plants, fungi, or other microorganisms like C. glutamicum expressing mutated SRP nucleic acid and polypeptide molecules such that the stress tolerance is improved.

[1654] The present invention also provides antibodies that specifically bind to a SRP, or a portion thereof, as encoded by a nucleic acid described herein. Antibodies can be made by many well-known methods (See, e.g. Harlow and Lane, “Antibodies; A Laboratory Manual,” Cold Spring Harbor Laboratory, Cold Spring Harbor, N.Y., (1988)). Briefly, purified antigen can be injected into an animal in an amount and in intervals sufficient to elicit an immune response. Antibodies can either be purified directly, or spleen cells can be obtained from the animal. The cells can then fused with an immortal cell line and screened for antibody secretion. The antibodies can be used to screen nucleic acid clone libraries for cells secreting the antigen. Those positive clones can then be sequenced. See, for example, Kelly et al., 1992, Bio/Technology 10:163-167; Bebbington et al., 1992, Bio/Technology 10:169-175.

[1655] The phrases “selectively binds” and “specifically binds” with the polypeptide refer to a binding reaction that is determinative of the presence of the polypeptide in a heterogeneous population of polypeptides and other biologics. Thus, under designated immunoassay conditions, the specified antibodies bound to a particular polypeptide do not bind in a significant amount to other polypeptides present in the sample. Selective binding of an antibody under such conditions may require an antibody that is selected for its specificity for a particular polypeptide. A variety of immunoassay formats may be used to select antibodies that selectively bind with a particular polypeptide. For example, solid-phase ELISA immunoassays are routinely used to select antibodies selectively immunoreactive with a polypeptide. See Harlow and Lane, “Antibodies, A Laboratory Manual,” Cold Spring Harbor Publications, New York, (1988), for a description of immunoassay formats and conditions that could be used to determine selective binding.

[1656] In some instances, it is desirable to prepare monoclonal antibodies from various hosts. A description of techniques for preparing such monoclonal antibodies may be found in Stites et al., eds., “Basic and Clinical Immunology,” (Lange Medical Publications, Los Altos, Calif., Fourth Edition) and references cited therein, and in Harlow and Lane, “Antibodies, A Laboratory Manual,” Cold Spring Harbor Publications, New York, (1988).

[1657] Gene expression in plants is regulated by the interaction of protein transcription factors with specific nucleotide sequences within the regulatory region of a gene. One example of transcription factors are polypeptides that contain zinc finger (ZF) motifs. Each ZF module is approximately 30 amino acids long folded around a zinc ion. The DNA recognition domain of a ZF protein is a α-helical structure that inserts into the major grove of the DNA double helix. The module contains three amino acids that bind to the DNA with each amino acid contacting a single base pair in the target DNA sequence. ZF motifs are arranged in a modular repeating fashion to form a set of fingers that recognize a contiguous DNA sequence. For example, a three-fingered ZF motif will recognize 9 bp of DNA. Hundreds of proteins have been shown to contain ZF motifs with between 2 and 37 ZF modules in each protein (Isalan M, et al., 1998 Biochemistry 37(35):12026-33; Moore M, et al., 2001 Proc. Natl. Acad. Sci. USA 98(4):1432-1436 and 1437-1441; US patents U.S. Pat. No. 6,007,988 and U.S. Pat. No. 6,013,453).

[1658] The regulatory region of a plant gene contains many short DNA sequences (cis-acting elements) that serve as recognition domains for transcription factors, including ZF proteins. Similar recognition domains in different genes allow the coordinate expression of several genes encoding enzymes in a metabolic pathway by common transcription factors. Variation in the recognition domains among members of a gene family facilitates differences in gene expression within the same gene family, for example, among tissues and stages of development and in response to environmental conditions.

[1659] Typical ZF proteins contain not only a DNA recognition domain but also a functional domain that enables the ZF protein to activate or repress transcription of a specific gene. Experimentally, an activation domain has been used to activate transcription of the target gene (U.S. Pat. No. 5,789,538 and patent application WO9519431), but it is also possible to link a transcription repressor domain to the ZF and thereby inhibit transcription (patent applications WO00/47754 and WO2001002019). It has been reported that an enzymatic function such as nucleic acid cleavage can be linked to the ZF (patent application WO00/20622)

[1660] The invention provides a method that allows one skilled in the art to isolate the regulatory region of one or more stress related protein encoding genes from the genome of a plant cell and to design zinc finger transcription factors linked to a functional domain that will interact with the regulatory region of the gene. The interaction of the zinc finger protein with the plant gene can be designed in such a manner as to alter expression of the gene and preferably thereby to confer increased tolerance of abiotic stress and increased biomass production.

[1661] In particular, the invention provides a method of producing a transgenic plant with a stress related protein coding nucleic acid, wherein expression of the nucleic acid(s) in the plant results in increased tolerance to environmental stress as compared to a wild type plant comprising: (a) transforming a plant cell with an expression vector comprising a stress related protein encoding nucleic acid, and (b) generating from the plant cell a transgenic plant with an increased tolerance to environmental stress as compared to a wild type plant. For such plant transformation, binary vectors such as pBinAR can be used (Höfgen and Willmitzer, 1990 Plant Science 66:221-230). Moreover suitable binary vectors are for example pBIN19, pBI101, pGPTV or pPZP (Hajukiewicz, P. et al., 1994, Plant Mol. Biol., 25: 989-994).

[1662] Construction of the binary vectors can be performed by ligation of the cDNA into the T-DNA. 5′ to the cDNA a plant promoter activates transcription of the cDNA. A polyadenylation sequence is located 3′ to the cDNA. Tissue-specific expression can be achieved by using a tissue specific promoter as listed above. Also, any other promoter element can be used. For constitutive expression within the whole plant, the CaMV 35S promoter can be used. The expressed protein can be targeted to a cellular compartment using a signal peptide, for example for plastids, mitochondria or endoplasmic reticulum (Kermode, 1996 Crit. Rev. Plant Sci. 4(15):285-423). The signal peptide is cloned 5′ in frame to the cDNA to archive subcellular localization of the fusion protein. Additionally, promoters that are responsive to abiotic stresses can be used with, such as the Arabidopsis promoter RD29A. One skilled in the art will recognize that the promoter used should be operatively linked to the nucleic acid such that the promoter causes transcription of the nucleic acid which results in the synthesis of a mRNA which encodes a polypeptide.

[1663] Alternate methods of transfection include the direct transfer of DNA into developing flowers via electroporation or Agrobacterium mediated gene transfer. Agrobacterium mediated plant transformation can be performed using for example the GV3101 (pMP90) (Koncz and Schell, 1986 Mol. Gen. Genet. 204:383-396) or LBA4404 (Ooms et al., Plasmid, 1982, 7: 15-29; Hoekema et al., Nature, 1983, 303: 179-180) Agrobacterium tumefaciens strain. Transformation can be performed by standard transformation and regeneration techniques (Deblaere et al., 1994 Nucl. Acids. Res. 13:4777-4788; Gelvin and Schilperoort, Plant Molecular Biology Manual, 2nd Ed.—Dordrecht: Kluwer Academic Publ., 1995.—in Sect., Ringbuc Zentrale Signatur: BT11-P ISBN 0-7923-2731-4; Glick, B R and Thompson, J E, Methods in Plant Molecular Biology and Biotechnology, Boca Raton: CRC Press, 1993.—360 S., ISBN 0-8493-5164-2). For example, rapeseed can be transformed via cotyledon or hypocotyl transformation (Moloney et al., 1989 Plant Cell Reports 8:238-242; De Block et al., 1989 Plant Physiol. 91:694-701). Use of antibiotics for Agrobacterium and plant selection depends on the binary vector and the Agrobacterium strain used for transformation. Rapeseed selection is normally performed using kanamycin as selectable plant marker. Agrobacterium mediated gene transfer to flax can be performed using, for example, a technique described by Mlynarova et al., 1994 Plant Cell Report 13:282-285. Additionally, transformation of soybean can be performed using for example a technique described in European Patent No. 0424 047, U.S. Pat. No. 5,322,783, European Patent No. 0397 687, U.S. Pat. No. 5,376,543 or U.S. Pat. No. 5,169,770. Transformation of maize can be achieved by particle bombardment, polyethylene glycol mediated DNA uptake or via the silicon carbide fiber technique (see, for example, Freeling and Walbot “The maize handbook” Springer Verlag: New York (1993) ISBN 3-540-97826-7). A specific example of maize transformation is found in U.S. Pat. No. 5,990,387 and a specific example of wheat transformation can be found in PCT Application No. WO 93/07256.

[1664] Growing the modified plants under stress conditions and then screening and analyzing the growth characteristics and/or metabolic activity assess the effect of the genetic modification in plants on stress tolerance and/or resistance and/or increased biomass production. Such analysis techniques are well known to one skilled in the art. They include next to screening (Römpp Lexikon Biotechnologie, Stuttgart/New York: Georg Thieme Verlag 1992, “screening” p. 701) dry weight, wet weight, protein synthesis, carbohydrate synthesis, lipid synthesis, evapotranspiration rates, general plant and/or crop yield, flowering, reproduction, seed setting, root growth, respiration rates, photosynthesis rates, etc. (Applications of HPLC in Biochemistry in: Laboratory Techniques in Biochemistry and Molecular Biology, vol. 17; Rehm et al., 1993 Biotechnology, vol. 3, Chapter III: Product recovery and purification, page 469-714, VCH: Weinheim; Belter, P. A. et al., 1988 Bioseparations: downstream processing for biotechnology, John Wiley and Sons; Kennedy, J. F. and Cabral, J. M. S., 1992 Recovery processes for biological materials, John Wiley and Sons; Shaeiwitz, J. A. and Henry, J. D., 1988 Biochemical separations, in: Ulmann's Encyclopedia of Industrial Chemistry, vol. B3, Chapter 11, page 1-27, VCH: Weinheim; and Dechow, F. J. (1989) Separation and purification techniques in biotechnology, Noyes Publications).

[1665] In one embodiment, the present invention relates to a method for the identification of a gene product conferring increased tolerance and/or resistance to environmental stress and increased biomass production as compared to a corresponding non-transformed wild type cell in a cell of an organism for example plant, comprising the following steps:

[1666] a) contacting, e.g. hybridising, some or all nucleic acid molecules of a sample, e.g. cells, tissues, plants or microorganisms or a nucleic acid library, which can contain a candidate gene encoding a gene product conferring increased tolerance and/or resistance to environmental stress and increased biomass, with a nucleic acid molecule as shown in column 5 or 7 of Table I A or B or a functional homologue thereof;

[1667] b) identifying the nucleic acid molecules, which hybridize under relaxed stringent conditions with said nucleic acid molecule, in particular to the nucleic acid molecule sequence shown in column 5 or 7 of Table I and, optionally, isolating the full length cDNA clone or complete genomic clone;

[1668] c) identifying the candidate nucleic acid molecules or a fragment thereof in host cells, preferably in a plant cell

[1669] d) increasing the expressing of the identified nucleic acid molecules in the host cells for which increased tolerance and/or resistance to environmental stress and increased biomass production as desired

[1670] e) assaying the level of tolerance and/or resistance to environmental stress and increased biomass production of the host cells; and

[1671] f) identifying the nucleic acid molecule and its gene product which increased expression confers increased tolerance and/or resistance to environmental stress and increased biomass production in the host cell compared to the wild type.

[1672] Relaxed hybridization conditions are: After standard hybridization procedures washing steps can be performed at low to medium stringency conditions usually with washing conditions of 40°-55° C. and salt conditions between 2×SSC and 0.2×SSC with 0.1% SDS in comparison to stringent washing conditions as e.g. 60° to 68° C. with 0.1% SDS. Further examples can be found in the references listed above for the stringent hybridization conditions. Usually washing steps are repeated with increasing stringency and length until a useful signal to noise ratio is detected and depend on many factors as the target, e.g. its purity, GC-content, size etc, the probe, e.g. its length, is it a RNA or a DNA probe, salt conditions, washing or hybridization temperature, washing or hybridization time etc.

[1673] In another embodiment, the present invention relates to a method for the identification of a gene product the expression of which confers an increased tolerance and/or resistance to environmental stress and increased biomass production in a cell, comprising the following steps:

[1674] a) identifiying a nucleic acid molecule in an organism, which is at least 20%, preferably 25%, more preferably 30%, even more preferred are 35%. 40% or 50%, even more preferred are 60%, 70% or 80%, most preferred are 90% or 95% or more homolog to the nucleic acid molecule encoding a protein comprising the polypeptide molecule as shown in column 5 or 7 of Table II or comprising a consensus sequence or a polypeptide motif as shown in column 7 of Table IV or being encoded by a nucleic acid molecule comprising a polynucleotide as shown in column 5 or 7 of Table I or a homologue thereof as described herein, for example via homology search in a data bank;

[1675] b) enhancing the expression of the identified nucleic acid molecules in the host cells;

[1676] c) assaying the level of tolerance and/or resistance to environmental stress and increased biomass production in the host cells; and

[1677] d) identifying the host cell, in which the enhanced expression confers increased tolerance and/or resistance to environmental stress and increased biomass production in the host cell compared to a wild type.

[1678] Further, the nucleic acid molecule disclosed herein, in particular the nucleic acid molecule shown column 5 or 7 of Table I A or B, may be sufficiently homologous to the sequences of related species such that these nucleic acid molecules may serve as markers for the construction of a genomic map in related organism or for association mapping. Furthermore natural variation in the genomic regions corresponding to nucleic acids disclosed herein, in particular the nucleic acid molecule shown column 5 or 7 of Table I A or B, or homologous thereof may lead to variation in the activity of the proteins disclosed herein, in particular the proteins comprising polypeptides as shown in column 5 or 7 of Table II A or B or comprising the consensus sequence or the polypeptide motif as shown in column 7 of Table IV, and their homologous and in consequence in natural variation in tolerance and/or resistance to environmental stress and biomass production.

[1679] In consequence natural variation eventually also exists in form of more active allelic variants leading already to a relative increase in the tolerance and/or resistance to environmental stress and biomass production. Different variants of the nucleic acids molecule disclosed herein, in particular the nucleic acid comprising the nucleic acid molecule as shown column 5 or 7 of Table I A or B, which corresponds to different tolerance and/or environmental stress resistance and biomass production levels can be identified and used for marker assisted breeding for increase tolerance and/or resistance to environmental stress and increased biomass production.

[1680] Accordingly, the present invention relates to a method for breeding plants for increased tolerance and/or resistance to environmental stress and increased biomass production, comprising

[1681] a) selecting a first plant variety with increased tolerance and/or resistance to environmental stress and increased biomass production based on increased expression of a nucleic acid of the invention as disclosed herein, in particular of a nucleic acid molecule comprising a nucleic acid molecule as shown in column 5 or 7 of Table I A or B or a polypeptide comprising a polypeptide as shown in column 5 or 7 of Table II A or B or comprising a consensus sequence or a polypeptide motif as shown in column 7 of Table IV, or a homologue thereof as described herein;

[1682] b) associating the level of tolerance and/or resistance to environmental stress and biomass production with the expression level or the genomic structure of a gene encoding said polypeptide or said nucleic acid molecule;

[1683] c) crossing the first plant variety with a second plant variety, which significantly differs in its level of tolerance and/or resistance to environmental stress and biomass production and

[1684] e) identifying, which of the offspring varieties has got increased levels level of tolerance and/or resistance to environmental stress and biomass production by the expression level of said polypeptide or nucleic acid molecule or the genomic structure of the genes encoding said polypeptide or nucleic acid molecule of the invention.

[1685] In one embodiment, the expression level of the gene according to step (b) is increased.

[1686] Yet another embodiment of the invention relates to a process for the identification of a compound conferring increased tolerance and/or resistance to environmental stress and increased biomass production as compared to a corresponding non-transformed wild type plant cell, a plant or a part thereof in a plant cell, a plant or a part thereof, a plant or a part thereof, comprising the steps:

[1687] a) culturing a plant cell; a plant or a part thereof maintaining a plant expressing the polypeptide as shown in column 5 or 7 of Table II or being encoded by a nucleic acid molecule comprising a polynucleotide as shown in column 5 or 7 of Table I or a homologue thereof as described herein or a polynucleotide encoding said polypeptide and conferring an increased tolerance and/or resistance to environmental stress and increased biomass production as compared to a corresponding non-transformed wild type plant cell, a plant or a part thereof; a non-transformed wild type plant or a part thereof and providing a readout system capable of interacting with the polypeptide under suitable conditions which permit the interaction of the polypeptide with this readout system in the presence of a chemical compound or a sample comprising a plurality of chemical compounds and capable of providing a detectable signal in response to the binding of a chemical compound to said polypeptide under conditions which permit the expression of said readout system and of the protein as shown in column 5 or 7 of Table II or being encoded by a nucleic acid molecule comprising a polynucleotide as shown in column 5 or 7 of Table I or a homologue thereof as described herein; and

[1688] b) identifying if the chemical compound is an effective agonist by detecting the presence or absence or decrease or increase of a signal produced by said readout system.

[1689] Said compound may be chemically synthesized or microbiologically produced and/or comprised in, for example, samples, e.g., cell extracts from, e.g., plants, animals or microorganisms, e.g. pathogens. Furthermore, said compound(s) may be known in the art but hitherto not known to be capable of suppressing the polypeptide of the present invention. The reaction mixture may be a cell free extract or may comprise a cell or tissue culture. Suitable set ups for the process for identification of a compound of the invention are known to the person skilled in the art and are, for example, generally described in Alberts et al., Molecular Biology of the Cell, third edition (1994), in particular Chapter 17. The compounds may be, e.g., added to the reaction mixture, culture medium, injected into the cell or sprayed onto the plant.

[1690] If a sample containing a compound is identified in the process, then it is either possible to isolate the compound from the original sample identified as containing the compound capable of activating or increasing tolerance and/or resistance to environmental stress and increased biomass production as compared to a corresponding non-transformed wild type, or one can further subdivide the original sample, for example, if it consists of a plurality of different compounds, so as to reduce the number of different substances per sample and repeat the method with the subdivisions of the original sample. Depending on the complexity of the samples, the steps described above can be performed several times, preferably until the sample identified according to the said process only comprises a limited number of or only one substance(s). Preferably said sample comprises substances of similar chemical and/or physical properties, and most preferably said substances are identical. Preferably, the compound identified according to the described method above or its derivative is further formulated in a form suitable for the application in plant breeding or plant cell and tissue culture.

[1691] The compounds which can be tested and identified according to said process may be expression libraries, e.g., cDNA expression libraries, peptides, proteins, nucleic acids, antibodies, small organic compounds, hormones, peptidomimetics, PNAs or the like (Milner, Nature Medicine 1 (1995), 879-880; Hupp, Cell 83 (1995), 237-245; Gibbs, Cell 79 (1994), 193-198 and references cited supra). Said compounds can also be functional derivatives or analogues of known inhibitors or activators. Methods for the preparation of chemical derivatives and analogues are well known to those skilled in the art and are described in, for example, Beilstein, Handbook of Organic Chemistry, Springer edition New York Inc., 175 Fifth Avenue, New York, N.Y. 10010 U.S.A. and Organic Synthesis, Wiley, New York, USA. Furthermore, said derivatives and analogues can be tested for their effects according to methods known in the art. Furthermore, peptidomimetics and/or computer aided design of appropriate derivatives and analogues can be used, for example, according to the methods described above. The cell or tissue that may be employed in the process preferably is a host cell, plant cell or plant tissue of the invention described in the embodiments hereinbefore.

[1692] Thus, in a further embodiment the invention relates to a compound obtained or identified according to the method for identifying an agonist of the invention said compound being an antagonist of the polypeptide of the present invention.

[1693] Accordingly, in one embodiment, the present invention further relates to a compound identified by the method for identifying a compound of the present invention.

[1694] In one embodiment, the invention relates to an antibody specifically recognizing the compound or agonist of the present invention.

[1695] The invention also relates to a diagnostic composition comprising at least one of the aforementioned nucleic acid molecules, antisense nucleic acid molecule, RNAi, snRNA, dsRNA, siRNA, miRNA, ta-siRNA, cosuppression molecule, ribozyme, vectors, proteins, antibodies or compounds of the invention and optionally suitable means for detection.

[1696] The diagnostic composition of the present invention is suitable for the isolation of mRNA from a cell and contacting the mRNA so obtained with a probe comprising a nucleic acid probe as described above under hybridizing conditions, detecting the presence of mRNA hybridized to the probe, and thereby detecting the expression of the protein in the cell. Further methods of detecting the presence of a protein according to the present invention comprise immunotechniques well known in the art, for example enzyme linked immunoadsorbent assay. Furthermore, it is possible to use the nucleic acid molecules according to the invention as molecular markers or primers in plant breeding. Suitable means for detection are well known to a person skilled in the art, e.g. buffers and solutions for hybridization assays, e.g. the afore-mentioned solutions and buffers, further and means for Southern-, Western-, Northern- etc. -blots, as e.g. described in Sambrook et al. are known. In one embodiment diagnostic composition contain PCR primers designed to specifically detect the presense or the expression level of the nucleic acid molecule to be reduced in the process of the invention, e.g. of the nucleic acid molecule of the invention, or to descriminate between different variants or alleles of the nucleic acid molecule of the invention or which activity is to be reduced in the process of the invention.

[1697] In another embodiment, the present invention relates to a kit comprising the nucleic acid molecule, the vector, the host cell, the polypeptide, or the antisense, RNAi, snRNA, dsRNA, siRNA, miRNA, ta-siRNA, cosuppression molecule, or ribozyme molecule, or the viral nucleic acid molecule, the antibody, plant cell, the plant or plant tissue, the harvestable part, the propagation material and/or the compound and/or agonist identified according to the method of the invention.

[1698] The compounds of the kit of the present invention may be packaged in containers such as vials, optionally with/in buffers and/or solution. If appropriate, one or more of said components might be packaged in one and the same container. Additionally or alternatively, one or more of said components might be adsorbed to a solid support as, e.g. a nitrocellulose filter, a glass plate, a chip, or a nylon membrane or to the well of a micro titerplate. The kit can be used for any of the herein described methods and embodiments, e.g. for the production of the host cells, transgenic plants, pharmaceutical compositions, detection of homologous sequences, identification of antagonists or agonists, as food or feed or as a supplement thereof or as supplement for the treating of plants, etc.

[1699] Further, the kit can comprise instructions for the use of the kit for any of said embodiments.

[1700] In one embodiment said kit comprises further a nucleic acid molecule encoding one or more of the aforementioned protein, and/or an antibody, a vector, a host cell, an antisense nucleic acid, a plant cell or plant tissue or a plant. In another embodiment said kit comprises PCR primers to detect and discriminate the nucleic acid molecule to be reduced in the process of the invention, e.g. of the nucleic acid molecule of the invention.

[1701] In a further embodiment, the present invention relates to a method for the production of an agricultural composition providing the nucleic acid molecule for the use according to the process of the invention, the nucleic acid molecule of the invention, the vector of the invention, the antisense, RNAi, snRNA, dsRNA, siRNA, miRNA, ta-siRNA, cosuppression molecule, ribozyme, or antibody of the invention, the viral nucleic acid molecule of the invention, or the polypeptide of the invention or comprising the steps of the method according to the invention for the identification of said compound or agonist; and formulating the nucleic acid molecule, the vector or the polypeptide of the invention or the agonist, or compound identified according to the methods or processes of the present invention or with use of the subject matters of the present invention in a form applicable as plant agricultural composition.

[1702] In another embodiment, the present invention relates to a method for the production of the plant culture composition comprising the steps of the method of the present invention; and formulating the compound identified in a form acceptable as agri-cultural composition.

[1703] Under “acceptable as agricultural composition” is understood, that such a composition is in agreement with the laws regulating the content of fungicides, plant nutrients, herbizides, etc. Preferably such a composition is without any harm for the protected plants and the animals (humans included) fed therewith.

[1704] Throughout this application, various publications are referenced. The disclosures of all of these publications and those references cited within those publications in their entireties are hereby incorporated by reference into this application in order to more fully describe the state of the art to which this invention pertains.

[1705] It should also be understood that the foregoing relates to preferred embodiments of the present invention and that numerous changes and variations may be made therein without departing from the scope of the invention. The invention is further illustrated by the following examples, which are not to be construed in any way as limiting. On the contrary, it is to be clearly understood that various other embodiments, modifications and equivalents thereof, which, after reading the description herein, may suggest themselves to those skilled in the art without departing from the spirit of the present invention and/or the scope of the claims.

### EXAMPLE 1

[1706] Engineering Stress-Tolerant Arabidopsis Plants by Over-Expressing Stress Related Protein Genes.

[1707] Cloning of the Inventive Sequences as Shown in Table I, Column 5 and 7 for the Expression in Plants

[1708] * Sequences as shown in table I, column 5, marked with asterisk * reflect the respective sequence derived from public data bases information.

[1709] Unless otherwise specified, standard methods as described in Sambrook et al., Molecular Cloning: A laboratory manual, Cold Spring Harbor 1989, Cold Spring Harbor Laboratory Press are used.

[1710] The inventive sequences as shown in table I, column 5 and 7, were amplified by PCR as described in the protocol of the Pfu Ultra, Pfu Turbo or Herculase DNA polymerase (Stratagene).

[1711] The composition for the protocol of the Pfu Ultra, Pfu Turbo or Herculase DNA polymerase was as follows: 1×PCR buffer (Stratagene), 0.2 mM of each dNTP, 100 ng genomic DNA of Saccharomyces cerevisiae (strain S288C; Research Genetics, Inc., now Invitrogen), Escherichia coli (strain MG1655; E. coli Genetic Stock Center), or Synechocystis sp., 50 pmol forward primer, 50 pmol reverse primer, 2.5 u Pfu Ultra, Pfu Turbo or Herculase DNA polymerase.

[1712] The amplification cycles were as follows:

[1713] 1 cycle of 2-3 minutes at 94-95° C., followed by 25-36 cycles of in each case 30-60 seconds at 94-95° C., 30-45 seconds at 50-60° C. and 210-480 seconds at 72° C., followed by 1 cycle of 5-10 minutes at 72° C., then 4° C.

[1714] The following adapter sequences were added to Saccharomyces cerevisiae ORF specific primers (see table III) for cloning purposes:

SEQ ID NO: 7

i) foward primer: 5′-GGAATTCCAGCTGACCACC-3′

SEQ ID NO: 8

ii) reverse primer: 5′-GATCCCCGGGAATTGCCATG-3′

[1715] These adaptor sequences allow cloning of the ORF into the various vectors containing the Resgen adaptors, see table VII.

[1716] The following adapter sequences were added to Escherichia coli or Synechocystis sp. ORF specific primers for cloning purposes:

SEQ ID NO: 9

iii) forward primer: 5′-TTGCTCTTCC- 3′

SEQ ID NO: 10

iiii) reverse primer: 5′-TTGCTCTTCG-3′

[1717] The adaptor sequences allow cloning of the ORF into the various vectors containing the Colic adaptors, see table VII.

[1718] Therefore for amplification and cloning of Saccharomyces cerevisiae SEQ ID NO: 6823, a primer consisting of the adaptor sequence i) and the ORF specific sequence SEQ ID NO: 6863 and a second primer consisting of the adaptor sequence ii) and the ORF specific sequence SEQ ID NO: 6864 were used.

[1719] For amplification and cloning of Escherichia coli SEQ ID NO: 38, a primer consisting of the adaptor sequence iii) and the ORF specific sequence SEQ ID NO: 48 and a second primer consisting of the adaptor sequence iiii) and the ORF specific sequence SEQ ID NO: 49 were used.

[1720] For amplification and cloning of Synechocystis sp. SEQ ID NO: 6542, a primer consisting of the adaptor sequence iii) and the ORF specific sequence SEQ ID NO: 6812 and a second primer consisting of the adaptor sequence iiii) and the ORF specific sequence SEQ ID NO: 6813 were used.

[1721] Following these examples every sequence disclosed in table I, preferably column 5, can be cloned by fusing the adaptor sequences to the respective specific primers sequences as disclosed in table III, column 7.

TABLE VII
Overview of the different vectors used for cloning the ORFs and shows their
SEQIDs (column A), their vector names (column B), the promotors they contain for
expression of the ORFs (column C), the additional artificial targeting sequence (column
D), the adapter sequence (column E), the expression type conferred by the promoter
mentioned in column B (column F) and the figure number (column G).

| | | C | D | E | | |
|---|---|---|---|---|---|---|
| A | B | Promoter | Target | Adapter | F | G |
| SeqID | Vector Name | Name | Sequence | Sequence | Expression Type | FIG. |
| 1 | VC-MME220-1 | Super | | Colic | non targeted constitutive expression | 1a |
| | | | | | in preferentially green tissues | |
| 2 | VC-MME221-1 | PcUbi | | Colic | non targeted constitutive expression | 2a |
| | | | | | in preferentially green tissues | |
| 3 | VC-MME354-1 | Super | FNR | Resgen | plastidic targeted constitutive expression | 3a |
| | | | | | in preferentially green | |
| | | | | | tissues | |
| 5 | VC-MME432-1 | Super | FNR | Colic | plastidic targeted constitutive expression | 4a |
| | | | | | in preferentially green | |
| | | | | | tissues | |
| 15 | VC-MME489-1p | Super | | Resgen | non targeted constitutive expression | 5a |
| | | | | | in preferentially green tissues | |
| 16 | pMTX0270p | Super | | Colic | non targeted constitutive expression | 6 |
| | | | | | in preferentially green tissues | |
| 8431 | VC-MME354- | Super | FNR | Resgen | plastidic targeted constitutive expression | 3b |
| | 1QCZ | | | | in preferentially green | |
| | | | | | tissues | |
| 8433 | VC-MME220- | Super | | Colic | non targeted constitutive expression | 1b |
| | 1qcz | | | | in preferentially green tissues | |
| 8434 | VC-MME432- | Super | FNR | Colic | plastidic targeted constitutive expression | 4b |
| | 1qcz | | | | in preferentially green | |
| | | | | | tissues | |
| 8436 | VC-MME221- | PcUbi | | Colic | non targeted constitutive expression | 2b |
| | 1qcz | | | | in preferentially green tissues | |
| 8437 | VC-MME489- | Super | | Resgen | non targeted constitutive expression | 5b |
| | 1QCZ | | | | in preferentially green tissues | |

[1722] Construction of Binary Vectors for Non-Targeted Expression of Proteins.

[1723] “Non-targeted” expression in this context means, that no additional targeting sequence were added to the ORF to be expressed.

[1724] For non-targeted expression in preferentially green tissues the following binary vectors used for cloning were VC-MME220-1 SEQ ID NO: 1 (FIG. 1a) or VC-MME220-1qcz SEQ ID NO: 8433 (FIG. 1b), VC-MME221-1 SEQ ID NO: 2 (FIG. 2a) or VC-MME221-1qcz SEQ ID NO: 8436 (FIG. 2b), VC-MME489-1p SEQ ID NO: 15 (FIG. 5a) or VC-MME489-1QCZ SEQ ID NO: 8437 (FIG. 5b). In case of VC-MME489-1p and VC-MME489-1QCZ the super promoter (Ni et al., Plant Journal 7, 661 (1995) sequence can be replaced by the sequence of the enhanced 35S promotor (Comai et al., Plant Mol Biol 15, 373-383 (1990) leading to similar results as shown in the table 1 below.

[1725] Amplification of the Targeting Sequence of the Gene FNR from Spinacia Oleracea and Construction of Vector for Plastid-Targeted Expression in Preferential Green Tissues.

[1726] In order to amplify the targeting sequence of the FNR gene from S. oleracea, genomic DNA was extracted from leaves of 4 weeks old S. oleracea plants (DNeasy Plant Mini Kit, Qiagen, Hilden). The gDNA was used as the template for a PCR.

[1727] To enable cloning of the transit sequence into the vector VC-MME0489-1p and VC-MME489-1QCZ an EcoRI restriction enzyme recognition sequence was added to both the forward and reverse primers, whereas for cloning in the vectors pMTX0270p, VC-MME220-1, VC-MME220-1qcz, VC-MME221-1 and VC-MME221-1qcz a PmeI restriction enzyme recognition sequence was added to the forward primer and a NcoI site was added to the reverse primer.

| | |
|---|---|
| FNR5EcoResgen | ATA GAA TTC GCA TAA ACT TAT CTT CAT |
| | AGT TGC C SEQ ID NO: 11 |
| FNR3EcoResgen | ATA GAA TTC AGA GGC GAT CTG GGC CCT |
| | SEQ ID NO: 12 |
| FNR5PmeColic | ATA GTT TAA ACG CAT AAA CTT ATC TTC |
| | ATA GTT GCC SEQ ID NO: 13 |
| FNR3NcoColic | ATA CCA TGG AAG AGC AAG AGG CGA TCT |
| | GGG CCC T SEQ ID NO: 14 |

[1728] The resulting sequence SEQ ID NO: 36, amplified from genomic spinach DNA, comprised a 5′ TR (bp 1-165), and the coding region (bp 166-273 and 351-419). The coding sequence is interrupted by an intronic sequence from bp 274 to bp 350.

SEQ ID NO: 36

gcataaacttatcttcatagttgccactccaatttgctccttgaatctcc
tccacccaataca-taatccactcctccatcacccacttcactactaaat
caaact-taactctgtttttctctctcctcctttcatttcttattcttcc
aatcatcgtactccgccat-gaccaccgctgtcaccgccgctgtttcttt
cccctctaccaaaaccacctctctctccgccc-gaagctcctccgtcatt
tcccctgacaaaatcagctacaaaaaggtgattcccaattt-cactgtgt
tttttattaataatttgttattttgatgatgagatgattaatttgggtgc
tg-caggttcctttgtactacaggaatgtatctgcaactgggaaaatggg
acccatcagggcccagatcgcctct

[1729] The PCR fragment derived with the primers FNR5EcoResgen and FNR3EcoResgen was digested with EcoRI and ligated in the vector VC-MME0489-1p or VC-MME489-1QCZ that had also been digested with EcoRI. The correct orientation of the FNR targeting sequence was tested by sequencing. The vector generated in this ligation step was VC-MME354-1 SEQ ID NO: 3 or VC-MME354-1QCZ SEQ ID NO: 8431.

[1730] The PCR fragment derived with the primers FNR5PmeColic and FNR3NcoColic was digested with PmeI and NcoI and ligated in the vector pMTX0270p (FIG. 6) SEQ ID NO: 16, VC-MME220-1 or VC-MME220-1qcz that had been digested with SmaI and NcoI. The vector generated in this ligation step was VC-MME432-1 SEQ ID NO: 5 (FIG. 4a) or VC-MME432-1qcz SEQ ID NO: 8434 (FIG. 4b).

[1731] For plastidic-targeted constitutive expression in preferentially green tissues an artificial promoter A(ocs)3AmasPmas promoter (Super promotor)) (Ni et al,. Plant Journal 7, 661 (1995), WO 95/14098) was used in context of the vector VC-MME354-1 or VC-MME354-1QCZ for ORFs from Saccharomyces cerevisiae and in context of the vector VC-MME432-1 or VC-MME432-1qcz for ORFs from Escherichia coli, resulting in each case in an “in-frame” fusion of the FNR targeting sequence with the ORFs.

[1732] Other useful binary vectors are known to the skilled worker; an overview of binary vectors and their use can be found in Hellens R., Mullineaux P. and Klee H., (Trends in Plant Science, 5 (10), 446 (2000)). Such vectors have to be equally equipped with appropriate promoters and targeting sequences.

[1733] Cloning of inventive sequences as shown in table I, column 5 and 7 in the different expression vectors.

[1734] * Sequences as shown in table I, column 5, marked with asterisk * reflect the respective sequence derived from public data bases information.

[1735] For cloning the ORF of SEQ ID NO: 6823, from S. cerevisiae into vectors containing the Resgen adaptor sequence the respective vector DNA was treated with the restriction enzyme NcoI. For cloning of ORFs from E. coli or Synechocystis sp. the vector DNA was treated with the restriction enzymes PacI and NcoI following the standard protocol (MBI Fermentas). In all cases the reaction was stopped by inactivation at 70° C. for 20 minutes and purified over QIAquick or NucleoSpin Extract II columns following the standard protocol (Qiagen or Macherey-Nagel).

[1736] Then the PCR-product representing the amplified ORF with the respective adapter sequences and the vector DNA were treated with T4 DNA polymerase according to the standard protocol (MBI Fermentas) to produce single stranded overhangs with the parameters 1 unit T4 DNA polymerase at 37° C. for 2-10 minutes for the vector and 1-2 u T4 DNA polymerase at 15-17° C. for 10-60 minutes for the PCR product representing SEQ ID NO: 6823.

[1737] The reaction was stopped by addition of high-salt buffer and purified over QIAquick or NucleoSpin Extract II columns following the standard protocol (Qiagen or Macherey-Nagel).

[1738] According to this example the skilled person is able to clone all sequences disclosed in table I, preferably column 5.

[1739] Approximately 30-60 ng of prepared vector and a defined amount of prepared amplificate were mixed and hybridized at 65° C. for 15 minutes followed by 37° C. 0.1° C./1 seconds, followed by 37° C. 10 minutes, followed by 0.1° C./1 seconds, then 4-10° C.

[1740] The ligated constructs were transformed in the same reaction vessel by addition of competent E. coli cells (strain DH5alpha) and incubation for 20 minutes at 1° C. followed by a heat shock for 90 seconds at 42° C. and cooling to 1-4° C. Then, complete medium (SOC) was added and the mixture was incubated for 45 minutes at 37° C. The entire mixture was subsequently plated onto an agar plate with 0.05 mg/ml kanamycin and incubated overnight at 37° C.

[1741] The outcome of the cloning step was verified by amplification with the aid of primers which bind upstream and downstream of the integration site, thus allowing the amplification of the insertion. The amplifications were carried as described in the protocol of Taq DNA polymerase (Gibco-BRL).

[1742] The amplification cycles were as follows: 1 cycle of 1-5 minutes at 94° C., followed by 35 cycles of in each case 15-60 seconds at 94° C., 15-60 seconds at 50-66° C. and 5-15 minutes at 72° C., followed by 1 cycle of 10 minutes at 72° C., then 4-16° C.

[1743] Several colonies were checked, but only one colony for which a PCR product of the expected size was detected was used in the following steps.

[1744] A portion of this positive colony was transferred into a reaction vessel filled with complete medium (LB) supplemented with kanamycin and incubated overnight at 37° C.

[1745] The plasmid preparation was carried out as specified in the Qiaprep or NucleoSpin Multi-96 Plus standard protocol (Qiagen or Macherey-Nagel).

[1746] Generation of Transgenic Plants which Express SEQ ID NO: 6823 or any other Sequence Disclosed in Table I, Preferably Column 5

[1747] * Sequences as shown in table I, column 5, marked with asterisk * reflect the respective sequence derived from public data bases information.

[1748] 1-5 ng of the plasmid DNA isolated was transformed by electroporation or transformation into competent cells of Agrobacterium tumefaciens, of strain GV 3101 pMP90 (Koncz and Schell, Mol. Gen. Gent. 204, 383-396, 1986). Thereafter, complete medium (YEP) was added and the mixture was transferred into a fresh reaction vessel for 3 hours at 28° C. Thereafter, all of the reaction mixture was plated onto YEP agar plates supplemented with the respective antibiotics, e.g. rifampicine (0.1 mg/ml), gentamycine (0.025 mg/ml and kanamycin (0.05 mg/ml) and incubated for 48 hours at 28° C.

[1749] The agrobacteria that contains the plasmid construct were then used for the transformation of plants.

[1750] A colony was picked from the agar plate with the aid of a pipette tip and taken up in 3 ml of liquid TB medium, which also contained suitable antibiotics as described above. The preculture was grown for 48 hours at 28° C. and 120 rpm.

[1751] 400 ml of LB medium containing the same antibiotics as above were used for the main culture. The preculture was transferred into the main culture. It was grown for 18 hours at 28° C. and 120 rpm. After centrifugation at 4 000 rpm, the pellet was resuspended in infiltration medium (MS medium, 10% sucrose).

[1752] In order to grow the plants for the transformation, dishes (Piki Saat 80, green, provided with a screen bottom, 30×20×4.5 cm, from Wiesauplast, Kunststoff-technik, Germany) were half-filled with a GS 90 substrate (standard soil, Werkverband E.V., Germany). The dishes were watered overnight with 0.05% Proplant solution (Chimac-Apriphar, Belgium). Arabidopsis thaliana C24 seeds (Nottingham Arabidopsis Stock Centre, UK; NASC Stock N906) were scattered over the dish, approximately 1 000 seeds per dish. The dishes were covered with a hood and placed in the stratification facility (8 h, 110 μmol/m²/s⁻¹, 22° C.; 16 h, dark, 6° C.). After 5 days, the dishes were placed into the short-day controlled environment chamber (8 h 130 μmol/m²/s⁻¹, 22° C.; 16 h, dark 20° C.), where they remained for approximately 10 days until the first true leaves had formed.

[1753] The seedlings were transferred into pots containing the same substrate (Teku pots, 7 cm, LC series, manufactured by Poppelmann GmbH & Co, Germany). Five plants were pricked out into each pot. The pots were then returned into the short-day controlled environment chamber for the plant to continue growing.

[1754] After 10 days, the plants were transferred into the greenhouse cabinet (supplementary illumination, 16 h, 340 μE, 22° C.; 8 h, dark, 20° C.), where they were allowed to grow for further 17 days.

[1755] For the transformation, 6-week-old Arabidopsis plants, which had just started flowering were immersed for 10 seconds into the above-described agrobacterial suspension which had previously been treated with 10 μl Silwett L77 (Crompton S. A., Osi Specialties, Switzerland). The method in question is described in Clough and Bent, 1998 (Clough, J C and Bent, A F. 1998 Floral dip: a simplified method for Agrobacterium-mediated transformation of Arabidopsis thaliana, Plant J. 16:735-743.

[1756] The plants were subsequently placed for 18 hours into a humid chamber. Thereafter, the pots were returned to the greenhouse for the plants to continue growing. The plants remained in the greenhouse for another 10 weeks until the seeds were ready for harvesting.

[1757] Depending on the resistance marker used for the selection of the transformed plants the harvested seeds were planted in the greenhouse and subjected to a spray selection or else first sterilized and then grown on agar plates supplemented with the respective selection agent. Since the vector contained the bar gene as the resistance marker, plantlets were sprayed four times at an interval of 2 to 3 days with 0.02% BASTA® and transformed plants were allowed to set seeds.

[1758] The seeds of the transgenic A. thaliana plants were stored in the freezer (at −20° C.).

[1759] Transgenic A. thaliana plants were grown individually in pots containing a 4:1 (v/v) mixture of soil and quartz sand in a York growth chamber. Standard growth conditions were: photoperiod of 16 h light and 8 h dark, 20° C., 60% relative humidity, and a photon flux density of 150 μE. To induce germination, sown seeds were kept at 4° C., in the dark, for 3 days. Subsequently conditions were changed for 3 d to 20° C./6° C. day/night temperature with a 16/8 h day-night cycle at 150 μE/m²s. Standard growth conditions were: photoperiod of 16 h light and 8 h dark, 20° C., 60% relative humidity, and a photon flux density of 200 μE. Plants were watered daily until they were approximately 3 weeks old at which time drought was imposed by withholding water. After approximately 12 days of withholding water, most plants showed visual symptoms of injury, such as wilting and leaf browning, whereas tolerant or resistant plants were identified as being visually turgid and healthy green in color. Plants were scored for symptoms of drought symptoms and biomass production comparison to wild type and neighboring plants for 5-6 days in succession.

[1760] Three successive experiments were conducted. In the first experiment, one individual of each transformed line was tested.

[1761] In the second experiment, the lines that had been scored as drought tolerant or resistant in the first experiment, i.e. survived longer than the wild type control and showed increased biomass production in comparison to wild type and neighbouring plants, were put through a confirmation screen according to the same experimental procedures. In this experiment, max. 10 plants of each tolerant or resistant line were grown, treated and scored as before.

[1762] In the first two experiments, drought resistance or tolerance and biomass production was measured compared to neighboring and wild type plants.

[1763] In the third experiment (table 1), 15 replicates of each confirmed tolerant line, i.e. those that had been scored as tolerant or resistant in the second experiment, were grown, treated and scored as before.

[1764] In the third experiment, after approximately 10 days of drought, the control (non-transformed Arabidopsis thaliana) in the test showed extreme visual symptoms of stress including necrosis and cell death. Several transformed plants retained viability as shown by their turgid appearance and maintenance of green color.

[1765] Table 1: Duration of survival and biomass production of transformed Arabidopsis thaliana after imposition of drought stress on 3-week-old plants. Drought tolerance and biomass production was measured visually at daily intervals. Average performance is the average of transgenic plants that survived longer than the wild type control. Maximum performance is the longest period that any single transformed plant survived longer than the wild type control. Average biomass is the average of days of transgenic plants plants increase in biomass in comparison to the wild type control and neighbouring plants. Maximum biomass is the longest period that any single transformed plant showed increase in biomass in comparison to the wild type control and neighbouring plants.

TABLE 1

| | | | Average | Maximum | Average | Maximum |
|---|---|---|---|---|---|---|
| SeqID | Target | Locus | Performance | Performance | Biomass | Biomass |
| 38 | non-targeted | B0081 | 3.4 | 6 | 1.1 | 3 |
| 54 | non-targeted | B0445 | 3 | 5 | 0.9 | 4 |
| 70 | non-targeted | B0482 | 2.8 | 5 | 0.6 | 3 |
| 89 | non-targeted | B0607 | 2.9 | 5 | 0.9 | 4 |
| 143* | non-targeted | B0629 | 2.8 | 5 | 0.8 | 4 |
| 162 | non-targeted | B0631 | 3.4 | 6 | 1.2 | 5 |
| 213 | non-targeted | B0697 | 2.1 | 3 | 1.8 | 3 |
| 358 | non-targeted | B0753 | 3.3 | 5 | 1.6 | 4 |
| 367 | non-targeted | B0813 | 3 | 5 | 1.5 | 3 |
| 420* | non-targeted | B0845 | 2.2 | 5 | 1 | 4 |
| 455 | non-targeted | B0866 | 3 | 5 | 0.8 | 5 |
| 535* | non-targeted | B0963 | 4.4 | 5 | 0.5 | 2 |
| 618 | non-targeted | B0975 | 2.6 | 4 | 1.2 | 4 |
| 671* | non-targeted | B1007 | 3.3 | 6 | 0.6 | 2 |
| 764 | non-targeted | B1052 | 3 | 5 | 0.4 | 2 |
| 768 | plastidic | B1091 | 3.4 | 5 | 0.3 | 3 |
| 907 | non-targeted | B1161 | 2.9 | 4 | 2 | 4 |
| 927 | non-targeted | B1186 | 4 | 6 | 0.8 | 4 |
| 1009 | plastidic | B1291 | 3.4 | 5 | 1.2 | 3 |
| 1154 | plastidic | B1294 | 2.3 | 5 | 1 | 4 |
| 1308 | non-targeted | B1423 | 3.1 | 6 | 0.1 | 1 |
| 1368* | non-targeted | B1597 | 3.7 | 5 | 0.1 | 1 |
| 1374 | non-targeted | B1605 | 2.8 | 5 | 0.9 | 3 |
| 1507 | non-targeted | B1704 | 4.2 | 5 | 0.6 | 2 |
| 1953 | plastidic | B1736 | 4.1 | 5 | 0.8 | 2 |
| 2156* | non-targeted | B1798 | 3.4 | 5 | 1 | 4 |
| 2195 | non-targeted | B1878 | 3.4 | 5 | 1.3 | 3 |
| 2219* | plastidic | B1901 | 2.8 | 4 | 1.8 | 3 |
| 2277 | plastidic | B1912 | 2.5 | 4 | 1.6 | 3 |
| 2470* | non-targeted | B2027 | 2.6 | 4 | 0.3 | 2 |
| 2493 | non-targeted | B2039 | 2.1 | 4 | 0.1 | 1 |
| 2627 | non-targeted | B2075 | 2.5 | 4 | 0.5 | 3 |
| 2858 | plastidic | B2153 | 2.5 | 4 | 1.5 | 4 |
| 2942 | non-targeted | B2194 | 3.4 | 6 | 0.7 | 3 |
| 2965* | non-targeted | B2226 | 2.9 | 4 | 1.6 | 4 |
| 2981 | plastidic | B2309 | 1.9 | 3 | 0.9 | 3 |
| 3130* | non-targeted | B2469 | 2.2 | 5 | 0.9 | 3 |
| 3216 | non-targeted | B2475 | 2.9 | 5 | 0.3 | 2 |
| 3335 | non-targeted | B2482 | 1.9 | 3 | 0.6 | 2 |
| 3401 | non-targeted | B2541 | 2.9 | 5 | 0.6 | 2 |
| 3590 | plastidic | B2559 | 1.6 | 3 | 1.4 | 3 |
| 3831 | non-targeted | B2605 | 1.6 | 4 | 0.7 | 2 |
| 3857 | non-targeted | B2630 | 1.8 | 3 | 0.6 | 2 |
| 3861 | plastidic | B2678 | 4.3 | 5 | 0.1 | 1 |
| 4022* | plastidic | B2715 | 4 | 5 | 0.4 | 2 |
| 4059 | non-targeted | B2776 | 2.9 | 5 | 0.4 | 2 |
| 4076 | non-targeted | B2791 | 3.2 | 6 | 0.7 | 3 |
| 4157 | non-targeted | B2912 | 3 | 5 | 1.7 | 3 |
| 4260* | plastidic | B2965 | 3.8 | 5 | 0.7 | 3 |
| 4350 | plastidic | B2987 | 2.9 | 4 | 1.3 | 4 |
| 4350 | non-targeted | B2987 | 2.7 | 4 | 0.1 | 0.1 |
| 4459 | plastidic | B3093 | 2.8 | 5 | 1 | 3 |
| 4505 | plastidic | B3363 | 3.7 | 4 | 0.1 | 0.1 |
| 4640 | plastidic | B3429 | 2.8 | 4 | 0.6 | 2 |
| 4806 | plastidic | B3568 | 2.7 | 4 | 0.8 | 3 |
| 5124 | plastidic | B3616 | 2.5 | 5 | 1.1 | 5 |
| 5124 | non-targeted | B3616 | 2.8 | 5 | 1.3 | 3 |
| 5417 | non-targeted | B3812 | 3 | 5 | 0.9 | 3 |
| 5495* | non-targeted | B3899 | 2.5 | 4 | 0.8 | 3 |
| 5585 | plastidic | B3929 | 2.3 | 4 | 0.7 | 3 |
| 5800 | non-targeted | B3938 | 2.3 | 3 | 1.1 | 3 |
| 5850 | non-targeted | B3974 | 2.9 | 5 | 1.4 | 2 |
| 5992 | non-targeted | B3989 | 2.8 | 5 | 0.7 | 2 |
| 5999 | non-targeted | B4029 | 3.2 | 5 | 0.5 | 3 |
| 6056* | plastidic | B4139 | 3.1 | 5 | 1.6 | 4 |
| 6500* | non-targeted | B4390 | 3.5 | 6 | 0.8 | 3 |
| 6542 | non-targeted | SII0290 | 2.5 | 4 | 0.9 | 3 |
| 6823 | non-targeted | YAL049C | 3.5 | 5 | 0.7 | 2 |
| 6870 | non-targeted | YCR059C | 3.5 | 5 | 1 | 3 |
| 6910 | plastidic | YDR035W | 2.7 | 4 | 1.3 | 3 |
| 7261 | non-targeted | YEL005C | 3.6 | 6 | 1.1 | 4 |
| 7265* | non-targeted | YER112W | 3.1 | 4 | 0.8 | 2 |
| 7301 | non-targeted | YER156C | 2.2 | 4 | 0.1 | 0.1 |
| 7384 | non-targeted | YER173W | 4.3 | 5 | 0.2 | 1 |
| 7407* | non-targeted | YGL045W | 3.3 | 4 | 1.2 | 4 |
| 7429 | non-targeted | YGL189C | 2.3 | 4 | 0.1 | 0.1 |
| 7558 | non-targeted | YNR015W | 4.5 | 7 | 0.1 | 0.1 |
| 7606 | non-targeted | YOR024W | 4.8 | 5 | 0.6 | 3 |
| 7610* | non-targeted | YOR168W | 3.1 | 5 | 0.6 | 2 |
| 7685 | non-targeted | YPL151C | 3.9 | 5 | 0.1 | 0.1 |
| 1201* | plastidic | B1297 | 2.1 | 3 | 1.1 | 2 |
| 7741 | non-targeted | B0970 | 3.2 | 5 | 0.2 | 2 |
| 7850 | non-targeted | B1829 | 2.4 | 6 | 1 | 3 |
| 7971* | non-targeted | B2664 | 3.9 | 5 | 0.4 | 2 |
| 8021 | non-targeted | B2796 | 2.9 | 5 | 0.7 | 4 |
| 8177 | non-targeted | YER174C | 4.5 | 5 | 0.1 | 0.1 |
| 8272 | non-targeted | YFR042W | 3.7 | 5 | 1 | 4 |
| 8288 | non-targeted | YKR057W | 3.3 | 5 | 1.9 | 4 |
| 8438 | non-targeted | B0629_2 | 2.8 | 5 | 0.8 | 4 |
| 8630 | non-targeted | B1007_2 | 3.3 | 6 | 0.6 | 2 |
| 9268 | plastidic | B2715_2 | 4 | 5 | 0.4 | 2 |
| 9444 | non-targeted | B3899_2 | 2.5 | 4 | 0.8 | 3 |
| 9824 | non-targeted | B4390_2 | 3.5 | 6 | 0.8 | 3 |
| 9905 | non-targeted | YGL045W_2 | 3.3 | 4 | 1.2 | 4 |
| 9193 | non-targeted | B2664_2 | 3.9 | 5 | 0.4 | 2 |
| 8497 | non-targeted | B0963_2 | 4.4 | 5 | 0.5 | 2 |
| 8742 | plastidic | B1297_2 | 2.1 | 3 | 1.1 | 2 |
| 8891 | non-targeted | B1597_2 | 3.7 | 5 | 0.1 | 1 |
| 9031 | non-targeted | B2027_2 | 2.6 | 4 | 0.3 | 2 |
| 9315 | plastidic | B2965_2 | 3.8 | 5 | 0.7 | 3 |
| 9529 | plastidic | B4139_2 | 3.1 | 5 | 1.6 | 4 |
| 8462 | non-targeted | B0845_2 | 2.2 | 5 | 1 | 4 |
| 8973 | plastidic | B1901_2 | 2.8 | 4 | 1.8 | 3 |
| 9883 | non-targeted | YER112W_2 | 3.1 | 4 | 0.8 | 2 |
| 8934 | non-targeted | B1798_2 | 3.4 | 5 | 1 | 4 |
| 9093 | non-targeted | B2226_2 | 2.9 | 4 | 1.6 | 4 |
| 9109 | non-targeted | B2469_2 | 2.2 | 5 | 0.9 | 3 |
| 9931 | non-targeted | YOR168W_2 | 3.1 | 5 | 0.6 | 2 |
| 10096 | non-targeted | B4321 | 2.5 | 4 | 0.8 | 3 |

[1766] Sequences as shown in table 1, column 1, marked with asterisk * reflect the respective sequence derived from public data bases information.

### EXAMPLE 2

[1767] Engineering Stress-Tolerant Arabidopsis Plants by Over-Expressing Stress Related Protein Encoding Genes from Saccharomyces cereviesae or E. coli or Synechocystis sp. Using Stress-Inducible and Tissue-Specific Promoters.

[1768] Transgenic Arabidopsis plants are created as in example 1 to express the stress related protein encoding transgenes under the control of either a tissue-specific or stress-inducible promoter.

[1769] T2 generation plants are produced and treated with drought stress in two experiments. The plants are deprived of water until the plant and soil were desiccated. Biomass production is determined at an equivalent degree of drought stress, tolerant plants produced more biomass than non-transgenic control plants.

### Example 3

[1770] Over-Expression of Stress Related Genes from Saccharomyces cerevisiae or E. coli or Synechocystis sp. Provides Tolerance of Multiple Abiotic Stresses

[1771] Plants that exhibit tolerance of one abiotic stress often exhibit tolerance of another environmental stress. This phenomenon of cross-tolerance is not understood at a mechanistic level (McKersie and Leshem, 1994). Nonetheless, it is reasonable to expect that plants exhibiting enhanced drought tolerance due to the expression of a transgene might also exhibit tolerance of cold or salt and other abiotic stresses. In support of this hypothesis, the expression of several genes are up or down-regulated by multiple abiotic stress factors including cold, salt, osmoticum, ABA, etc (e.g. Hong et al. (1992) Developmental and organ-specific expression of an ABA- and stress-induced protein in barley. Plant Mol Biol 18: 663-674; Jagendorf and Takabe (2001) Inducers of glycinebetaine synthesis in barley. Plant Physiol 127: 1827-1835); Mizoguchi et al. (1996) A gene encoding a mitogen-activated protein kinase is induced simultaneously with genes for a mitogen-activated protein kinase and an S6 ribosomal protein kinase by touch, cold, and water stress in Arabidopsis thaliana. Proc Natl Acad Sci USA 93: 765-769; Zhu (2001) Cell signaling under salt, water and cold stresses. Curr Opin Plant Biol 4: 401-406).

[1772] To determine salt tolerance, seeds of Arabidopsis thaliana are sterilized (100% bleach, 0.1% TritonX for five minutes two times and rinsed five times with ddH2O). Seeds were plated on non-selection media (1/2 MS, 0.6% phytagar, 0.5 g/L MES, 1% sucrose, 2 μg/ml benamyl). Seeds are allowed to germinate for approximately ten days. At the 4-5 leaf stage, transgenic plants were potted into 5.5 cm diameter pots and allowed to grow (22° C., continuous light) for approximately seven days, watering as needed. To begin the assay, two liters of 100 mM NaCl and 1/8 MS are added to the tray under the pots. To the tray containing the control plants, three liters of 1/8 MS are added. The concentrations of NaCl supplementation are increased stepwise by 50 mM every 4 days up to 200 mM. After the salt treatment with 200 mM, fresh and survival and biomass production of the plants is determined.

[1773] To determine cold tolerance, seeds of the transgenic and cold lines are germinated and grown for approximately 10 days to the 4-5 leaf stage as above. The plants are then transferred to cold temperatures (5° C.) and can be grown through the flowering and seed set stages of development. Photosynthesis can be measured using chlorophyll fluorescence as an indicator of photosynthetic fitness and integrity of the photosystems. Survival and plant biomass production as an indicator for seed yield is determined.

[1774] Plants that have tolerance to salinity or cold have higher survival rates and biomass production including seed yield and dry matter production than susceptible plants.

### EXAMPLE 4

[1775] Engineering Stress-Tolerant Alfalfa Plants by Over-Expressing Stress Related Genes from Saccharomyces cerevisiae or E. coli or Synechocystis sp.

[1776] A regenerating clone of alfalfa (Medicago sativa) is transformed using the method of (McKersie et al., 1999 Plant Physiol 119: 839-847). Regeneration and transformation of alfalfa is genotype dependent and therefore a regenerating plant is required. Methods to obtain regenerating plants have been described. For example, these can be selected from the cultivar Rangelander (Agriculture Canada) or any other commercial alfalfa variety as described by Brown D C W and A Atanassov (1985. Plant Cell Tissue Organ Culture 4: 111-112). Alternatively, the RA3 variety (University of Wisconsin) is selected for use in tissue culture (Walker et al., 1978 Am J Bot 65:654-659).

[1777] Petiole explants are cocultivated with an overnight culture of Agrobacterium tumefaciens C58C1 pMP90 (McKersie et al., 1999 Plant Physiol 119: 839-847) or LBA4404 containing a binary vector. Many different binary vector systems have been described for plant transformation (e.g. An, G. in Agrobacterium Protocols. Methods in Molecular Biology vol 44, pp 47-62, Gartland K M A and M R Davey eds. Humana Press, Totowa, N.J.). Many are based on the vector pBIN19 described by Bevan (Nucleic Acid Research. 1984. 12:8711-8721) that includes a plant gene expression cassette flanked by the left and right border sequences from the Ti plasmid of Agrobacterium tumefaciens. A plant gene expression cassette consists of at least two genes—a selection marker gene and a plant promoter regulating the transcription of the cDNA or genomic DNA of the trait gene. Various selection marker genes can be used including the Arabidopsis gene encoding a mutated acetohydroxy acid synthase (AHAS) enzyme (U.S. Pat. Nos. 57,673,666 and 6,225,105). Similarly, various promoters can be used to regulate the trait gene that provides constitutive, developmental, tissue or environmental regulation of gene transcription. In this example, the 34S promoter (GenBank Accession numbers M59930 and X16673) is used to provide constitutive expression of the trait gene.

[1778] The explants are cocultivated for 3 d in the dark on SH induction medium containing 288 mg/L Pro, 53 mg/L thioproline, 4.35 g/L K2SO4, and 100 μm acetosyringinone. The explants are washed in half-strength Murashige-Skoog medium (Murashige and Skoog, 1962) and plated on the same SH induction medium without acetosyringinone but with a suitable selection agent and suitable antibiotic to inhibit Agrobacterium growth. After several weeks, somatic embryos are transferred to BOi2Y development medium containing no growth regulators, no antibiotics, and 50 g/L sucrose. Somatic embryos are subsequently germinated on half-strength Murashige-Skoog medium. Rooted seedlings are transplanted into pots and grown in a greenhouse.

[1779] The T0 transgenic plants are propagated by node cuttings and rooted in Turface growth medium. The plants are defoliated and grown to a height of about 10 cm (approximately 2 weeks after defoliation). The plants are then subjected to drought stress in two experiments.

[1780] For the drought experiment, the seedlings receive no water for a period up to 3 weeks at which time the plant and soil are desiccated and survival and biomass production of the shoots is determined. At an equivalent degree of drought stress, tolerant plants are able to resume normal growth whereas susceptible plants die or suffer significant injury resulting in loss of biomass production.

[1781] Tolerance of salinity and cold are measured using methods as described in example 3. Plants that have tolerance to salinity or cold have higher survival rates and biomass production including seed yield, photosynthesis and dry matter production than susceptible plants.

### EXAMPLE 5

[1782] Engineering Stress-Tolerant Ryegrass Plants by Over-Expressing Stress Related Genes from Saccharomyces cerevisiae or E. coli or Synechocystis sp.

[1783] Seeds of several different ryegrass varieties may be used as explant sources for transformation, including the commercial variety Gunne available from Svalof Weibull seed company or the variety Affinity. Seeds are surface-sterilized sequentially with 1% Tween-20 for 1 minute, 100% bleach for 60 minutes, 3 rinses with 5 minutes each with de-ionized and distilled H2O, and then germinated for 3-4 days on moist, sterile filter paper in the dark. Seedlings are further sterilized for 1 minute with 1% Tween-20, 5 minutes with 75% bleach, and rinsed 3 times with ddH2O, 5 min each.

[1784] Surface-sterilized seeds are placed on the callus induction medium containing Murashige and Skoog basal salts and vitamins, 20 g/l sucrose, 150 mg/l asparagine, 500 mg/l casein hydrolysate, 3 g/l Phytagel, 10 mg/l BAP, and 5 mg/l dicamba. Plates are incubated in the dark at 25 C for 4 weeks for seed germination and embryogenic callus induction.

[1785] After 4 weeks on the callus induction medium, the shoots and roots of the seedlings are trimmed away, the callus is transferred to fresh media, maintained in culture for another 4 weeks, and then transferred to MSO medium in light for 2 weeks. Several pieces of callus (11-17 weeks old) are either strained through a 10 mesh sieve and put onto callus induction medium, or cultured in 100 ml of liquid ryegrass callus induction media (same medium as for callus induction with agar) in a 250 ml flask. The flask is wrapped in foil and shaken at 175 rpm in the dark at 23 C for 1 week. Sieving the liquid culture with a 40-mesh sieve collected the cells. The fraction collected on the sieve is plated and cultured on solid ryegrass callus induction medium for 1 week in the dark at 25° C. The callus is then transferred to and cultured on MS medium containing 1% sucrose for 2 weeks.

[1786] Transformation can be accomplished with either Agrobacterium of with particle bombardment methods. An expression vector is created containing a constitutive plant promoter and the cDNA of the gene in a pUC vector. The plasmid DNA is prepared from E. coli cells using with Qiagen kit according to manufacturer's instruction. Approximately 2 g of embryogenic callus is spread in the center of a sterile filter paper in a Petri dish. An aliquot of liquid MSO with 10 g/l sucrose is added to the filter paper. Gold particles (1.0 μm in size) are coated with plasmid DNA according to method of Sanford et al., 1993 and delivered to the embryogenic callus with the following parameters: 500 μg particles and 2 μg DNA per shot, 1300 psi and a target distance of 8.5 cm from stopping plate to plate of callus and 1 shot per plate of callus.

[1787] After the bombardment, calli are transferred back to the fresh callus development medium and maintained in the dark at room temperature for a 1-week period. The callus is then transferred to growth conditions in the light at 25° C. to initiate embryo differentiation with the appropriate selection agent, e.g. 250 nM Arsenal, 5 mg/l PPT or 50 mg/L kanamycin. Shoots resistant to the selection agent appeare and once rotted are transferred to soil.

[1788] Samples of the primary transgenic plants (T0) are analyzed by PCR to confirm the presence of T-DNA. These results are confirmed by Southern hybridization in which DNA is electrophoresed on a 1% agarose gel and transferred to a positively charged nylon membrane (Roche Diagnostics). The PCR DIG Probe Synthesis Kit (Roche Diagnostics) is used to prepare a digoxigenin-labelled probe by PCR, and used as recommended by the manufacturer.

[1789] Transgenic T0 ryegrass plants are propagated vegetatively by excising tillers. The transplanted tillers are maintained in the greenhouse for 2 months until well established. The shoots are defoliated and allowed to grow for 2 weeks.

[1790] For the drought experiment, the seedlings receive no water for a period up to 3 weeks at which time the plant and soil are desiccated and survival and biomass production of the shoots is determined. At an equivalent degree of drought stress, tolerant plants are able to resume normal growth whereas susceptible plants die or suffer significant injury resulting in loss of biomass production.

### EXAMPLE 6

[1791] Engineering Stress-Tolerant Soybean Plants by Over-Expressing Stress Related Genes from Saccharomyces cerevisiae or E. coli or Synechocystis sp.

[1792] Soybean is transformed according to the following modification of the method described in the Texas A&M patent U.S. Pat. No. 5,164,310. Several commercial soybean varieties are amenable to transformation by this method. The cultivar Jack (available from the Illinois Seed Foundation) is a commonly used for transformation. Seeds are sterilized by immersion in 70% (v/v) ethanol for 6 min and in 25% commercial bleach (NaOCl) supplemented with 0.1% (v/v) Tween for 20 min, followed by rinsing 4 times with sterile double distilled water. Seven-day seedlings are propagated by removing the radicle, hypocotyl and one cotyledon from each seedling. Then, the epicotyl with one cotyledon is transferred to fresh germination media in petri dishes and incubated at 25° C. under a 16-hr photoperiod (approx. 100 μE-m-2s-1) for three weeks. Axillary nodes (approx. 4 mm in length) were cut from 3-4 week-old plants. Axillary nodes are excised and incubated in Agrobacterium LBA4404 culture.

[1793] Many different binary vector systems have been described for plant transformation (e.g. An, G. in Agrobacterium Protocols. Methods in Molecular Biology vol 44, pp 47-62, Gartland K M A and M R Davey eds. Humana Press, Totowa, N.J.). Many are based on the vector pBIN19 described by Bevan (Nucleic Acid Research. 1984. 12:8711-8721) that includes a plant gene expression cassette flanked by the left and right border sequences from the Ti plasmid of Agrobacterium tumefaciens. A plant gene expression cassette consists of at least two genes—a selection marker gene and a plant promoter regulating the transcription of the cDNA or genomic DNA of the trait gene. Various selection marker genes can be used including the Arabidopsis gene encoding a mutated acetohydroxy acid synthase (AHAS) enzyme (U.S. Pat. Nos. 57,673,666 and 6,225,105). Similarly, various promoters can be used to regulate the trait gene to provide constitutive, developmental, tissue or environmental regulation of gene transcription. In this example, the 34S promoter (GenBank Accession numbers M59930 and X16673) can be used to provide constitutive expression of the trait gene.

[1794] After the co-cultivation treatment, the explants are washed and transferred to selection media supplemented with 500 mg/L timentin. Shoots are excised and placed on a shoot elongation medium. Shoots longer than 1 cm are placed on rooting medium for two to four weeks prior to transplanting to soil.

[1795] The primary transgenic plants (T0) are analyzed by PCR to confirm the presence of T-DNA. These results are confirmed by Southern hybridization in which DNA is electrophoresed on a 1% agarose gel and transferred to a positively charged nylon membrane (Roche Diagnostics). The PCR DIG Probe Synthesis Kit (Roche Diagnostics) is used to prepare a digoxigenin-labelled probe by PCR, and used as recommended by the manufacturer.

[1796] Tolerant plants have higher seed yields.

[1797] Tolerance of drought, salinity and cold are measured using methods as described in example 3. Tolerant plants have higher survival rates and biomass production including seed yield, photosynthesis and dry matter production than susceptible plants.

### EXAMPLE 7

[1798] Engineering Stress-Tolerant Rapeseed/Canola Plants by Over-Expressing Stress Related Genes from Saccharomyces cerevisiae or E. coli or Synechocystis sp.

[1799] Cotyledonary petioles and hypocotyls of 5-6 day-old young seedlings are used as explants for tissue culture and transformed according to Babic et al.(1998, Plant Cell Rep 17: 183-188). The commercial cultivar Westar (Agriculture Canada) is the standard variety used for transformation, but other varieties can be used.

[1800] Agrobacterium tumefaciens LBA4404 containing a binary vector can be used for canola transformation. Many different binary vector systems have been described for plant transformation (e.g. An, G. in Agrobacterium Protocols. Methods in Molecular Biology vol 44, pp 47-62, Gartland K M A and M R Davey eds. Humana Press, Totowa, N.J.). Many are based on the vector pBIN19 described by Bevan (Nucleic Acid Research. 1984. 12:8711-8721) that includes a plant gene expression cassette flanked by the left and right border sequences from the Ti plasmid of Agrobacterium tumefaciens. A plant gene expression cassette consists of at least two genes—a selection marker gene and a plant promoter regulating the transcription of the cDNA or genomic DNA of the trait gene. Various selection marker genes can be used including the Arabidopsis gene encoding a mutated acetohydroxy acid synthase (AHAS) enzyme (U.S. Pat. Nos. 57,673,666 and 6,225,105). Similarly, various promoters can be used to regulate the trait gene to provide constitutive, developmental, tissue or environmental regulation of gene transcription. In this example, the 34S promoter (Gen Bank Accession numbers M59930 and X16673) can be used to provide constitutive expression of the trait gene.

[1801] Canola seeds are surface-sterilized in 70% ethanol for 2 min., and then in 30% Clorox with a drop of Tween-20 for 10 min, followed by three rinses with sterilized distilled water. Seeds are then germinated in vitro 5 days on half strength MS medium without hormones, 1% sucrose, 0.7% Phytagar at 23° C., 16 hr. light. The cotyledon petiole explants with the cotyledon attached are excised from the in vitro seedlings, and inoculated with Agrobacterium by dipping the cut end of the petiole explant into the bacterial suspension. The explants are then cultured for 2 days on MSBAP-3 medium containing 3 mg/l BAP, 3% sucrose, 0.7% Phytagar at 23° C., 16 hr light. After two days of co-cultivation with Agrobacterium, the petiole explants are transferred to MSBAP-3 medium containing 3 mg/l BAP, cefotaxime, carbenicillin, or timentin (300 mg/l) for 7 days, and then cultured on MSBAP-3 medium with cefotaxime, carbenicillin, or timentin and selection agent until shoot regeneration. When the shoots were 5-10 mm in length, they are cut and transferred to shoot elongation medium (MSBAP-0.5, containing 0.5 mg/l BAP). Shoots of about 2 cm in length are transferred to the rooting medium (MSO) for root induction.

[1802] Samples of the primary transgenic plants (T0) are analyzed by PCR to confirm the presence of T-DNA. These results are confirmed by Southern hybridization in which DNA is electrophoresed on a 1% agarose gel and transferred to a positively charged nylon membrane (Roche Diagnostics). The PCR DIG Probe Synthesis Kit (Roche Diagnostics) is used to prepare a digoxigenin-labelled probe by PCR, and used as recommended by the manufacturer.

[1803] The transgenic plants are then evaluated for their improved stress tolerance according to the method described in Example 3. Plants that have higher survival rates and biomass production including seed yield, photosynthesis and dry matter production than susceptible plants

[1804] Tolerance of drought, salinity and cold are measured using methods as described in the previous example 3. Tolerant plants have higher survival rates and biomass production including seed yield, photosynthesis and dry matter production than susceptible plants.

### EXAMPLE 8

[1805] Engineering Stress-Tolerant Corn Plants by Over-Expressing Stress Related Genes from Saccharomyces cerevisiae or E. coli or Synechocystis sp.

[1806] Transformation of maize (Zea Mays L.) is performed with a modification of the method described by Ishida et al. (1996. Nature Biotech 14745-50). Transformation is geno-type-dependent in corn and only specific genotypes are amenable to transformation and regeneration. The inbred line A188 (University of Minnesota) or hybrids with A188 as a parent are good sources of donor material for transformation (Fromm et al. 1990 Biotech 8:833-839), but other genotypes can be used successfully as well. Ears are harvested from corn plants at approximately 11 days after pollination (DAP) when the length of immature embryos is about 1 to 1.2 mm. Immature embryos are co-cultivated with Agrobacterium tumefaciens that carry “super binary” vectors and transgenic plants are recovered through organogenesis. The super binary vector system of Japan Tobacco is described in WO patents WO94/00977 and WO95/06722. Vectors were constructed as described. Various selection marker genes can be used including the maize gene encoding a mutated acetohydroxy acid synthase (AHAS) enzyme (U.S. Pat. No. 6,025,541). Similarly, various promoters can be used to regulate the trait gene to provide constitutive, developmental, tissue or environmental regulation of gene transcription. In this example, the 34S promoter (GenBank Accession numbers M59930 and X16673) was used to provide constitutive expression of the trait gene.

[1807] Excised embryos are grown on callus induction medium, then maize regeneration medium, containing imidazolinone as a selection agent. The Petri plates are incubated in the light at 25° C. for 2-3 weeks, or until shoots develop. The green shoots are transferred from each embryo to maize rooting medium and incubated at 25° C. for 2-3 weeks, until roots develop. The rooted shoots are transplanted to soil in the green-house. T1 seeds are produced from plants that exhibit tolerance to the imidazolinone herbicides and which are PCR positive for the transgenes.

[1808] The T1 transgenic plants are then evaluated for their improved stress tolerance according to the method described in Example 3. The T1 generation of single locus insertions of the T-DNA will segregate for the transgene in a 3:1 ratio. Those progeny containing one or two copies of the transgene are tolerant of the imidazolinone herbicide, and exhibit greater tolerance of drought stress than those progeny lacking the transgenes. Tolerant plants have higher survival rates and biomass production including seed yield, photosynthesis and dry matter production than susceptible plants. Homozygous T2 plants exhibited similar phenotypes. Hybrid plants (F1 progeny) of homozygous transgenic plants and non-transgenic plants also exhibited increased environmental stress tolerance.

[1809] Tolerance of salinity and cold are measured using methods as described in the previous example 3. Tolerant plants have higher survival rates and biomass production including seed yield, photosynthesis and dry matter production than susceptible plants.

### EXAMPLE 9

[1810] Engineering Stress-Tolerant Wheat Plants by Over-Expressing Stress Related Genes from Saccharomyces cerevisiae or E. coli or Synechocystis sp.

[1811] Transformation of wheat is performed with the method described by Ishida et al. (1996 Nature Biotech. 14745-50). The cultivar Bobwhite (available from CYMMIT, Mexico) is commonly used in transformation. Immature embryos are cocultivated with Agrobacterium tumefaciens that carry “super binary” vectors, and transgenic plants are recovered through organogenesis. The super binary vector system of Japan Tobacco is described in WO patents WO94/00977 and WO95/06722. Vectors were constructed as described. Various selection marker genes can be used including the maize gene encoding a mutated acetohydroxy acid synthase (AHAS) enzyme (U.S. Pat. No. 6,025,541). Similarly, various promoters can be used to regulate the trait gene to provide constitutive, developmental, tissue or environmental regulation of gene transcription. In this example, the 34S promoter (GenBank Accession numbers M59930 and X16673) was used to provide constitutive expression of the trait gene.

[1812] After incubation with Agrobacterium, the embryos are grown on callus induction medium, then regeneration medium, containing imidazolinone as a selection agent. The Petri plates are incubated in the light at 25° C. for 2-3 weeks, or until shoots develop. The green shoots are transferred from each embryo to rooting medium and incubated at 25° C. for 2-3 weeks, until roots develop. The rooted shoots are transplanted to soil in the greenhouse. T1 seeds are produced from plants that exhibit tolerance to the imidazolinone herbicides and which are PCR positive for the transgenes.

[1813] The T1 transgenic plants are then evaluated for their improved stress tolerance according to the method described in the previous example 3. The T1 generation of single locus insertions of the T-DNA will segregate for the transgene in a 3:1 ratio. Those progeny containing one or two copies of the transgene are tolerant of the imidazolinone herbicide, and exhibit greater tolerance of drought stress than those progeny lacking the transgenes. Tolerant plants have higher survival rates and biomass production including seed yield, photosynthesis and dry matter production than susceptible plants. Homozygous T2 plants exhibited similar phenotypes. Tolerance of salinity and cold are measured using methods as described in the previous examples Tolerant plants have higher survival rates and biomass production including seed yield, photosynthesis and dry matter production than susceptible plants.

### EXAMPLE 10

[1814] Identification of Identical and Heterologous Genes

[1815] Gene sequences can be used to identify identical or heterologous genes from cDNA or genomic libraries. Identical genes (e. g. full-length cDNA clones) can be isolated via nucleic acid hybridization using for example cDNA libraries. Depending on the abundance of the gene of interest, 100,000 up to 1,000,000 recombinant bacteriophages are plated and transferred to nylon membranes. After denaturation with alkali, DNA is immobilized on the membrane by e.g. UV cross linking. Hybridization is carried out at high stringency conditions. In aqueous solution, hybridization and washing is performed at an ionic strength of 1 M NaCl and a temperature of 68° C. Hybridization probes are generated by e.g. radioactive (³²P) nick transcription labeling (High Prime, Roche, Mannheim, Germany). Signals are detected by autoradiography.

[1816] Partially identical or heterologous genes that are related but not identical can be identified in a manner analogous to the above-described procedure using low stringency hybridization and washing conditions. For aqueous hybridization, the ionic strength is normally kept at 1 M NaCl while the temperature is progressively lowered from 68 to 42° C.

[1817] Isolation of gene sequences with homology (or sequence identity/similarity) only in a distinct domain of (for example 10-20 amino acids) can be carried out by using synthetic radio labeled oligonucleotide probes. Radiolabeled oligonucleotides are prepared by phosphorylation of the 5-prime end of two complementary oligonucleotides with T4 polynucleotide kinase. The complementary oligonucleotides are annealed and ligated to form concatemers. The double stranded concatemers are than radiolabeled by, for example, nick transcription. Hybridization is normally performed at low stringency conditions using high oligonucleotide concentrations.

[1818] Oligonucleotide hybridization solution:

[1819] 6×SSC

[1820] 0.01 M sodium phosphate

[1821] 1 mM EDTA (pH 8)

[1822] 0.5% SDS

[1823] 100 μg/ml denatured salmon sperm DNA

[1824] 0.1% nonfat dried milk

[1825] During hybridization, temperature is lowered stepwise to 5-10° C. below the estimated oligonucleotide Tₘ or down to room temperature followed by washing steps and autoradiography. Washing is performed with low stringency such as 3 washing steps using 4×SSC. Further details are described by Sambrook, J. et al., 1989, “Molecular Cloning: A Laboratory Manual,” Cold Spring Harbor Laboratory Press or Ausubel, F. M. et al., 1994, “Current Protocols in Molecular Biology,” John Wiley & Sons.

### EXAMPLE 11

[1826] Identification of Identical Genes by Screening Expression Libraries with Antibodies

[1827] c-DNA clones can be used to produce recombinant polypeptide for example in E. coli (e.g. Qiagen QIAexpress pQE system). Recombinant polypeptides are then normally affinity purified via Ni-NTA affinity chromatography (Qiagen). Recombinant polypeptides are then used to produce specific antibodies for example by using standard techniques for rabbit immunization. Antibodies are affinity purified using a Ni-NTA column saturated with the recombinant antigen as described by Gu et al., 1994, BioTechniques 17:257-262. The antibody can than be used to screen expression cDNA libraries to identify identical or heterologous genes via an immunological screening (Sambrook, J. et al., 1989, “Molecular Cloning: A Laboratory Manual,” Cold Spring Harbor Laboratory Press or Ausubel, F. M. et al., 1994, “Current Protocols in Molecular Biology”, John Wiley & Sons).

### EXAMPLE 12

[1828] In Vivo Mutagenesis

[1829] In vivo mutagenesis of microorganisms can be performed by passage of plasmid (or other vector) DNA through E. coli or other microorganisms (e.g. Bacillus spp. or yeasts such as Saccharomyces cerevisiae) which are impaired in their capabilities to maintain the integrity of their genetic information. Typical mutator strains have mutations in the genes for the DNA repair system (e.g., mutHLS, mutD, mutT, etc.; for reference, see Rupp, W. D., 1996, DNA repair mechanisms, in: Escherichia coli and Salmonella, p. 2277-2294, ASM: Washington.) Such strains are well known to those skilled in the art. The use of such strains is illustrated, for example, in Greener, A. and Callahan, M., 1994, Strategies 7: 32-34. Transfer of mutated DNA molecules into plants is preferably done after selection and testing in microorganisms. Transgenic plants are generated according to various examples within the exemplification of this document.

### EXAMPLE 13

[1830] Engineering Stress-Tolerant Arabidopsis Plants by Over-Expressing Stress Related Protein Encoding Genes for Example from Brassica napus, Glycine max, Zea mays or Oryza sativa using Stress-Inducible and Tissue-Specific Promoters.

[1831] Transgenic Arabidopsis plants over-expressing stress related protein encoding genes from Brassica napus, Glycine max, Zea mays and Oryza sativa for example are created as described in example 1 to express the stress related protein encoding transgenes under the control of either a tissue-specific or stress-inducible promoter. Stress inducible expression is achieved using promoters selected from those listed above in Table VI.

[1832] T2 generation plants are produced and treated with drought stress. For the drought experiment, the plants are deprived of water until the plant and soil are desiccatedAt an equivalent degree of drought stress, tolerant plants are able to resume normal growth and produced more biomass than non-transgenic control plants.

[1833] Tolerant plants have higher survival rates and biomass production including seed yield, photosynthesis and dry matter production than susceptible plants.

### EXAMPLE 14

[1834] Over-Expression of Stress Related Genes for Example from Brassica napus, Glycine max, Zea mays or Oryza sativa for Example Provides Tolerance of Multiple Abiotic Stresses.

[1835] Plants that exhibit tolerance of one abiotic stress often exhibit tolerance of another environmental stress. This phenomenon of cross-tolerance is not understood at a mechanistic level (McKersie and Leshem, 1994). Nonetheless, it is reasonable to expect that plants exhibiting enhanced drought tolerance due to the expression of a transgene might also exhibit tolerance of cold, salt, and other abiotic stresses. In support of this hypothesis, the expression of several genes are up or down-regulated by multiple abiotic stress factors including cold, salt, osmoticum, ABA, etc (e.g. Hong et al. (1992) Developmental and organ-specific expression of an ABA- and stress-induced protein in barley. Plant Mol Biol 18: 663-674; Jagendorf and Takabe (2001) Inducers of glycinebetaine synthesis in barley. Plant Physiol 127: 1827-1835); Mizoguchi et al. (1996) A gene encoding a mitogen-activated protein kinase is induced simultaneously with genes for a mitogen-activated protein kinase and an S6 ribosomal protein kinase by touch, cold, and water stress in Arabidopsis thaliana. Proc Natl Acad Sci USA 93: 765-769; Zhu (2001) Cell signaling under salt, water and cold stresses. Curr Opin Plant Biol 4: 401-406).

[1836] Transgenic Arabidopsis plants over-expressing stress related protein encoding genes from Brassica napus, Glycine max, Zea mays and Oryza sativa for example are created as described in example 1 and tested for tolerance to salt and cold stress.

[1837] To determine salt tolerance, seeds of Arabidopsis thaliana are sterilized (incubated in 100% bleach, 0.1% TritonX100 for five minutes (twice) and rinsed five times with ddH2O). Seeds are plated on non-selective medium (1/2 MS, 0.6% phytagar, 0.5 g/L MES, 1% sucrose, 2 μg/ml benamyl). Seeds are allowed to germinate for approximately ten days. At the 4-5 leaf stage, transgenic plants are potted into 5.5 cm diameter pots and allowed to grow (22° C., continuous light) for approximately seven days, watering as needed. To begin the assay, two liters of 100 mM NaCl and 1/8 MS are added to the tray under the pots. To the tray containing the control plants, three liters of 1/8 MS is added. The concentrations of NaCl supplementation are increased stepwise by 50 mM every 4 days up to 200 mM. After the salt treatment with 200 mM, fresh and dry weights of the plants as well as seed yields are determined. Transgenic plants overepxression stress related protein encoding genes from Brassica napus, Glycine max, Zea mays and Oryza sativa for example show higher fresh and dry weights and more seed yield in comparison to wildtype or mock transformed plants.

[1838] To determine cold tolerance, seeds of the transgenic and cold lines are germinated and grown for approximately 10 days to the 4-5 leaf stage as above. The plants are then transferred to cold temperatures (5° C.). Photosynthesis can be measured using chlorophyll fluorescence as an indicator of photosynthetic fitness and integrity of the photosystems. Seed yield and plant dry weight are measured as an indictor of plant biomass production.

[1839] It is found that the over-expression of stress related genes from Brassica napus, Glycine max, Zea mays or Oryza sativa for example provided tolerance to salt and cold as well as drought. Tolerant plants have higher survival rates and biomass production including seed yield, photosynthesis and dry matter production than susceptible plants.

### EXAMPLE 15

[1840] Engineering Stress-Tolerant Alfalfa Plants by Over-Expressing Stress Related Genes for Example from Brassica napus, Glycine max, Zea mays or Oryza sativa for Example

[1841] A regenerating clone of alfalfa (Medicago sativa) is transformed using the method of McKersie et al., 1999 (Plant Physiol 119: 839-847). Regeneration and transformation of alfalfa is genotype dependent and therefore a regenerating plant is required. Methods to obtain regenerating plants have been described. For example, these can be selected from the cultivar Rangelander (Agriculture Canada) or any other commercial alfalfa variety as described by Brown and Atanassov (1985. Plant Cell Tissue Organ Culture 4: 111-112). Alternatively, the RA3 variety (University of Wisconsin) has been selected for use in tissue culture (Walker et al., 1978 Am J Bot 65:654-659).

[1842] Petiole explants are cocultivated with an overnight culture of Agrobacterium tumefaciens C58C1 pMP90 (McKersie et al., 1999 Plant Physiol 119: 839-847) or LBA4404 containing a binary vector. Many different binary vector systems have been described for plant transformation (e.g. An, G. in Agrobacterium Protocols. Methods in Molecular Biology vol 44, pp 47-62, Gartland K M A and M R Davey eds. Humana Press, Totowa, N.J.). Many are based on the vector pBIN19 described by Bevan (Nucleic Acid Research. 1984. 12:8711-8721) that includes a plant gene expression cassette flanked by the left and right border sequences from the Ti plasmid of Agrobacterium tumefaciens. A plant gene expression cassette consists of at least two genes—a selection marker gene and a plant promoter regulating the transcription of the cDNA or genomic DNA of the trait gene. Various selection marker genes can be used including the Arabidopsis gene encoding a mutated acetohydroxy acid synthase (AHAS) enzyme (U.S. Pat. Nos. 57,673,666 and 6,225,105). Similarly, various promoters can be used to regulate the trait gene that provides constitutive, developmental, tissue or environmental regulation of gene transcription. In this example, the 34S promoter (GenBank Accession numbers M59930 and X16673) was used to provide constitutive expression of the trait gene.

[1843] The explants are cocultivated for 3 d in the dark on SH induction medium containing 288 mg/L Pro, 53 mg/L thioproline, 4.35 g/L K2SO4, and 100 μm acetosyringinone. The explants were washed in half-strength Murashige-Skoog medium (Murashige and Skoog, 1962) and plated on the same SH induction medium without acetosyringinone but with a suitable selection agent and suitable antibiotic to inhibit Agrobacterium growth. After several weeks, somatic embryos are transferred to BOi2Y development medium containing no growth regulators, no antibiotics, and 50 g/L sucrose. Somatic embryos are subsequently germinated on half-strength Murashige-Skoog medium. Rooted seedlings are transplanted into pots and grown in a greenhouse.

[1844] The T0 transgenic plants are propagated by node cuttings and rooted in Turface growth medium. The plants are defoliated and grown to a height of about 10 cm (approximately 2 weeks after defoliation). The plants are then subjected to drought stress in two experiments.

[1845] For the drought experiment, the seedlings receive no water for a period up to 3 weeks at which time the plant and soil are desiccated and the survival and biomass production is determined. At an equivalent degree of drought stress, the tolerant transgenic plants are able to grow normally whereas susceptible wild type plants have died or suffer significant injury resulting in less dry matter.

[1846] Tolerance of salinity and cold is measured using methods as described in example 3. It is found that alfalfa plants over-expressing stress related genes from Brassica napus, Glycine max, Zea mays or Oryza sativa for example are more resistant to salinity and cold stress than non-transgenic control plants. Tolerant plants have higher survival rates and biomass production including seed yield, photosynthesis and dry matter production than susceptible plants.

### EXAMPLE 16

[1847] Engineering Stress-Tolerant Ryegrass Plants by Over-Expressing Stress Related Genes for Example from Brassica napus, Glycine max, Zea mays or Oryza sativa for Example

[1848] Seeds of several different ryegrass varieties may be used as explant sources for transformation, including the commercial variety Gunne available from Svalof Weibull seed company or the variety Affinity. Seeds are surface-sterilized sequentially with 1% Tween-20 for 1 minute, 100% bleach for 60 minutes, 3 rinses with 5 minutes each with de-ionized and distilled H2O, and then germinated for 3-4 days on moist, sterile filter paper in the dark. Seedlings are further sterilized for 1 minute with 1% Tween-20, 5 minutes with 75% bleach, and rinsed 3 times with ddH2O, 5 min each.

[1849] Surface-sterilized seeds are placed on the callus induction medium containing Murashige and Skoog basal salts and vitamins, 20 g/l sucrose, 150 mg/l asparagine, 500 mg/l casein hydrolysate, 3 g/l Phytagel, 10 mg/l BAP, and 5 mg/l dicamba. Plates are incubated in the dark at 25 C for 4 weeks for seed germination and embryogenic callus induction.

[1850] After 4 weeks on the callus induction medium, the shoots and roots of the seedlings are trimmed away, the callus is transferred to fresh media, maintained in culture for another 4 weeks, and then transferred to MSO medium in light for 2 weeks. Several pieces of callus (11-17 weeks old) are either strained through a 10 mesh sieve and put onto callus induction medium, or cultured in 100 ml of liquid ryegrass callus induction media (same medium as for callus induction with agar) in a 250 ml flask. The flask is wrapped in foil and shaken at 175 rpm in the dark at 23° C. for 1 week. Sieving the liquid culture with a 40-mesh sieve collect the cells. The fraction collected on the sieve is plated and cultured on solid ryegrass callus induction medium for 1 week in the dark at 25 C. The callus is then transferred to and cultured on MS medium containing 1% sucrose for 2 weeks.

[1851] Transformation can be accomplished with either Agrobacterium of with particle bombardment methods. An expression vector is created containing a constitutive plant promoter and the cDNA of the gene in a pUC vector. The plasmid DNA is prepared from E. coli cells using with Qiagen kit according to manufacturer's instruction. Approximately 2 g of embryogenic callus is spread in the center of a sterile filter paper in a Petri dish. An aliquot of liquid MSO with 10 g/l sucrose is added to the filter paper. Gold particles (1.0 μm in size) are coated with plasmid DNA according to method of Sanford et al., 1993 and delivered to the embryogenic callus with the following parameters: 500 μg particles and 2 μg DNA per shot, 1300 psi and a target distance of 8.5 cm from stopping plate to plate of callus and 1 shot per plate of callus.

[1852] After the bombardment, calli are transferred back to the fresh callus development medium and maintained in the dark at room temperature for a 1-week period. The callus is then transferred to growth conditions in the light at 25° C. to initiate embryo differentiation with the appropriate selection agent, e.g. 250 nM Arsenal, 5 mg/l PPT or 50 mg/L kanamycin. Shoots resistant to the selection agent appeared and once rooted are transferred to soil.

[1853] Samples of the primary transgenic plants (T0) are analyzed by PCR to confirm the presence of T-DNA. These results are confirmed by Southern hybridization in which DNA is electrophoresed on a 1% agarose gel and transferred to a positively charged nylon membrane (Roche Diagnostics). The PCR DIG Probe Synthesis Kit (Roche Diagnostics) is used to prepare a digoxigenin-labelled probe by PCR, and used as recommended by the manufacturer.

[1854] Transgenic T0 ryegrass plants are propagated vegetatively by excising tillers. The transplanted tillers are maintained in the greenhouse for 2 months until well established. The shoots are defoliated and allowed to grow for 2 weeks.

[1855] The drought experiment is conducted in a manner similar to that described in example 3. The seedlings receive no water for a period up to 3 weeks at which time the plant and soil are desiccated and survival and biomass production is determined. At an equivalent degree of drought stress, tolerant plants are able to resume normal growth whereas susceptible plants have died or suffer significant injury resulting in shorter leaves and less dry matter.

[1856] A second experiment imposing drought stress on the transgenic plants was by treatment with a solution of PEG as described in the previous examples. Tolerance of salinity and cold were measured using methods as described in example 3. It is found that ryegrass over-expressing stress related genes from Brassica napus, Glycine max, Zea mays or Oryza sativa for example are more resistant to salinity and cold stress that non-transgenic control plants. Tolerant plants have higher survival rates and biomass production including seed yield, photosynthesis and dry matter production than susceptible plants.

### EXAMPLE 17

[1857] Engineering Stress-Tolerant Soybean Plants by Over-Expressing Stress Related Genes for Example from Brassica napus, Glycine max, Zea mays or Oryza sativa for Example

[1858] Soybean is transformed according to the following modification of the method described in the Texas A&M patent U.S. Pat. No. 5,164,310. Several commercial soybean varieties are amenable to transformation by this method. The cultivar Jack (available from the Illinois Seed Foundation) is a commonly used for transformation. Seeds are sterilized by immersion in 70% (v/v) ethanol for 6 min and in 25% commercial bleach (NaOCl) supplemented with 0.1% (v/v) Tween for 20 min, followed by rinsing 4 times with sterile double distilled water. Seven-day old seedlings are propagated by removing the radicle, hypocotyl and one cotyledon from each seedling. Then, the epicotyl with one cotyledon is transferred to fresh germination media in petri dishes and incubated at 25° C. under a 16-hr photoperiod (approx. 100 μE/(m-2s-1) for three weeks. Axillary nodes (approx. 4 mm in length) are cut from 3-4 week-old plants. Axillary nodes are excised and incubated in Agrobacterium LBA4404 culture.

[1859] Many different binary vector systems have been described for plant transformation (e.g. An, G. in Agrobacterium Protocols. Methods in Molecular Biology vol 44, pp 47-62, Gartland K M A and M R Davey eds. Humana Press, Totowa, N.J.). Many are based on the vector pBIN19 described by Bevan (Nucleic Acid Research. 1984. 12:8711-8721) that includes a plant gene expression cassette flanked by the left and right border sequences from the Ti plasmid of Agrobacterium tumefaciens. A plant gene expression cassette consists of at least two genes—a selection marker gene and a plant promoter regulating the transcription of the cDNA or genomic DNA of the trait gene. Various selection marker genes can be used including the Arabidopsis gene encoding a mutated acetohydroxy acid synthase (AHAS) enzyme (U.S. Pat. Nos. 57,673,666 and 6,225,105). Similarly, various promoters can be used to regulate the trait gene to provide constitutive, developmental, tissue or environmental regulation of gene transcription. In this example, the 34S promoter (GenBank Accession numbers M59930 and X16673) is used to provide constitutive expression of the trait gene.

[1860] After the co-cultivation treatment, the explants are washed and transferred to selection media supplemented with 500 mg/L timentin. Shoots are excised and placed on a shoot elongation medium. Shoots longer than 1 cm are placed on rooting medium for two to four weeks prior to transplanting to soil.

[1861] The primary transgenic plants (T0) are analyzed by PCR to confirm the presence of T-DNA. These results are confirmed by Southern hybridization in which DNA is electrophoresed on a 1% agarose gel and transferred to a positively charged nylon membrane (Roche Diagnostics). The PCR DIG Probe Synthesis Kit (Roche Diagnostics) is used to prepare a digoxigenin-labelled probe by PCR, and used as recommended by the manufacturer.

[1862] Stress-tolerant soybean plants over-expressing stress related genes from Brassica napus, Glycine max, Zea mays or Oryza sativa for example have higher seed yields

[1863] Tolerance of drought, salinity and cold are measured using methods as described in example 3. Tolerant plants have higher survival rates and biomass production including seed yield, photosynthesis and dry matter production than susceptible plants.

### EXAMPLE 18

[1864] Engineering Stress-Tolerant Rapeseed/Canola Plants by Over-Expressing Stress Related Genes for Example from Brassica napus, Glycine max, Zea mays or Oryza sativa for Example

[1865] Cotyledonary petioles and hypocotyls of 5-6 day-old young seedlings are used as explants for tissue culture and transformed according to Babic et al. (1998, Plant Cell Rep 17: 183-188). The commercial cultivar Westar (Agriculture Canada) is the standard variety used for transformation, but other varieties can be used.

[1866] Agrobacterium tumefaciens LBA4404 containing a binary vector is used for canola transformation. Many different binary vector systems have been described for plant transformation (e.g. An, G. in Agrobacterium Protocols. Methods in Molecular Biology vol 44, pp 47-62, Gartland K M A and M R Davey eds. Humana Press, Totowa, N.J.). Many are based on the vector pBIN19 described by Bevan (Nucleic Acid Research. 1984. 12:8711-8721) that includes a plant gene expression cassette flanked by the left and right border sequences from the Ti plasmid of Agrobacterium tumefaciens. A plant gene expression cassette consists of at least two genes—a selection marker gene and a plant promoter regulating the transcription of the cDNA or genomic DNA of the trait gene. Various selection marker genes can be used including the Arabidopsis gene encoding a mutated acetohydroxy acid synthase (AHAS) enzyme (U.S. Pat. Nos. 57,673,666 and 6,225,105). Similarly, various promoters can be used to regulate the trait gene to provide constitutive, developmental, tissue or environmental regulation of gene transcription. In this example, the 34S promoter (GenBank Accession numbers M59930 and X16673) is used to provide constitutive expression of the trait gene.

[1867] Canola seeds are surface-sterilized in 70% ethanol for 2 min., and then in 30% Clorox with a drop of Tween-20 for 10 min, followed by three rinses with sterilized distilled water. Seeds are then germinated in vitro 5 days on half strength MS medium without hormones, 1% sucrose, 0.7% Phytagar at 23° C., 16 hr. light. The cotyledon petiole explants with the cotyledon attached are excised from the in vitro seedlings, and inoculated with Agrobacterium by dipping the cut end of the petiole explant into the bacterial suspension. The explants are then cultured for 2 days on MSBAP-3 medium containing 3 mg/l BAP, 3% sucrose, 0.7% Phytagar at 23° C., 16 hr light. After two days of cocultivation with Agrobacterium, the petiole explants are transferred to MSBAP-3 medium containing 3 mg/l BAP, cefotaxime, carbenicillin, or timentin (300 mg/l) for 7 days, and then cultured on MSBAP-3 medium with cefotaxime, carbenicillin, or timentin and selection agent until shoot regeneration. When the shoots are 5-10 mm in length, they are cut and transferred to shoot elongation medium (MSBAP-0.5, containing 0.5 mg/l BAP). Shoots of about 2 cm in length are transferred to the rooting medium (MS0) for root induction.

[1868] Samples of the primary transgenic plants (T0) are analyzed by PCR to confirm the presence of T-DNA. These results are confirmed by Southern hybridization in which DNA is electrophoresed on a 1% agarose gel and transferred to a positively charged nylon membrane (Roche Diagnostics). The PCR DIG Probe Synthesis Kit (Roche Diagnostics) is used to prepare a digoxigenin-labelled probe by PCR, and used as recommended by the manufacturer.

[1869] The transgenic plants are then evaluated for their improved stress tolerance according to the method described in Example 3. It is found that transgenic Rapeseed/Canola over-expressing stress related genes from Brassica napus, Glycine max, Zea mays or Oryza sativa for example are more tolerant to environmental stress than non-transgenic control plants. Tolerant plants have higher survival rates and biomass production including seed yield, photosynthesis and dry matter production than susceptible plants.

### EXAMPLE 19

[1870] Engineering Stress-Tolerant Corn Plants by Over-Expressing Stress Related Genes for Example from Brassica napus, Glycine max, Zea mays or Oryza sativa for Example

[1871] Transformation of corn (Zea mays L.) is performed with a modification of the method described by Ishida et al. (1996. Nature Biotech 14745-50). Transformation is geno-type-dependent in corn and only specific genotypes are amenable to transformation and regeneration. The inbred line A188 (University of Minnesota) or hybrids with A188 as a parent are good sources of donor material for transformation (Fromm et al. 1990 Biotech 8:833-839), but other genotypes can be used successfully as well. Ears are harvested from corn plants at approximately 11 days after pollination (DAP) when the length of immature embryos is about 1 to 1.2 mm. Immature embryos are co-cultivated with Agrobacterium tumefaciens that carry “super binary” vectors and transgenic plants are recovered through organogenesis. The super binary vector system of Japan Tobacco is described in WO patents WO94/00977 and WO95/06722. Vectors are constructed as described. Various selection marker genes can be used including the corn gene encoding a mutated acetohydroxy acid synthase (AHAS) enzyme (U.S. Pat. No. 6,025,541). Similarly, various promoters can be used to regulate the trait gene to provide constitutive, developmental, tissue or environmental regulation of gene transcription. In this example, the 34S promoter (GenBank Accession numbers M59930 and X16673) is used to provide constitutive expression of the trait gene.

[1872] Excised embryos are grown on callus induction medium, then corn regeneration medium, containing imidazolinone as a selection agent. The Petri plates were incubated in the light at 25° C. for 2-3 weeks, or until shoots develop. The green shoots from each embryo are transferred to corn rooting medium and incubated at 25° C. for 2-3 weeks, until roots develop. The rooted shoots are transplanted to soil in the greenhouse. T1 seeds are produced from plants that exhibit tolerance to the imidazolinone herbicides and are PCR positive for the transgenes.

[1873] The T1 transgenic plants are then evaluated for their improved stress tolerance according to the methods described in Example 3. The T1 generation of single locus insertions of the T-DNA will segregate for the transgene in a 1:2:1 ratio. Those progeny containing one or two copies of the transgene (¾ of the progeny) are tolerant of the imidazolinone herbicide, and exhibit greater tolerance of drought stress than those progeny lacking the transgenes. Tolerant plants have higher seed yields. Homozygous T2 plants exhibited similar phenotypes. Hybrid plants (F1 progeny) of homozygous transgenic plants and non-transgenic plants also exhibited increased environmental stress tolerance.

[1874] Tolerance to salinity and cold are measured using methods as described in the previous example 3. Again, transgenic corn plants over-expressing stress related genes from Brassica napus, Glycine max, Zea mays or Oryza sativa for example are found to be tolerant to environmental stresses. Tolerant plants have higher survival rates and biomass production including seed yield, photosynthesis and dry matter production than susceptible plants.

### EXAMPLE 20

[1875] Engineering Stress-Tolerant Wheat Plants by Over-Expressing Stress Related Genes for Example from Brassica napus, Glycine max, Zea mays or Oryza sativa for Example

[1876] Transformation of wheat is performed with the method described by Ishida et al. (1996 Nature Biotech. 14745-50). The cultivar Bobwhite (available from CYMMIT, Mexico) is commonly used in transformation. Immature embryos are cocultivated with Agrobacterium tumefaciens that carry “super binary” vectors, and transgenic plants are recovered through organogenesis. The super binary vector system of Japan Tobacco is described in WO patents WO94/00977 and WO95/06722. Vectors are constructed as described. Various selection marker genes can be used including the maize gene encoding a mutated acetohydroxy acid synthase (AHAS) enzyme (U.S. Pat. No. 6,025,541). Similarly, various promoters can be used to regulate the trait gene to provide constitutive, developmental, tissue or environmental regulation of gene transcription. In this example, the 34S promoter (GenBank Accession numbers M59930 and X16673) is used to provide constitutive expression of the trait gene.

[1877] After incubation with Agrobacterium, the embryos are grown on callus induction medium, then regeneration medium, containing imidazolinone as a selection agent. The Petri plates are incubated in the light at 25° C. for 2-3 weeks, or until shoots develop. The green shoots are transferred from each embryo to rooting medium and incubated at 25° C. for 2-3 weeks, until roots develop. The rooted shoots are transplanted to soil in the greenhouse. T1 seeds are produced from plants that exhibit tolerance to the imidazolinone herbicides and which are PCR positive for the transgenes.

[1878] The T1 transgenic plants are then evaluated for their improved stress tolerance according to the method described in the previous example 3. The T1 generation of single locus insertions of the T-DNA will segregate for the transgene in a 1:2:1 ratio. Those progeny containing one or two copies of the transgene (¾ of the progeny) are tolerant of the imidazolinone herbicide, and exhibit greater tolerance of drought stress than those progeny lacking the transgenes. Tolerant plants have higher survival rates and biomass production including seed yield, photosynthesis and dry matter production than susceptible plants. Homozygous T2 plants exhibited similar phenotypes. Tolerance of salinity and cold are measured using methods as described in the previous examples. Plants that overexpressed stress related genes from Brassica napus, Glycine max, Zea mays or Oryza sativa for example have tolerance to drought, salinity or cold and displayed higher survival rates and biomass production including seed yield, photosynthesis and dry matter production than susceptible plants.

### EXAMPLE 21

[1879] Identification of Identical and Heterologous Genes

[1880] Gene sequences can be used to identify identical or heterologous genes from cDNA or genomic libraries. Identical genes (e.g. full-length cDNA clones) can be isolated via nucleic acid hybridization using for example cDNA libraries. Depending on the abundance of the gene of interest, 100,000 up to 1,000,000 recombinant bacteriophages are plated and transferred to nylon membranes. After denaturation with alkali, DNA is immobilized on the membrane by e.g. UV cross linking. Hybridization is carried out at high stringency conditions. In aqueous solution, hybridization and washing is performed at an ionic strength of 1 M NaCl and a temperature of 68° C. Hybridization probes are generated by e.g. radioactive (³²P) nick transcription labeling (High Prime, Roche, Mannheim, Germany). Signals are detected by autoradiography.

[1881] Partially identical or heterologous genes that are similar but not identical can be identified in a manner analogous to the above-described procedure using low stringency hybridization and washing conditions. For aqueous hybridization, the ionic strength is normally kept at 1 M NaCl while the temperature is progressively loared from 68 to 42° C.

[1882] Isolation of gene sequences with homology (or sequence identity/similarity) in only a distinct domain of for example 10-20 amino acids can be carried out using synthetic radio labeled oligonucleotide probes. Radiolabeled oligonucleotides are prepared by phosphorylation of the 5-prime end of two complementary oligonucleotides with T4 polynucleotide kinase. The complementary oligonucleotides are annealed and ligated to form concatemers. The double stranded concatemers are then radiolabeled by, for example, nick transcription. Hybridization is normally performed at low stringency conditions using high oligonucleotide concentrations.

[1883] Oligonucleotide hybridization solution:

[1884] 6×SSC

[1885] 0.01 M sodium phosphate

[1886] 1 mM EDTA (pH 8)

[1887] 0.5% SDS

[1888] 100 μg/ml denatured salmon sperm DNA

[1889] 0.1% nonfat dried milk

[1890] During hybridization, temperature is lowered stepwise to 5-10° C. below the estimated oligonucleotide Tₘ or down to room temperature followed by washing steps and autoradiography. Washing is performed with low stringency such as 3 washing steps using 4×SSC. Further details are described by Sambrook, J. et al., 1989, “Molecular Cloning: A Laboratory Manual,” Cold Spring Harbor Laboratory Press or Ausubel, F. M. et al., 1994, “Current Protocols in Molecular Biology,” John Wiley & Sons.

### EXAMPLE 22

[1891] Identification of Identical or Homologous Genes by Screening Expression Libraries with Antibodies

[1892] c-DNA clones can be used to produce recombinant polypeptide for example in E. coli (e.g. Qiagen QIAexpress pQE system). Recombinant polypeptides are then normally affinity purified via Ni-NTA affinity chromatography (Qiagen). Recombinant polypeptides are then used to produce specific antibodies for example by using standard techniques for rabbit immunization. Antibodies are affinity purified using a Ni-NTA column saturated with the recombinant antigen as described by Gu et al., 1994, BioTechniques 17:257-262. The antibody can then be used to screen expression cDNA libraries to identify identical or heterologous genes via an immunological screening (Sambrook, J. et al., 1989, “Molecular Cloning: A Laboratory Manual,” Cold Spring Harbor Laboratory Press or Ausubel, F. M. et al., 1994, “Current Protocols in Molecular Biology”, John Wiley & Sons).

### EXAMPLE 23

[1893] In Vivo Mutagenesis

[1894] In vivo mutagenesis of microorganisms can be performed by passage of plasmid (or other vector) DNA through E. coli or other microorganisms (e.g. Bacillus spp. or yeasts such as Saccharomyces cerevisiae), which are impaired in their capabilities to maintain the integrity of their genetic information. Typical mutator strains have mutations in the genes for the DNA repair system (e.g., mutHLS, mutD, mutT, etc.; for reference, see Rupp, W. D., 1996, DNA repair mechanisms, in: Escherichia coli and Salmonella, p. 2277-2294, ASM: Washington.) Such strains are well known to those skilled in the art. The use of such strains is illustrated, for example, in Greener, A. and Callahan, M., 1994, Strategies 7: 32-34. Transfer of mutated DNA molecules into plants is preferably done after selection and testing in microorganisms. Transgenic plants are generated according to various examples within the exemplification of this document.

[1895] Plant Screening for Growth Under Low Temperature Conditions

[1896] In a standard experiment soil was prepared as 3.5:1 (v/v) mixture of nutrient rich soil (GS90, Tantau, Wansdorf, Germany) and sand. Pots were filled with soil mixture and placed into trays. Water was added to the trays to let the soil mixture take up appropriate amount of water for the sowing procedure. The seeds for transgenic A. thaliana plants were sown in pots (6 cm diameter). Pots were collected until they filled a tray for the growth chamber. Then the filled tray was covered with a transparent lid and transferred into the shelf system of the precooled (4° C.-5° C.) growth chamber. Stratification was established for a period of 2-3 days in the dark at 4° C.-5° C. Germination of seeds and growth was initiated at a growth condition of 20° C., 60% relative humidity, 16 h photoperiod and illumination with fluorescent light at 200 μmol/m2s. Covers were removed 7 days after sowing. BASTA selection was done at day 9 after sowing by spraying pots with plantlets from the top. Therefore, a 0.07% (v/v) solution of BASTA concentrate (183 g/l glufosinate-ammonium) in tap water was sprayed. Transgenic events and wild-type control plants were distributed randomly over the chamber. The location of the trays inside the chambers was changed on working days from day 7 after sowing. Watering was carried out every two days after covers were removed from the trays. Plants were individualized 12-13 days after sowing by removing the surplus of seedlings leaving one seedling in a pot. Cold (chilling to 11° C.-12° C.) was applied 14 days after sowing until the end of the experiment. For measuring biomass performance, plant fresh weight was determined at harvest time (34-36 days after sowing) by cutting shoots and weighing them. Beside weighing, phenotypic information was added in case of plants that differ from the wild type control. Plants were in the stage prior to flowering and prior to growth of inflorescence when harvested. Significance values for the statistical significance of the biomass changes were calculated by applying the ‘student's’ t test (parameters: two-sided, unequal variance).

[1897] Three successive experiments were conducted. In the first experiment, one individual of each transformed line was tested.

[1898] In the second experiment, the event that had been determined as chilling tolerant or resistant in the first experiment, i.e. showed increased yield, in this case increased biomass production, in comparison to wild type, were put through a confirmation screen according to the same experimental procedures. In this experiment, max. 10 plants of each tolerant or resistant event were grown, treated and measured as before.

[1899] In the first two experiments, chilling tolerance or tolerance and biomass production was compared to wild type plants.

[1900] In the third experiment up to 20 replicates of each confirmed tolerant event, i.e. those that had been scored as tolerant or resistant in the second experiment, were grown, treated and scored as before. The results thereof are summarized in table 2.

[1901] Table 2: Biomass production of transgenic A. thaliana after imposition of chilling stress.

[1902] Biomass production was measured by weighing plant rosettes. Biomass increase was calculated as ratio of average weight for trangenic plants compared to average weight of wild type control plants from the same experiment. The minimum and maximum biomass increase seen within the group of transgenic events is given for a locus with all those events showing a significance value ≦0.1 and a biomass increase ≧10% (ratio ≧1.1).

TABLE 2

| | | | Biomass | Biomass |
|---|---|---|---|---|
| SeqID | Target | Locus | Increase min | Increase max |
| 8178 | Non-targeted | YER174C | 1.380 | 1.459 |

[1903] Plant Screening for Growth Under Cycling Drought Conditions

[1904] In a standard experiment soil is prepared as 1:1 (v/v) mixture of nutrient rich soil (GS90, Tantau, Wansdorf, Germany) and quarz sand. Pots (6 cm diameter) were filled with this mixture and placed into trays. Water was added to the trays to let the soil mixture take up appropriate amount of water for the sowing procedure (day 1) and subsequently seeds for transgenic A. thaliana plants and their non-trangenic controls were sown in pots. Then the filled tray was covered with a transparent lid and transferred into a precooled (4° C.-5° C.) and darkened growth chamber. Stratification was established for a period of 3 days in the dark at 4° C.-5° C. or, alternatively, for 4 days in the dark at 4° C. Germination of seeds and growth was initiated at a growth condition of 20° C., 60% relative humidity, 16 h photoperiod and illumination with fluorescent light at 200 μmol/m2s or, alternatively at 220 μmol/m2s. Covers were removed 7-8 days after sowing. BASTA selection was done at day 10 or day 11 (9 or 10 days after sowing) by spraying pots with plantlets from the top. In the standard experiment, a 0.07% (v/v) solution of BASTA concentrate (183 g/l glufosinate-ammonium) in tap water was sprayed once or, alternatively, a 0.02% (v/v) solution of BASTA was sprayed three times. The non-transgenic control plants were sprayed with tap water only (instead of spraying with BASTA dissolved in tap water) but were otherwise treated identically. Plants were individualized 13-14 days after sowing by removing the surplus of seedlings and leaving one seedling in soil. Transgenic events and wildtype control plants were evenly distributed over the chamber.

[1905] The water supply throughout the experiment was limited and plants were subjected to cycles of drought and re-watering. Watering was carried out at day 1 (before sowing), day 14 or day 15, day 21 or day 22, and, finally, day 27 or day 28. For measuring biomass production, plant fresh weight was determined one day after the final watering (day 28 or day 29) by cutting shoots and weighing them. Besides weighing, phenotypic information was added in case of plants that differ from the wild type control. Plants were in the stage prior to flowering and prior to growth of inflorescence when harvested. Significance values for the statistical significance of the biomass changes were calculated by applying the ‘student's’ t test (parameters: two-sided, unequal variance).

[1906] In a standard procedure three successive experiments were conducted. In the first experiment, one individual of each transformed line/event was tested. In the second experiment, the events that had been determined as cycling drought tolerant or resistant in the first experiment, i.e. showed increased yield, in this case increased biomass production, in comparison to wild type, were put through a confirmation screen according to the same experimental procedures. In this experiment, max. 10 plants of each tolerant or resistant event were grown, treated and measured as before.

[1907] In the first two experiments, cycling drought resistance or tolerance and biomass production was compared to wild type plants.

[1908] In the third experiment up to 20 replicates of each confirmed tolerant event, i.e. those that had been scored as tolerant or resistant in the second experiment, were grown, treated and scored as before. The results thereof are summarized in table 3.

[1909] Table 3: Biomass production of transgenic A. thaliana developed under cycling drought growth conditions.

[1910] Biomass production was measured by weighing plant rosettes. Biomass increase was calculated as ratio of average weight for trangenic plants compared to average weight of wild type control plants from the same experiment. The minimum and maximum biomass increase seen within the group of transgenic events is given for a locus with all those events showing a significance value ≦0.1 and a biomass increase ≧10% (ratio ≧1.1).

TABLE 3

| | | | Biomass | Biomass |
|---|---|---|---|---|
| SeqID | Target | Locus | Increase min | Increase max |
| 8178 | Plastidic | YER174C | 1.211 | 1.275 |

[1911] Plant Screening for Biomass Increase Under Standardised Growth Conditions

[1912] In this experiment, a plant screening for biomass under standardised growth conditions in the absence of substantial abiotic stress has been performed. In a standard experiment soil is prepared as 3.5:1 (v/v) mixture of nutrient rich soil (GS90, Tantau, Wansdorf, Germany) and quarz sand. Alternatively, plants were sown on nutrient rich soil (GS90, Tantau, Germany). Pots were filled with soil mixture and placed into trays. Water was added to the trays to let the soil mixture take up appropriate amount of water for the sowing procedure. The seeds for transgenic A. thaliana plants and their non-trangenic controls were sown in pots (6 cm diameter). Then the filled tray was covered with a transparent lid and transferred into a precooled (4° C.-5° C.) and darkened growth chamber. Stratification was established for a period of 3 days in the dark at 4° C.-5° C. or, alternatively, for 4 days in the dark at 4° C. Germination of seeds and growth was initiated at a growth condition of 20° C., 60% relative humidity, 16h photoperiod and illumination with fluorescent light at 200 μmol/m2s or, alternatively at 220 μmol/m2s. Covers were removed 7-8 days after sowing. BASTA selection was done at day 9 after sowing by spraying pots with plantlets from the top. In the standard experiment, a 0.07% (v/v) solution of BASTA concentrate (183 g/l glufosinate-ammonium) in tap water was sprayed once or, alternatively, a 0.02% (v/v) solution of BASTA was sprayed three times. Plants were individualized 13-14 days after sowing by removing the surplus of seedlings and leaving one seedling in soil. Transgenic events and wildtype control plants were evenly distributed over the chamber. Watering was carried out every two days after removing the covers in a standard experiment or, alternatively, every day. For measuring biomass performance, plant fresh weight was determined at harvest time (26-27 days after sowing) by cutting shoots and weighing them. Alternatively, the harvest time was 24-25 days after sowing. Beside weighing, phenotypic information was added in case of plants that differ from the wild type control. Plants were in the stage prior to flowering and prior to growth of inflorescence when harvested. Significance values for the statistical significance of the biomass changes were calculated by applying the ‘student's’ t test (parameters: two-sided, unequal variance).

[1913] In a standard procedure three successive experiments were conducted. In the first experiment, one individual of each transformed line/event was tested. In the second experiment, the events that had been determined as high biomass yielding from the first experiment in comparison to wild type, were put through a confirmation screen according to the same experimental procedures. A maximum of 10 plants of each high biomass yielding event were grown, treated and measured as before.

[1914] In the first two experiments biomass production was compared to wild type plants.

[1915] In the third experiment up to 20 replicates of each confirmed tolerant event, i.e. those that had been scored as high yielding in the second experiment, were grown, treated and scored as before. The results thereof are summarized in table 4.

[1916] Table 4: Biomass production of transgenic A. thaliana developed under ambient growth conditions.

[1917] Biomass production was measured by weighing plant rosettes. Biomass increase was calculated as ratio of average weight for trangenic plants compared to average weight of wild type control plants from the same experiment. The minimum and maximum biomass increase seen within the group of transgenic events is given for a locus with all those events showing a significance value ≦0.1 and a biomass increase ≧10% (ratio ≧1.1).

TABLE 4

| | | | Biomass | Biomass |
|---|---|---|---|---|
| SeqID | Target | Locus | Increase min | Increase max |
| 8178 | Non-targeted | YER174C | 1.416 | 1.453 |

[1918] Plant Screening (Arabidopsis) for Growth Under Limited Nitrogen Supply

[1919] For screening of transgenic plants a specific culture facility was used. For high-throughput purposes plants were screened for biomass production on agar plates with limited supply of nitrogen (adapted from Estelle and Somerville, 1987). This screening pipeline consists of two level. Transgenic lines are subjected to subsequent level if biomass production was significantly improved in comparison to wild type plants. With each level number of replicates and statistical stringency was increased.

[1920] For the sowing, the seeds, which had been stored in the refrigerator (at −20° C.), were removed from the Eppendorf tubes with the aid of a toothpick and transferred onto the above-mentioned agar plates, with limited supply of nitrogen (0.05 mM KNO₃). In total, approximately 15-30 seeds were distributed horizontally on each plate (12×12 cm).

[1921] After the seeds had been sown, plates are subjected to stratification for 2-4 days in the dark at 4° C. After the stratification, the test plants were grown for 22 to 25 days at a 16-h-light, 8-h-dark rhythm at 20° C., an atmospheric humidity of 60% and a CO₂ concentration of approximately 400 ppm. The light sources used generate a light resembling the solar color spectrum with a light intensity of approximately 100 μE/m²s. After 10 to 11 days the plants are individualized. Improved growth under nitrogen limited conditions was assessed by biomass production of shoots and roots of transgenic plants in comparison to wild type control plants after 20-25 days growth.

[1922] Transgenic lines showing a significant improved biomass production in comparison to wild type plants are subjected to following experiment of the subsequent level:

[1923] Arabidopsis thaliana seeds are sown in pots containing a 1:1 (v:v) mixture of nutrient depleted soil (“Einheitserde Typ 0”, 30% clay, Tantau, Wansdorf Germany) and sand. Germination is induced by a four day period at 4° C., in the dark. Subsequently the plants are grown under standard growth conditions (photoperiod of 16 h light and 8 h dark, 20° C., 60% relative humidity, and a photon flux density of 200 μE). The plants are grown and cultured, inter alia they are watered every second day with a N-depleted nutrient solution. The N-depleted nutrient solution e.g. contains beneath water the components of table 5.

TABLE 5

| mineral nutrient | final concentration | |
|---|---|---|
| KCl | 3.00 | mM |
| MgSO₄ × 7 H₂O | 0.5 | mM |
| CaCl₂ × 6 H₂O | 1.5 | mM |
| K₂SO₄ | 1.5 | mM |
| NaH₂PO₄ | 1.5 | mM |
| Fe-EDTA | 40 | μM |
| H₃BO₃ | 25 | μM |
| MnSO₄ × H₂O | 1 | μM |
| ZnSO₄ × 7 H₂O | 0.5 | μM |
| Cu₂SO₄ × 5 H₂O | 0.3 | μM |
| Na₂MoO₄ × 2 H₂O | 0.05 | μM |

[1924] After 9 to 10 days the plants are individualized. After a total time of 29 to 31 days the plants are harvested and rated by the fresh weight of the anal parts of the plants. The results thereof are summarized in table 6. The biomass increase has been measured as ratio of the fresh weight of the aerial parts of the respective transgene plant and the non-transgenic wild type plant.

[1925] Table 6: Biomass Production of Transgenic A. thaliana Grown Under Limited Nitrogen Supply

[1926] Biomass production was measured by weighing plant rosettes. Biomass increase was calculated as ratio of average weight for trangenic plants compared to average weight of wild type control plants from the same experiment. The minimum and maximum biomass increase seen within a group of transgenic events is given for a locus with all those events that show a significance value <0.1 and a biomass increase >10% (ratio >1.1).

TABLE 6

| | | | Biomass | Biomass |
|---|---|---|---|---|
| SeqID | Target | Locus | Increase min | Increase max |
| 8178 | Non-targeted | YER174C | 1.306 | 1.604 |

### FIGURES

[1927] FIG. 1a Vector VC-MME220-1 SEQ ID NO: 1 used for cloning gene of interest for non-targeted expression.

[1928] FIG. 1b Vector VC-MME220-1 qcz SEQ ID NO: 8433 used for cloning gene of interest for non-targeted expression.

[1929] FIG. 2a Vector VC-MME221-1 SEQ ID NO: 2 used for cloning gene of interest for non-targeted expression.

[1930] FIG. 2b Vector VC-MME221-1 qcz SEQ ID NO: 8436 used for cloning gene of interest for non-targeted expression.

[1931] FIG. 3a Vector VC-MME354-1 SEQ ID NO: 3 used for cloning gene of interest for targeted expression.

[1932] FIG. 3b Vector VC-MME354-1QCZ SEQ ID NO: 8431 used for cloning gene of interest for targeted expression.

[1933] FIG. 4a Vector VC-MME432-1 SEQ ID NO: 5 used for cloning gene of interest for targeted expression.

[1934] FIG. 4b Vector VC-MME432-1qcz SEQ ID NO: 8434 used for cloning gene of interest for targeted expression.

[1935] FIG. 5a Vector VC-MME489-1p SEQ ID NO: 15 used for cloning gene of interest for non-targeted expression and cloning of a targeting sequence.

[1936] FIG. 5b Vector VC-MME489-1QCZ SEQ ID NO: 8437 used for cloning gene of interest for non-targeted expression and cloning of a targeting sequence.

[1937] FIG. 6a Vector pMTX02270p SEQ ID NO: 16 used for cloning of a targeting sequence.

TABLE IA
Nucleic acid sequence ID numbers

| | 1. | 2. | 3. | 4. | 5. | 6. |
|---|---|---|---|---|---|---|
| Application | Hit | Project | Locus | Organism | Lead SEQ ID | Target |
| 1 | 1 | LW1_OE X_PCT | B0081 | E. coli | 38 | non-targeted |
| 1 | 2 | LW1_OE X_PCT | B0445 | E. coli | 54 | non-targeted |
| 1 | 3 | LW1_OE X_PCT | B0482 | E. coli | 70 | non-targeted |
| 1 | 4 | LW1_OE X_PCT | B0607 | E. coli | 89 | non-targeted |
| 1 | 5 | LW1_OE X_PCT | B0629 | E. coli | 143* | non-targeted |
| 1 | 6 | LW1_OE X_PCT | B0631 | E. coli | 162 | non-targeted |
| 1 | 7 | LW1_OE X_PCT | B0697 | E. coli | 213 | non-targeted |
| 1 | 8 | LW1_OE X_PCT | B0753 | E. coli | 358 | non-targeted |
| 1 | 9 | LW1_OE X_PCT | B0813 | E. coli | 367 | non-targeted |
| 1 | 10 | LW1_OE X_PCT | B0845 | E. coli | 420* | non-targeted |
| 1 | 11 | LW1_OE X_PCT | B0866 | E. coli | 455 | non-targeted |
| 1 | 12 | LW1_OE X_PCT | B0963 | E. coli | 535* | non-targeted |
| 1 | 13 | LW1_OE X_PCT | B0975 | E. coli | 618 | non-targeted |
| 1 | 14 | LW1_OE X_PCT | B1007 | E. coli | 671* | non-targeted |
| 1 | 15 | LW1_OE X_PCT | B1052 | E. coli | 764 | non-targeted |
| 1 | 16 | LW1_OE X_PCT | B1091 | E. coli | 768 | plastidic |
| 1 | 17 | LW1_OE X_PCT | B1161 | E. coli | 907 | non-targeted |
| 1 | 18 | LW1_OE X_PCT | B1186 | E. coli | 927 | non-targeted |
| 1 | 19 | LW1_OE X_PCT | B1291 | E. coli | 1009 | plastidic |
| 1 | 20 | LW1_OE X_PCT | B1294 | E. coli | 1154 | plastidic |
| 1 | 21 | LW1_OE X_PCT | B1423 | E. coli | 1308 | non-targeted |
| 1 | 22 | LW1_OE X_PCT | B1597 | E. coli | 1368* | non-targeted |
| 1 | 23 | LW1_OE X_PCT | B1605 | E. coli | 1374 | non-targeted |
| 1 | 24 | LW1_OE X_PCT | B1704 | E. coli | 1507 | non-targeted |
| 1 | 25 | LW1_OE X_PCT | B1736 | E. coli | 1953 | plastidic |
| 1 | 26 | LW1_OE X_PCT | B1798 | E. coli | 2156* | non-targeted |
| 1 | 27 | LW1_OE X_PCT | B1878 | E. coli | 2195 | non-targeted |
| 1 | 28 | LW1_OE X_PCT | B1901 | E. coli | 2219* | plastidic |
| 1 | 29 | LW1_OE X_PCT | B1912 | E. coli | 2277 | plastidic |
| 1 | 30 | LW1_OE X_PCT | B2027 | E. coli | 2470* | non-targeted |
| 1 | 31 | LW1_OE X_PCT | B2039 | E. coli | 2493 | non-targeted |
| 1 | 32 | LW1_OE X_PCT | B2075 | E. coli | 2627 | non-targeted |
| 1 | 33 | LW1_OE X_PCT | B2153 | E. coli | 2858 | plastidic |
| 1 | 34 | LW1_OE X_PCT | B2194 | E. coli | 2942 | non-targeted |
| 1 | 35 | LW1_OE X_PCT | B2226 | E. coli | 2965* | non-targeted |
| 1 | 36 | LW1_OE X_PCT | B2309 | E. coli | 2981 | plastidic |
| 1 | 37 | LW1_OE X_PCT | B2469 | E. coli | 3130* | non-targeted |
| 1 | 38 | LW1_OE X_PCT | B2475 | E. coli | 3216 | non-targeted |
| 1 | 39 | LW1_OE X_PCT | B2482 | E. coli | 3335 | non-targeted |
| 1 | 40 | LW1_OE X_PCT | B2541 | E. coli | 3401 | non-targeted |
| 1 | 41 | LW1_OE X_PCT | B2559 | E. coli | 3590 | plastidic |
| 1 | 42 | LW1_OE X_PCT | B2605 | E. coli | 3831 | non-targeted |
| 1 | 43 | LW1_OE X_PCT | B2630 | E. coli | 3857 | non-targeted |
| 1 | 44 | LW1_OE X_PCT | B2678 | E. coli | 3861 | plastidic |
| 1 | 45 | LW1_OE X_PCT | B2715 | E. coli | 4022* | plastidic |
| 1 | 46 | LW1_OE X_PCT | B2776 | E. coli | 4059 | non-targeted |
| 1 | 47 | LW1_OE X_PCT | B2791 | E. coli | 4076 | non-targeted |
| 1 | 48 | LW1_OE X_PCT | B2912 | E. coli | 4157 | non-targeted |
| 1 | 49 | LW1_OE X_PCT | B2965 | E. coli | 4260* | plastidic |
| 1 | 50 | LW1_OE X_PCT | B2987 | E. coli | 4350 | plastidic |
| 1 | 51 | LW1_OE X_PCT | B2987 | E. coli | 4350 | non-targeted |
| 1 | 52 | LW1_OE X_PCT | B3093 | E. coli | 4459 | plastidic |
| 1 | 53 | LW1_OE X_PCT | B3363 | E. coli | 4505 | plastidic |
| 1 | 54 | LW1_OE X_PCT | B3429 | E. coli | 4640 | plastidic |
| 1 | 55 | LW1_OE X_PCT | B3568 | E. coli | 4806 | plastidic |
| 1 | 56 | LW1_OE X_PCT | B3616 | E. coli | 5124 | plastidic |
| 1 | 57 | LW1_OE X_PCT | B3616 | E. coli | 5124 | non-targeted |
| 1 | 58 | LW1_OE X_PCT | B3812 | E. coli | 5417 | non-targeted |
| 1 | 59 | LW1_OE X_PCT | B3899 | E. coli | 5495* | non-targeted |
| 1 | 60 | LW1_OE X_PCT | B3929 | E. coli | 5585 | plastidic |
| 1 | 61 | LW1_OE X_PCT | B3938 | E. coli | 5800 | non-targeted |
| 1 | 62 | LW1_OE X_PCT | B3974 | E. coli | 5850 | non-targeted |
| 1 | 63 | LW1_OE X_PCT | B3989 | E. coli | 5992 | non-targeted |
| 1 | 64 | LW1_OE X_PCT | B4029 | E. coli | 5999 | non-targeted |
| 1 | 65 | LW1_OE X_PCT | B4139 | E. coli | 6056* | plastidic |
| 1 | 66 | LW1_OE X_PCT | B4390 | E. coli | 6500* | non-targeted |
| 1 | 67 | LW1_OE X_PCT | SII0290 | Synechocystis | 6542 | non-targeted |
| 1 | 68 | LW1_OE X_PCT | YAL049C | Yeast | 6823 | non-targeted |
| 1 | 69 | LW1_OE X_PCT | YCR059C | Yeast | 6870 | non-targeted |
| 1 | 70 | LW1_OE X_PCT | YDR035W | Yeast | 6910 | plastidic |
| 1 | 71 | LW1_OE X_PCT | YEL005C | Yeast | 7261 | non-targeted |
| 1 | 72 | LW1_OE X_PCT | YER112W | Yeast | 7265* | non-targeted |
| 1 | 73 | LW1_OE X_PCT | YER156C | Yeast | 7301 | non-targeted |
| 1 | 74 | LW1_OE X_PCT | YER173W | Yeast | 7384 | non-targeted |
| 1 | 75 | LW1_OE X_PCT | YGL045W | Yeast | 7407* | non-targeted |
| 1 | 76 | LW1_OE X_PCT | YGL189C | Yeast | 7429 | non-targeted |
| 1 | 77 | LW1_OE X_PCT | YNR015W | Yeast | 7558 | non-targeted |
| 1 | 78 | LW1_OE X_PCT | YOR024W | Yeast | 7606 | non-targeted |
| 1 | 79 | LW1_OE X_PCT | YOR168W | Yeast | 7610* | non-targeted |
| 1 | 80 | LW1_OE X_PCT | YPL151C | Yeast | 7685 | non-targeted |
| 1 | 81 | LW1_OE X_PCT | B1297 | E. coli | 1201* | plastidic |
| 1 | 82 | LW1_OE X_PCT | B0970 | E. coli | 7741 | non-targeted |
| 1 | 83 | LW1_OE X_PCT | B1829 | E. coli | 7850 | non-targeted |
| 1 | 84 | LW1_OE X_PCT | 82664 | E. coli | 7971* | non-targeted |
| 1 | 85 | LW1_OE X_PCT | B2796 | E. coli | 8021 | non-targeted |
| 1 | 86 | LW1_OE X_PCT | YER174C | Yeast | 8177 | non-targeted |
| 1 | 87 | LW1_OE X_PCT | YFR042W | Yeast | 8272 | non-targeted |
| 1 | 88 | LW1_OE X_PCT | YKR057W | Yeast | 8288 | non-targeted |
| 1 | 89 | LW1_OE X_PCT | B0629_2 | E. coli | 8438 | non-targeted |
| 1 | 90 | LW1_OE X_PCT | B1007_2 | E. coli | 8630 | non-targeted |
| 1 | 91 | LW1_OE X_PCT | B2715_2 | E. coli | 9268 | plastidic |
| 1 | 92 | LW1_OE X_PCT | B3899_2 | E. coli | 9444 | non-targeted |
| 1 | 93 | LW1_OE X_PCT | B4390_2 | E. coli | 9824 | non-targeted |
| 1 | 94 | LW1_OE X_PCT | YGL045W_2 | Yeast | 9905 | non-targeted |
| 1 | 95 | LW1_OE X_PCT | B2664_2 | E. coli | 9193 | non-targeted |
| 1 | 96 | LW1_OE X_PCT | B0963_2 | E. coli | 8497 | non-targeted |
| 1 | 97 | LW1_OE X_PCT | B1297_2 | E. coli | 8742 | plastidic |
| 1 | 98 | LW1_OE X_PCT | B1597_2 | E. coli | 8891 | non-targeted |
| 1 | 99 | LW1_OE X_PCT | B2027_2 | E. coli | 9031 | non-targeted |
| 1 | 100 | LW1_OE X_PCT | B2965_2 | E. coli | 9315 | plastidic |
| 1 | 101 | LW1_OE X_PCT | B4139_2 | E. coli | 9529 | plastidic |
| 1 | 102 | LW1_OE X_PCT | B0845_2 | E. coli | 8462 | non-targeted |
| 1 | 103 | LW1_OE X_PCT | B1901_2 | E. coli | 8973 | plastidic |
| 1 | 104 | LW1_OE X_PCT | YER112W_2 | Yeast | 9883 | non-targeted |
| 1 | 105 | LW1_OE X_PCT | B1798_2 | E. coli | 8934 | non-targeted |
| 1 | 106 | LW1_OE X_PCT | B2226_2 | E. coli | 9093 | non-targeted |
| 1 | 107 | LW1_OE X_PCT | B2469_2 | E. coli | 9109 | non-targeted |
| 1 | 108 | LW1_OE X_PCT | YOR168W_2 | Yeast | 9931 | non-targeted |
| 1 | 109 | LW1_OE X_PCT | B4321 | E. coli | 10096 | non-targeted |

| | 7. |
|---|---|
| Application | SEQ IDs of Nucleic Acid Homologs |
| 1 | 40, 42, 44, 46 |
| 1 | 56, 58, 60, 62 |
| 1 | 72, 74, 76, 78, 80 |
| 1 | 91, 93, 95, 97, 99, 101, 103, 105, 107, 109, 111, 113, 115, 117, |
| | 119, 121, 123, 125, 127, 129, 131, 133, 135, 137 |
| 1 | 145, 147, 149, 151 |
| 1 | 164, 166, 168, 170, 172, 174, 176, 178, 180, 182, 184, 186, 188, |
| | 190, 192, 194, 196, 198, 200, 202, 204, 206 |
| 1 | 215, 217, 219, 221, 223, 225, 227, 229, 231, 233, 235, 237, 239, |
| | 241, 243, 245, 247, 249, 251, 253, 255, 257, 259, 261, 263, 265, |
| | 267, 269, 271, 273, 275, 277, 279, 281, 283, 285, 287, 289, 291, |
| | 293, 295, 297, 299, 301, 303, 305, 307, 309, 311, 313, 315, 317, |
| | 319, 321, 323, 325, 327, 329, 331, 333, 335, 337, 339 |
| 1 | 360 |
| 1 | 369, 371, 373, 375, 377, 379, 381, 383, 385, 387, 389, 391, 393, |
| | 395, 397, 399, 401, 403, 405, 407, 409, 411 |
| 1 | 422, 424, 426, 428, 430, 432, 434, 436, 438, 440, 442 |
| 1 | 457, 459, 461, 463, 465, 467, 469, 471, 473, 475, 477, 479, 481, |
| | 483, 485, 487, 489, 491, 493, 495, 497, 499, 501, 503, 505, 507, |
| | 509, 511, 513, 515, 517, 519, 521, 523, 525, 527 |
| 1 | 537, 539, 541, 543, 545, 547, 549, 551, 553, 555, 557, 559, 561, |
| | 563, 565, 567, 569, 571, 573, 575, 577, 579, 581, 583, 585, 587, |
| | 589, 591, 593, 595, 597, 599, 601, 603, 605, 607, 609, 611 |
| 1 | 620, 622, 624, 626, 628, 630, 632, 634, 636, 638, 640, 642, 644, |
| | 646, 648, 650, 652, 654, 656, 658, 660, 662, 664 |
| 1 | 673, 675, 677, 679, 681, 683, 685, 687, 689, 691, 693, 695, 697, |
| | 699, 701, 703, 705, 707, 709, 711, 713, 715, 717, 719, 721, 723, |
| | 725, 727, 729, 731, 733, 735, 737, 739, 741, 743, 745, 747, 749, |
| | 751, 753, 755, 757 |
| 1 | — |
| 1 | 770, 772, 774, 776, 778, 780, 782, 784, 786, 788, 790, 792, 794, |
| | 796, 798, 800, 802, 804, 806, 808, 810, 812, 814, 816, 818, 820, |
| | 822, 824, 826, 828, 830, 832, 834, 836, 838, 840, 842, 844, 846, |
| | 848, 850, 852, 854, 856, 858, 860, 862, 864, 866, 868, 870, 872, |
| | 874, 876, 878, 880, 882, 884, 886, 888 |
| 1 | 909, 911, 913, 915, 917, 919, 921 |
| 1 | 929, 931, 933, 935, 937, 939, 941, 943, 945, 947, 949, 951, 953, |
| | 955, 957, 959, 961, 963, 965, 967, 969, 971, 973, 975, 977, 979, |
| | 981, 983, 985, 987, 989, 991, 993, 995 |
| 1 | 1011, 1013, 1015, 1017, 1019, 1021, 1023, 1025, 1027, 1029, |
| | 1031, 1033, 1035, 1037, 1039, 1041, 1043, 1045, 1047, 1049, |
| | 1051, 1053, 1055, 1057, 1059, 1061, 1063, 1065, 1067, 1069, |
| | 1071, 1073, 1075, 1077, 1079, 1081, 1083, 1085, 1087, 1089, |
| | 1091, 1093, 1095, 1097, 1099, 1101, 1103, 1105, 1107, 1109, |
| | 1111, 1113, 1115, 1117, 1119, 1121, 1123, 1125, 1127, 1129, |
| | 1131, 1133, 1135, 1137, 1139, 1141, 1143 |
| 1 | 1156, 1158, 1160, 1162, 1164, 1166, 1168, 1170, 1172, 1174, |
| | 1176, 1178, 1180, 1182, 1184, 1186 |
| 1 | 1310, 1312, 1314, 1316, 1318, 1320, 1322, 1324, 1326, 1328, |
| | 1330, 1332, 1334, 1336, 1338, 1340, 1342, 1344, 1346, 1348, |
| | 1350, 1352 |
| 1 | 1370 |
| 1 | 1376, 1378, 1380, 1382, 1384, 1386, 1388, 1390, 1392, 1394, |
| | 1396, 1398, 1400, 1402, 1404, 1406, 1408, 1410, 1412, 1414, |
| | 1416, 1418, 1420, 1422, 1424, 1426, 1428, 1430, 1432, 1434, |
| | 1436, 1438, 1440, 1442, 1444, 1446, 1448, 1450, 1452, 1454, |
| | 1456, 1458, 1460, 1462, 1464, 1466, 1468, 1470, 1472, 1474, |
| | 1476, 1478, 1480, 1482, 1484, 1486, 1488, 1490, 1492, 1494 |
| 1 | 1509, 1511, 1513, 1515, 1517, 1519, 1521, 1523, 1525, 1527, |
| | 1529, 1531, 1533, 1535, 1537, 1539, 1541, 1543, 1545, 1547, |
| | 1549, 1551, 1553, 1555, 1557, 1559, 1561, 1563, 1565, 1567, |
| | 1569, 1571, 1573, 1575, 1577, 1579, 1581, 1583, 1585, 1587, |
| | 1589, 1591, 1593, 1595, 1597, 1599, 1601, 1603, 1605, 1607, |
| | 1609, 1611, 1613, 1615, 1617, 1619, 1621, 1623, 1625, 1627, |
| | 1629, 1631, 1633, 1635, 1637, 1639, 1641, 1643, 1645, 1647, |
| | 1649, 1651, 1653, 1655, 1657, 1659, 1661, 1663, 1665, 1667, |
| | 1669, 1671, 1673, 1675, 1677, 1679, 1681, 1683, 1685, 1687, |
| | 1689, 1691, 1693, 1695, 1697, 1699, 1701, 1703, 1705, 1707, |
| | 1709, 1711, 1713, 1715, 1717, 1719, 1721, 1723, 1725, 1727, |
| | 1729, 1731, 1733, 1735, 1737, 1739, 1741, 1743, 1745, 1747, |
| | 1749, 1751, 1753, 1755, 1757, 1759, 1761, 1763, 1765, 1767, |
| | 1769, 1771, 1773, 1775, 1777, 1779, 1781, 1783, 1785, 1787, |
| | 1789, 1791, 1793, 1795, 1797, 1799, 1801, 1803, 1805, 1807, |
| | 1809, 1811, 1813, 1815, 1817, 1819, 1821, 1823, 1825, 1827, |
| | 1829, 1831, 1833, 1835, 1837, 1839, 1841, 1843, 1845, 1847, |
| | 1849, 1851, 1853, 1855, 1857, 1859, 1861, 1863, 1865, 1867, |
| | 1869, 1871, 1873, 1875, 1877, 1879, 1881, 1883, 1885, 1887, |
| | 1889, 1891, 1893, 1895, 1897, 1899, 1901, 1903, 1905, 1907, |
| | 1909, 1911, 1913, 1915, 1917, 1919, 1921, 1923, 1925, 1927, |
| | 1929, 1931, 1933, 1935, 1937, 1939 |
| 1 | 1955, 1957, 1959, 1961, 1963, 1965, 1967, 1969, 1971, 1973, |
| | 1975, 1977, 1979, 1981, 1983, 1985, 1987, 1989, 1991, 1993, |
| | 1995, 1997, 1999, 2001, 2003, 2005, 2007, 2009, 2011, 2013, |
| | 2015, 2017, 2019, 2021, 2023, 2025, 2027, 2029, 2031, 2033, |
| | 2035, 2037, 2039, 2041, 2043, 2045, 2047, 2049, 2051, 2053, |
| | 2055, 2057, 2059, 2061, 2063, 2065, 2067, 2069, 2071, 2073, |
| | 2075, 2077, 2079, 2081, 2083, 2085, 2087, 2089, 2091, 2093, |
| | 2095, 2097, 2099, 2101, 2103, 2105, 2107, 2109, 2111, 2113, |
| | 2115, 2117, 2119, 2121, 2123, 2125, 2127, 2129, 2131, 2133, |
| | 2135, 2137, 2139, 2141, 2143, 2145, 2147, 2149 |
| 1 | 2158, 2160, 2162, 2164, 2166, 2168, 2170, 2172, 2174, 2176, |
| | 2178, 2180, 2182, 2184, 2186 |
| 1 | 2197, 2199, 2201, 2203, 2205, 2207, 2209, 2211 |
| 1 | 2221, 2223, 2225, 2227, 2229, 2231, 2233, 2235, 2237, 2239, |
| | 2241, 2243, 2245, 2247, 2249, 2251, 2253, 2255, 2257, 2259, |
| | 2261, 2263, 2265, 2267 |
| 1 | 2279, 2281, 2283, 2285, 2287, 2289, 2291, 2293, 2295, 2297, |
| | 2299, 2301, 2303, 2305, 2307, 2309, 2311, 2313, 2315, 2317, |
| | 2319, 2321, 2323, 2325, 2327, 2329, 2331, 2333, 2335, 2337, |
| | 2339, 2341, 2343, 2345, 2347, 2349, 2351, 2353, 2355, 2357, |
| | 2359, 2361, 2363, 2365, 2367, 2369, 2371, 2373, 2375, 2377, |
| | 2379, 2381, 2383, 2385, 2387, 2389, 2391, 2393, 2395, 2397, |
| | 2399, 2401, 2403, 2405, 2407, 2409, 2411, 2413, 2415, 2417, |
| | 2419, 2421, 2423, 2425, 2427, 2429, 2431, 2433, 2435, 2437, |
| | 2439, 2441, 2443, 2445, 2447, 2449, 2451, 2453, 2455 |
| 1 | 2472, 2474, 2476, 2478, 2480 |
| 1 | 2495, 2497, 2499, 2501, 2503, 2505, 2507, 2509, 2511, 2513, |
| | 2515, 2517, 2519, 2521, 2523, 2525, 2527, 2529, 2531, 2533, |
| | 2535, 2537, 2539, 2541, 2543, 2545, 2547, 2549, 2551, 2553, |
| | 2555, 2557, 2559, 2561, 2563, 2565, 2567, 2569, 2571, 2573, |
| | 2575, 2577, 2579, 2581, 2583, 2585, 2587, 2589, 2591, 2593, |
| | 2595, 2597, 2599, 2601, 2603, 2605, 2607, 2609, 2611, 2613, |
| | 2615, 2617 |
| 1 | 2629, 2631, 2633, 2635, 2637, 2639, 2641, 2643, 2645, 2647, |
| | 2649, 2651, 2653, 2655, 2657, 2659, 2661, 2663, 2665, 2667, |
| | 2669, 2671, 2673, 2675, 2677, 2679, 2681, 2683, 2685, 2687, |
| | 2689, 2691, 2693, 2695, 2697, 2699, 2701, 2703, 2705, 2707, |
| | 2709, 2711, 2713, 2715, 2717, 2719, 2721, 2723, 2725, 2727, |
| | 2729, 2731, 2733, 2735, 2737, 2739, 2741, 2743, 2745, 2747, |
| | 2749, 2751, 2753, 2755, 2757, 2759, 2761, 2763, 2765, 2767, |
| | 2769, 2771, 2773, 2775, 2777, 2779, 2781, 2783, 2785, 2787, |
| | 2789, 2791, 2793, 2795, 2797, 2799, 2801, 2803, 2805, 2807, |
| | 2809, 2811, 2813, 2815, 2817, 2819, 2821, 2823, 2825, 2827, |
| | 2829, 2831, 2833, 2835, 2837, 2839, 2841, 2843, 2845 |
| 1 | 2860, 2862, 2864, 2866, 2868, 2870, 2872, 2874, 2876, 2878, |
| | 2880, 2882, 2884, 2886, 2888, 2890, 2892, 2894, 2896, 2898, |
| | 2900, 2902, 2904, 2906, 2908, 2910, 2912, 2914, 2916, 2918, |
| | 2920, 2922, 2924, 2926, 2928, 2930, 2932 |
| 1 | 2944, 2946, 2948, 2950, 2952, 2954, 2956 |
| 1 | 2967, 2969, 2971, 2973 |
| 1 | 2983, 2985, 2987, 2989, 2991, 2993, 2995, 2997, 2999, 3001, |
| | 3003, 3005, 3007, 3009, 3011, 3013, 3015, 3017, 3019, 3021, |
| | 3023, 3025, 3027, 3029, 3031, 3033, 3035, 3037, 3039, 3041, |
| | 3043, 3045, 3047, 3049, 3051, 3053, 3055, 3057, 3059, 3061, |
| | 3063, 3065, 3067, 3069, 3071, 3073, 3075, 3077, 3079, 3081, |
| | 3083, 3085, 3087, 3089, 3091, 3093, 3095, 3097, 3099, 3101, |
| | 3103, 3105, 3107, 3109, 3111, 3113, 3115, 3117, 3119 |
| 1 | 3132, 3134, 3136, 3138, 3140, 3142, 3144, 3146, 3148, 3150, |
| | 3152, 3154, 3156, 3158, 3160, 3162, 3164, 3166, 3168, 3170, |
| | 3172, 3174, 3176, 3178, 3180, 3182, 3184, 3186, 3188, 3190, |
| | 3192, 3194, 3196, 3198, 3200, 3202, 3204 |
| 1 | 3218, 3220, 3222, 3224, 3226, 3228, 3230, 3232, 3234, 3236, |
| | 3238, 3240, 3242, 3244, 3246, 3248, 3250, 3252, 3254, 3256, |
| | 3258, 3260, 3262, 3264, 3266, 3268, 3270, 3272, 3274, 3276, |
| | 3278, 3280, 3282, 3284, 3286, 3288, 3290, 3292, 3294, 3296, |
| | 3298, 3300, 3302, 3304, 3306, 3308, 3310, 3312, 3314, 3316, |
| | 3318, 3320, 3322, 3324, 3326 |
| 1 | 3337, 3339, 3341, 3343, 3345, 3347, 3349, 3351, 3353, 3355, |
| | 3357, 3359, 3361, 3363, 3365, 3367, 3369, 3371, 3373, 3375, |
| | 3377, 3379, 3381, 3383, 3385, 3387, 3389, 3391, 3393 |
| 1 | 3403, 3405, 3407, 3409, 3411, 3413, 3415, 3417, 3419, 3421, |
| | 3423, 3425, 3427, 3429, 3431, 3433, 3435, 3437, 3439, 3441, |
| | 3443, 3445, 3447, 3449, 3451, 3453, 3455, 3457, 3459, 3461, |
| | 3463, 3465, 3467, 3469, 3471, 3473, 3475, 3477, 3479, 3481, |
| | 3483, 3485, 3487, 3489, 3491, 3493, 3495, 3497, 3499, 3501, |
| | 3503, 3505, 3507, 3509, 3511, 3513, 3515, 3517, 3519, 3521, |
| | 3523, 3525, 3527, 3529, 3531, 3533, 3535, 3537, 3539, 3541, |
| | 3543, 3545, 3547, 3549, 3551, 3553 |
| 1 | 3592, 3594, 3596, 3598, 3600, 3602, 3604, 3606, 3608, 3610, |
| | 3612, 3614, 3616, 3618, 3620, 3622, 3624, 3626, 3628, 3630, |
| | 3632, 3634, 3636, 3638, 3640, 3642, 3644, 3646, 3648, 3650, |
| | 3652, 3654, 3656, 3658, 3660, 3662, 3664, 3666, 3668, 3670, |
| | 3672, 3674, 3676, 3678, 3680, 3682, 3684, 3686, 3688, 3690, |
| | 3692, 3694, 3696, 3698, 3700, 3702, 3704, 3706, 3708, 3710, |
| | 3712, 3714, 3716, 3718, 3720, 3722, 3724, 3726, 3728, 3730, |
| | 3732, 3734, 3736, 3738, 3740, 3742, 3744, 3746, 3748, 3750, |
| | 3752, 3754, 3756, 3758, 3760, 3762, 3764, 3766, 3768, 3770, |
| | 3772, 3774, 3776, 3778, 3780, 3782, 3784, 3786, 3788, 3790, |
| | 3792, 3794, 3796, 3798, 3800 |
| 1 | 3833, 3835, 3837, 3839, 3841, 3843, 3845, 3847, 3849, 3851 |
| 1 | — |
| 1 | 3863, 3865, 3867, 3869, 3871, 3873, 3875, 3877, 3879, 3881, |
| | 3883, 3885, 3887, 3889, 3891, 3893, 3895, 3897, 3899, 3901, |
| | 3903, 3905, 3907, 3909, 3911, 3913, 3915, 3917, 3919, 3921, |
| | 3923, 3925, 3927, 3929, 3931, 3933, 3935, 3937, 3939, 3941, |
| | 3943, 3945, 3947, 3949, 3951, 3953, 3955, 3957, 3959, 3961, |
| | 3963, 3965, 3967, 3969, 3971, 3973, 3975, 3977, 3979, 3981, |
| | 3983, 3985, 3987, 3989, 3991, 3993, 3995, 3997, 3999, 4001, |
| | 4003, 4005, 4007, 4009, 4011, 4013 |
| 1 | 4024, 4026, 4028, 4030, 4032, 4034, 4036, 4038, 4040, 4042, |
| | 4044, 4046, 4048 |
| 1 | 4061, 4063, 4065, 4067, 4069 |
| 1 | 4078, 4080, 4082, 4084, 4086, 4088, 4090, 4092, 4094, 4096, |
| | 4098, 4100, 4102, 4104, 4106, 4108, 4110, 4112, 4114, 4116, |
| | 4118, 4120, 4122, 4124, 4126, 4128, 4130, 4132, 4134, 4136, |
| | 4138, 4140, 4142, 4144, 4146 |
| 1 | 4159, 4161, 4163, 4165, 4167, 4169, 4171, 4173, 4175, 4177, |
| | 4179, 4181, 4183, 4185, 4187, 4189, 4191, 4193, 4195, 4197, |
| | 4199, 4201, 4203, 4205, 4207, 4209, 4211, 4213, 4215, 4217, |
| | 4219, 4221, 4223, 4225, 4227, 4229, 4231, 4233, 4235, 4237, |
| | 4239, 4241, 4243, 4245, 4247, 4249, 4251, 4253 |
| 1 | 4262, 4264, 4266, 4268, 4270, 4272, 4274, 4276, 4278, 4280, |
| | 4282, 4284, 4286, 4288, 4290, 4292, 4294, 4296, 4298, 4300, |
| | 4302, 4304, 4306, 4308, 4310, 4312, 4314, 4316, 4318, 4320, |
| | 4322, 4324, 4326, 4328, 4330 |
| 1 | 4352, 4354, 4356, 4358, 4360, 4362, 4364, 4366, 4368, 4370, |
| | 4372, 4374, 4376, 4378, 4380, 4382, 4384, 4386, 4388, 4390, |
| | 4392, 4394, 4396, 4398, 4400, 4402, 4404, 4406, 4408, 4410, |
| | 4412, 4414, 4416, 4418, 4420, 4422, 4424, 4426, 4428, 4430, |
| | 4432, 4434, 4436, 4438, 4440, 4442, 4444, 4446, 4448 |
| 1 | 4352, 4354, 4356, 4358, 4360, 4362, 4364, 4366, 4368, 4370, |
| | 4372, 4374, 4376, 4378, 4380, 4382, 4384, 4386, 4388, 4390, |
| | 4392, 4394, 4396, 4398, 4400, 4402, 4404, 4406, 4408, 4410, |
| | 4412, 4414, 4416, 4418, 4420, 4422, 4424, 4426, 4428, 4430, |
| | 4432, 4434, 4436, 4438, 4440, 4442, 4444, 4446, 4448 |
| 1 | 4461, 4463, 4465, 4467, 4469, 4471, 4473, 4475, 4477, 4479, |
| | 4481, 4483, 4485, 4487, 4489, 4491, 4493 |
| 1 | 4507, 4509, 4511, 4513, 4515, 4517, 4519, 4521, 4523, 4525, |
| | 4527, 4529, 4531, 4533, 4535, 4537, 4539, 4541, 4543, 4545, |
| | 4547, 4549, 4551, 4553, 4555, 4557, 4559, 4561, 4563, 4565, |
| | 4567, 4569, 4571, 4573, 4575, 4577, 4579, 4581, 4583, 4585, |
| | 4587, 4589, 4591, 4593, 4595, 4597 |
| 1 | 4642, 4644, 4646, 4648, 4650, 4652, 4654, 4656, 4658, 4660, |
| | 4662, 4664, 4666, 4668, 4670, 4672, 4674, 4676, 4678, 4680, |
| | 4682, 4684, 4686, 4688, 4690, 4692, 4694, 4696, 4698, 4700, |
| | 4702, 4704, 4706, 4708, 4710, 4712, 4714, 4716, 4718, 4720, |
| | 4722, 4724, 4726, 4728, 4730, 4732, 4734, 4736, 4738, 4740, |
| | 4742, 4744, 4746, 4748, 4750, 4752, 4754, 4756, 4758, 4760, |
| | 4762, 4764, 4766, 4768, 4770, 4772, 4774, 4776, 4778, 4780, |
| | 4782, 4784, 4786, 4788, 4790, 4792, 4794, 4796 |
| 1 | 4808, 4810, 4812, 4814, 4816, 4818, 4820, 4822, 4824, 4826, |
| | 4828, 4830, 4832, 4834, 4836, 4838, 4840, 4842, 4844, 4846, |
| | 4848, 4850, 4852, 4854, 4856, 4858, 4860, 4862, 4864, 4866, |
| | 4868, 4870, 4872, 4874, 4876, 4878, 4880, 4882, 4884, 4886, |
| | 4888, 4890, 4892, 4894, 4896, 4898, 4900, 4902, 4904, 4906, |
| | 4908, 4910, 4912, 4914, 4916, 4918, 4920, 4922, 4924, 4926, |
| | 4928, 4930, 4932, 4934, 4936, 4938, 4940, 4942, 4944, 4946, |
| | 4948, 4950, 4952, 4954, 4956, 4958, 4960, 4962, 4964, 4966, |
| | 4968, 4970, 4972, 4974, 4976, 4978, 4980, 4982, 4984, 4986, |
| | 4988, 4990, 4992, 4994, 4996, 4998, 5000, 5002, 5004, 5006, |
| | 5008, 5010, 5012, 5014, 5016, 5018, 5020, 5022, 5024, 5026, |
| | 5028, 5030, 5032, 5034, 5036, 5038, 5040, 5042, 5044, 5046, |
| | 5048, 5050, 5052, 5054, 5056, 5058, 5060, 5062, 5064, 5066, |
| | 5068, 5070, 5072, 5074, 5076, 5078, 5080, 5082, 5084, 5086, |
| | 5088, 5090, 5092, 5094, 5096, 5098, 5100, 5102, 5104, 5106, |
| | 5108, 5110, 5112, 5114, 5116 |
| 1 | 5126, 5128, 5130, 5132, 5134, 5136, 5138, 5140, 5142, 5144, |
| | 5146, 5148, 5150, 5152, 5154, 5156, 5158, 5160, 5162, 5164, |
| | 5166, 5168, 5170, 5172, 5174, 5176, 5178, 5180, 5182, 5184, |
| | 5186, 5188, 5190, 5192, 5194, 5196, 5198, 5200, 5202, 5204, |
| | 5206, 5208, 5210, 5212, 5214, 5216, 5218, 5220, 5222, 5224, |
| | 5226, 5228, 5230, 5232, 5234, 5236, 5238, 5240, 5242, 5244, |
| | 5246, 5248, 5250, 5252, 5254, 5256, 5258, 5260, 5262, 5264, |
| | 5266, 5268, 5270, 5272, 5274, 5276, 5278, 5280, 5282, 5284, |
| | 5286, 5288, 5290, 5292, 5294, 5296, 5298, 5300, 5302, 5304, |
| | 5306, 5308, 5310, 5312, 5314, 5316, 5318, 5320, 5322, 5324, |
| | 5326, 5328, 5330, 5332, 5334, 5336, 5338, 5340, 5342 |
| 1 | 5126, 5128, 5130, 5132, 5134, 5136, 5138, 5140, 5142, 5144, |
| | 5146, 5148, 5150, 5152, 5154, 5156, 5158, 5160, 5162, 5164, |
| | 5166, 5168, 5170, 5172, 5174, 5176, 5178, 5180, 5182, 5184, |
| | 5186, 5188, 5190, 5192, 5194, 5196, 5198, 5200, 5202, 5204, |
| | 5206, 5208, 5210, 5212, 5214, 5216, 5218, 5220, 5222, 5224, |
| | 5226, 5228, 5230, 5232, 5234, 5236, 5238, 5240, 5242, 5244, |
| | 5246, 5248, 5250, 5252, 5254, 5256, 5258, 5260, 5262, 5264, |
| | 5266, 5268, 5270, 5272, 5274, 5276, 5278, 5280, 5282, 5284, |
| | 5286, 5288, 5290, 5292, 5294, 5296, 5298, 5300, 5302, 5304, |
| | 5306, 5308, 5310, 5312, 5314, 5316, 5318, 5320, 5322, 5324, |
| | 5326, 5328, 5330, 5332, 5334, 5336, 5338, 5340, 5342 |
| 1 | 5419, 5421, 5423, 5425, 5427, 5429, 5431, 5433, 5435, 5437, |
| | 5439, 5441, 5443, 5445, 5447, 5449, 5451, 5453, 5455, 5457, |
| | 5459, 5461, 5463, 5465, 5467, 5469, 5471, 5473, 5475, 5477, |
| | 5479, 5481, 5483, 5485, 5487 |
| 1 | 5497, 5499, 5501, 5503, 5505, 5507, 5509, 5511, 5513, 5515, |
| | 5517, 5519, 5521, 5523, 5525, 5527, 5529, 5531, 5533, 5535, |
| | 5537, 5539, 5541, 5543, 5545, 5547, 5549, 5551, 5553, 5555, |
| | 5557, 5559, 5561, 5563, 5565, 5567, 5569, 5571, 5573, 5575, |
| | 5577 |
| 1 | 5587, 5589, 5591, 5593, 5595, 5597, 5599, 5601, 5603, 5605, |
| | 5607, 5609, 5611, 5613, 5615, 5617, 5619, 5621, 5623, 5625, |
| | 5627, 5629, 5631, 5633, 5635, 5637, 5639, 5641, 5643, 5645, |
| | 5647, 5649, 5651, 5653, 5655, 5657, 5659, 5661, 5663, 5665, |
| | 5667, 5669, 5671, 5673, 5675, 5677, 5679, 5681, 5683, 5685, |
| | 5687, 5689, 5691, 5693, 5695, 5697, 5699, 5701, 5703, 5705, |
| | 5707, 5709, 5711, 5713, 5715, 5717, 5719, 5721, 5723, 5725, |
| | 5727, 5729, 5731, 5733, 5735, 5737, 5739, 5741, 5743, 5745, |
| | 5747, 5749, 5751, 5753, 5755, 5757, 5759, 5761, 5763, 5765, |
| | 5767, 5769, 5771, 5773, 5775 |
| 1 | 5802, 5804, 5806, 5808, 5810, 5812, 5814, 5816, 5818, 5820, |
| | 5822, 5824, 5826, 5828, 5830, 5832, 5834, 5836, 5838, 5840, |
| | 5842 |
| 1 | 5852, 5854, 5856, 5858, 5860, 5862, 5864, 5866, 5868, 5870, |
| | 5872, 5874, 5876, 5878, 5880, 5882, 5884, 5886, 5888, 5890, |
| | 5892, 5894, 5896, 5898, 5900, 5902, 5904, 5906, 5908, 5910, |
| | 5912, 5914, 5916, 5918, 5920, 5922, 5924, 5926, 5928, 5930, |
| | 5932, 5934, 5936, 5938, 5940, 5942, 5944, 5946, 5948, 5950, |
| | 5952, 5954, 5956, 5958, 5960, 5962, 5964, 5966, 5968, 5970, |
| | 5972, 5974, 5976, 5978, 5980 |
| 1 | 5994 |
| 1 | 6001, 6003, 6005, 6007, 6009, 6011, 6013, 6015, 6017, 6019, |
| | 6021, 6023, 6025, 6027, 6029, 6031, 6033, 6035, 6037, 6039 |
| 1 | 6058, 6060, 6062, 6064, 6066, 6068, 6070, 6072, 6074, 6076, |
| | 6078, 6080, 6082, 6084, 6086, 6088, 6090, 6092, 6094, 6096, |
| | 6098, 6100, 6102, 6104, 6106, 6108, 6110, 6112, 6114, 6116, |
| | 6118, 6120, 6122, 6124, 6126, 6128, 6130, 6132, 6134, 6136, |
| | 6138, 6140, 6142, 6144, 6146, 6148, 6150, 6152, 6154, 6156, |
| | 6158, 6160, 6162, 6164, 6166, 6168, 6170, 6172, 6174, 6176, |
| | 6178, 6180, 6182, 6184, 6186, 6188, 6190, 6192, 6194, 6196, |
| | 6198, 6200, 6202, 6204, 6206, 6208, 6210, 6212, 6214, 6216, |
| | 6218, 6220, 6222, 6224, 6226, 6228, 6230, 6232, 6234, 6236, |
| | 6238, 6240, 6242, 6244, 6246, 6248, 6250, 6252, 6254, 6256, |
| | 6258, 6260, 6262, 6264, 6266, 6268, 6270, 6272, 6274, 6276, |
| | 6278, 6280, 6282, 6284, 6286, 6288, 6290, 6292, 6294, 6296, |
| | 6298, 6300, 6302, 6304, 6306, 6308, 6310, 6312, 6314, 6316, |
| | 6318, 6320, 6322, 6324, 6326, 6328, 6330, 6332, 6334, 6336, |
| | 6338, 6340, 6342, 6344, 6346, 6348, 6350, 6352, 6354, 6356, |
| | 6358, 6360, 6362, 6364, 6366, 6368, 6370, 6372, 6374, 6376, |
| | 6378, 6380, 6382, 6384, 6386, 6388, 6390, 6392, 6394, 6396, |
| | 6398, 6400, 6402, 6404, 6406, 6408, 6410, 6412, 6414, 6416, |
| | 6418, 6420, 6422, 6424, 6426, 6428, 6430, 6432, 6434, 6436, |
| | 6438, 6440, 6442, 6444, 6446, 6448, 6450, 6452, 6454, 6456, |
| | 6458, 6460, 6462, 6464, 6466, 6468, 6470, 6472 |
| 1 | 6502, 6504, 6506, 6508, 6510, 6512, 6514, 6516, 6518, 6520, |
| | 6522, 6524, 6526, 6528 |
| 1 | 6544, 6546, 6548, 6550, 6552, 6554, 6556, 6558, 6560, 6562, |
| | 6564, 6566, 6568, 6570, 6572, 6574, 6576, 6578, 6580, 6582, |
| | 6584, 6586, 6588, 6590, 6592, 6594, 6596, 6598, 6600, 6602, |
| | 6604, 6606, 6608, 6610, 6612, 6614, 6616, 6618, 6620, 6622, |
| | 6624, 6626, 6628, 6630, 6632, 6634, 6636, 6638, 6640, 6642, |
| | 6644, 6646, 6648, 6650, 6652, 6654, 6656, 6658, 6660, 6662, |
| | 6664, 6666, 6668, 6670, 6672, 6674, 6676, 6678, 6680, 6682, |
| | 6684, 6686, 6688, 6690, 6692, 6694, 6696, 6698, 6700, 6702, |
| | 6704, 6706, 6708, 6710, 6712, 6714, 6716, 6718, 6720, 6722, |
| | 6724, 6726, 6728, 6730, 6732, 6734, 6736, 6738, 6740, 6742, |
| | 6744, 6746, 6748, 6750, 6752, 6754, 6756, 6758, 6760, 6762, |
| | 6764, 6766, 6768, 6770, 6772, 6774, 6776, 6778, 6780, 6782, |
| | 6784, 6786, 6788, 6790, 6792, 6794, 6796, 6798, 6800, 6802, |
| | 6804, 6806, 6808, 6810 |
| 1 | 6825, 6827, 6829, 6831, 6833, 6835, 6837, 6839, 6841, 6843, |
| | 6845, 6847, 6849, 6851, 6853, 6855, 6857, 6859, 6861 |
| 1 | 6872, 6874, 6876, 6878, 6880, 6882, 6884, 6886, 6888, 6890, |
| | 6892, 6894, 6896, 6898, 6900 |
| 1 | 6912, 6914, 6916, 6918, 6920, 6922, 6924, 6926, 6928, 6930, |
| | 6932, 6934, 6936, 6938, 6940, 6942, 6944, 6946, 6948, 6950, |
| | 6952, 6954, 6956, 6958, 6960, 6962, 6964, 6966, 6968, 6970, |
| | 6972, 6974, 6976, 6978, 6980, 6982, 6984, 6986, 6988, 6990, |
| | 6992, 6994, 6996, 6998, 7000, 7002, 7004, 7006, 7008, 7010, |
| | 7012, 7014, 7016, 7018, 7020, 7022, 7024, 7026, 7028, 7030, |
| | 7032, 7034, 7036, 7038, 7040, 7042, 7044, 7046, 7048, 7050, |
| | 7052, 7054, 7056, 7058, 7060, 7062, 7064, 7066, 7068, 7070, |
| | 7072, 7074, 7076, 7078, 7080, 7082, 7084, 7086, 7088, 7090, |
| | 7092, 7094, 7096, 7098, 7100, 7102, 7104, 7106, 7108, 7110, |
| | 7112, 7114, 7116, 7118, 7120, 7122, 7124, 7126, 7128, 7130, |
| | 7132, 7134, 7136, 7138, 7140, 7142, 7144, 7146, 7148, 7150, |
| | 7152, 7154, 7156, 7158, 7160, 7162, 7164, 7166, 7168, 7170, |
| | 7172, 7174, 7176, 7178, 7180, 7182, 7184, 7186, 7188, 7190, |
| | 7192, 7194, 7196, 7198, 7200, 7202, 7204, 7206, 7208, 7210, |
| | 7212, 7214, 7216, 7218, 7220, 7222, 7224, 7226, 7228, 7230, |
| | 7232, 7234, 7236, 7238, 7240, 7242, 7244, 7246, 7248 |
| 1 | — |
| 1 | 7267 |
| 1 | 7303, 7305, 7307, 7309, 7311, 7313, 7315, 7317, 7319, 7321, |
| | 7323, 7325, 7327, 7329, 7331, 7333, 7335, 7337, 7339, 7341, |
| | 7343, 7345, 7347, 7349, 7351, 7353, 7355, 7357, 7359, 7361, |
| | 7363, 7365, 7367 |
| 1 | 7386, 7388, 7390, 7392 |
| 1 | 7409, 7411, 7413, 7415 |
| 1 | 7431, 7433, 7435, 7437, 7439, 7441, 7443, 7445, 7447, 7449, |
| | 7451, 7453, 7455, 7457, 7459, 7461, 7463, 7465, 7467, 7469, |
| | 7471, 7473, 7475, 7477, 7479, 7481, 7483, 7485 |
| 1 | 7560, 7562, 7564, 7566, 7568, 7570, 7572, 7574, 7576, 7578, |
| | 7580, 7582, 7584, 7586, 7588, 7590, 7592 |
| 1 | — |
| 1 | 7612, 7614, 7616, 7618, 7620, 7622, 7624, 7626, 7628, 7630, |
| | 7632, 7634, 7636, 7638, 7640, 7642, 7644, 7646, 7648, 7650 |
| 1 | 7687, 7689, 7691, 7693, 7695, 7697, 7699, 7701, 7703, 7705, |
| | 7707, 7709, 7711, 7713, 7715, 7717, 7719, 7721, 7723, 7725 |
| 1 | 1203, 1205, 1207, 1210, 1212, 1214, 1216, 1218, 1220, 1222, |
| | 1224, 1226, 1228, 1230, 1232, 1234, 1236, 1238, 1240, 1242, |
| | 1244, 1246, 1248, 1250, 1252, 1254, 1256, 1258, 1260, 1262, |
| | 1264, 1266, 1268, 1270, 1272, 1274, 1276, 1278, 1280, 1282, |
| | 1284, 1286, 1288, 1290, 1292, 1294, 1296 |
| 1 | 7743, 7745, 7747, 7749, 7751, 7753, 7755, 7757, 7759, 7761, |
| | 7763, 7765, 7767, 7769, 7771, 7773, 7775, 7777, 7779, 7781, |
| | 7783, 7785, 7787, 7789, 7791, 7793, 7795, 7797, 7799, 7801, |
| | 7803, 7805, 7807, 7809, 7811, 7813, 7815, 7817, 7819, 7821, |
| | 7823, 7825, 7827, 7829, 7831, 7833, 7835, 7837, 7839, 7841 |
| 1 | 7852, 7854, 7856, 7858, 7860, 7862, 7864, 7866, 7868, 7870, |
| | 7872, 7874, 7876, 7878, 7880, 7882, 7884, 7886, 7888, 7890, |
| | 7892, 7894, 7896, 7898, 7900, 7902, 7904, 7906, 7908, 7910, |
| | 7912, 7914, 7916, 7918, 7920, 7922, 7924, 7926, 7928, 7930, |
| | 7932, 7934, 7936, 7938, 7940, 7942, 7944, 7946, 7948, 7950, |
| | 7952, 7954, 7956, 7958, 7960 |
| 1 | 7973, 7975, 7977, 7979, 7981, 7983, 7985, 7987, 7989, 7991, |
| | 7993, 7995, 7997, 7999, 8001, 8003, 8005, 8007, 8009, 8011, |
| | 8013 |
| 1 | 8023, 8025, 8027, 8029, 8031, 8033, 8035, 8037, 8039, 8041, |
| | 8043, 8045, 8047, 8049, 8051, 8053, 8055, 8057, 8059, 8061, |
| | 8063, 8065, 8067, 8069, 8071, 8073, 8075, 8077, 8079, 8081, |
| | 8083, 8085, 8087, 8089, 8091, 8093, 8095, 8097, 8099, 8101, |
| | 8103, 8105, 8107, 8109, 8111, 8113, 8115, 8117, 8119, 8121, |
| | 8123, 8125, 8127, 8129, 8131, 8133, 8135, 8137, 8139, 8141, |
| | 8143, 8145, 8147, 8149, 8151, 8153, 8155, 8157, 8159, 8161, |
| | 8163, 8165 |
| 1 | 8179, 8181, 8183, 8185, 8187, 8189, 8191, 8193, 8195, 8197, |
| | 8199, 8201, 8203, 8205, 8207, 8209, 8211, 8213, 8215, 8217, |
| | 8219, 8221, 8223, 8225, 8227, 8229, 8231 |
| 1 | 8274, 8276, 8278, 8280 |
| 1 | 8290, 8292, 8294, 8296, 8298, 8300, 8302, 8304, 8306, 8308, |
| | 8310, 8312, 8314, 8316, 8318, 8320, 8322, 8324, 8326, 8328, |
| | 8330, 8332, 8334, 8336, 8338, 8340, 8342, 8344, 8346, 8348, |
| | 8350, 8352, 8354, 8356, 8358, 8360, 8362, 8364, 8366, 8368, |
| | 8370, 8372, 8374, 8376 |
| 1 | 8440, 8442, 8444, 8446, 8448, 8450 |
| 1 | 8632, 8634, 8636, 8638, 8640, 8642, 8644, 8646, 8648, 8650, |
| | 8652, 8654, 8656, 8658, 8660, 8662, 8664, 8666, 8668, 8670, |
| | 8672, 8674, 8676, 8678, 8680, 8682, 8684, 8686, 8688, 8690, |
| | 8692, 8694, 8696, 8698, 8700, 8702, 8704, 8706, 8708, 8710, |
| | 8712, 8714, 8716, 8718, 8720, 8722, 8724, 8726, 8728, 8730, |
| | 8732, 8734, 8736 |
| 1 | 9270, 9272, 9274, 9276, 9278, 9280, 9282, 9284, 9286, 9288, |
| | 9290, 9292, 9294, 9296, 9298, 9300, 9302, 9304 |
| 1 | 9446, 9448, 9450, 9452, 9454, 9456, 9458, 9460, 9462, 9464, |
| | 9466, 9468, 9470, 9472, 9474, 9476, 9478, 9480, 9482, 9484, |
| | 9486, 9488, 9490, 9492, 9494, 9496, 9498, 9500, 9502, 9504, |
| | 9506, 9508, 9510, 9512, 9514, 9516, 9518, 9520, 9522 |
| 1 | 9826, 9828, 9830, 9832, 9834, 9836, 9838, 9840, 9842, 9844, |
| | 9846, 9848, 9850, 9852, 9854, 9856, 9858, 9860, 9862, 9864, |
| | 9866, 9868 |
| 1 | 9907, 9909, 9911, 9913, 9915, 9917, 9919, 9921, 9923 |
| 1 | 9195, 9197, 9199, 9201, 9203, 9205, 9207, 9209, 9211, 9213, |
| | 9215, 9217, 9219, 9221, 9223, 9225, 9227, 9229, 9231, 9233, |
| | 9235, 9237, 9239, 9241, 9243, 9245, 9247, 9249, 9251, 9253, |
| | 9255, 9257, 9259, 9261 |
| 1 | 8499, 8501, 8503, 8505, 8507, 8509, 8511, 8513, 8515, 8517, |
| | 8519, 8521, 8523, 8525, 8527, 8529, 8531, 8533, 8535, 8537, |
| | 8539, 8541, 8543, 8545, 8547, 8549, 8551, 8553, 8555, 8557, |
| | 8559, 8561, 8563, 8565, 8567, 8569, 8571, 8573, 8575, 8577, |
| | 8579, 8581, 8583, 8585, 8587, 8589, 8591, 8593, 8595, 8597, |
| | 8599, 8601, 8603, 8605, 8607, 8609, 8611, 8613, 8615, 8617, |
| | 8619, 8621, 8623 |
| 1 | 8744, 8746, 8748, 8750, 8752, 8754, 8756, 8758, 8760, 8762, |
| | 8764, 8766, 8768, 8770, 8772, 8774, 8776, 8778, 8780, 8782, |
| | 8784, 8786, 8788, 8790, 8792, 8794, 8796, 8798, 8800, 8802, |
| | 8804, 8806, 8808, 8810, 8812, 8814, 8816, 8818, 8820, 8822, |
| | 8824, 8826, 8828, 8830, 8832, 8834, 8836, 8838, 8840, 8842, |
| | 8844, 8846, 8848, 8850, 8852, 8854, 8856, 8858, 8860, 8862, |
| | 8864, 8866, 8868, 8870, 8872, 8874, 8876, 8878, 8880, 8882 |
| 1 | 8893, 8895, 8897, 8899, 8901, 8903, 8905, 8907, 8909, 8911, |
| | 8913, 8915, 8917, 8919, 8921, 8923, 8925, 8927 |
| 1 | 9033, 9035, 9037, 9039, 9041, 9043, 9045, 9047, 9049, 9051, |
| | 9053, 9055, 9057, 9059, 9061, 9063, 9065, 9067, 9069, 9071, |
| | 9073, 9075, 9077, 9079, 9081, 9083, 9085 |
| 1 | 9317, 9319, 9321, 9323, 9325, 9327, 9329, 9331, 9333, 9335, |
| | 9337, 9339, 9341, 9343, 9345, 9347, 9349, 9351, 9353, 9355, |
| | 9357, 9359, 9361, 9363, 9365, 9367, 9369, 9371, 9373, 9375, |
| | 9377, 9379, 9381, 9383, 9385, 9387, 9389, 9391, 9393, 9395, |
| | 9397, 9399, 9401, 9403, 9405, 9407, 9409, 9411, 9413, 9415, |
| | 9417, 9419, 9421, 9423, 9425, 9427, 9429 |
| 1 | 9531, 9533, 9535, 9537, 9539, 9541, 9543, 9545, 9547, 9549, |
| | 9551, 9553, 9555, 9557, 9559, 9561, 9563, 9565, 9567, 9569, |
| | 9571, 9573, 9575, 9577, 9579, 9581, 9583, 9585, 9587, 9589, |
| | 9591, 9593, 9595, 9597, 9599, 9601, 9603, 9605, 9607, 9609, |
| | 9611, 9613, 9615, 9617, 9619, 9621, 9623, 9625, 9627, 9629, |
| | 9631, 9633, 9635, 9637, 9639, 9641, 9643, 9645, 9647, 9649, |
| | 9651, 9653, 9655, 9657, 9659, 9661, 9663, 9665, 9667, 9669, |
| | 9671, 9673, 9675, 9677, 9679, 9681, 9683, 9685, 9687, 9689, |
| | 9691, 9693, 9695, 9697, 9699, 9701, 9703, 9705, 9707, 9709, |
| | 9711, 9713, 9715, 9717, 9719, 9721, 9723, 9725, 9727, 9729, |
| | 9731, 9733, 9735, 9737, 9739, 9741, 9743, 9745, 9747, 9749, |
| | 9751, 9753, 9755, 9757, 9759, 9761, 9763, 9765, 9767, 9769, |
| | 9771, 9773, 9775, 9777, 9779, 9781, 9783, 9785, 9787, 9789, |
| | 9791, 9793, 9795, 9797, 9799, 9801, 9803 |
| 1 | 8464, 8466, 8468, 8470, 8472, 8474, 8476, 8478, 8480, 8482, |
| | 8484 |
| 1 | 8975, 8977, 8979, 8981, 8983, 8985, 8987, 8989, 8991, 8993, |
| | 8995, 8997, 8999, 9001, 9003, 9005, 9007, 9009, 9011, 9013, |
| | 9015, 9017, 9019, 9021 |
| 1 | 9885 |
| 1 | 8936, 8938, 8940, 8942, 8944, 8946, 8948, 8950, 8952, 8954, |
| | 8956, 8958, 8960, 8962, 8964 |
| 1 | 9095, 9097, 9099, 9101 |
| 1 | 9111, 9113, 9115, 9117, 9119, 9121, 9123, 9125, 9127, 9129, |
| | 9131, 9133, 9135, 9137, 9139, 9141, 9143, 9145, 9147, 9149, |
| | 9151, 9153, 9155, 9157, 9159, 9161, 9163, 9165, 9167, 9169, |
| | 9171, 9173, 9175, 9177, 9179, 9181 |
| 1 | 9933, 9935, 9937, 9939, 9941, 9943, 9945, 9947, 9949, 9951, |
| | 9953, 9955, 9957, 9959, 9961, 9963, 9965, 9967, 9969, 9971 |
| 1 | 10098, 10100, 10102, 10104, 10106, 10108, 10110, 10112, |
| | 10114, 10116, 10118, 10120, 10122, 10124, 10126, 10128, |
| | 10130, 10132, 10134, 10136, 10138, 10140, 10142, 10144, |
| | 10146, 10148, 10150, 10152, 10154, 10156, 10158, 10160, |
| | 10162, 10164, 10166, 10168, 10170, 10172, 10174, 10176, |
| | 10178, 10180, 10182, 10184, 10186, 10188, 10190, 10192, |
| | 10194, 10196, 10198, 10200, 10202, 10204, 10206, 10208, |
| | 10210, 10212, 10214, 10216, 10218, 10220, 10222, 10224, |
| | 10226, 10228, 10230, 10232, 10234, 10236, 10238, 10240, |
| | 10242, 10244, 10246, 10248 |

*Sequences marked with asterisk * reflect the respective sequence derived from public data bases information

TABLE IB
Nucleic acid sequence ID numbers

| Ap- | | | | 4. | 5. | | |
|---|---|---|---|---|---|---|---|
| plica- | 1. | 2. | 3. | Organ- | Lead | 6. | 7. |
| tion | Hit | Project | Locus | ism | SEQ ID | Target | SEQ IDs of Nucleic Acid Homologs |
| 1 | 1 | LW1_OEX_PCT | B0081 | E. coli | 38 | non-targeted | — |
| 1 | 2 | LW1_OEX_PCT | B0445 | E. coli | 54 | non-targeted | — |
| 1 | 3 | LW1_OEX_PCT | B0482 | E. coli | 70 | non-targeted | — |
| 1 | 4 | LW1_OEX_PCT | B0607 | E. coli | 89 | non-targeted | — |
| 1 | 5 | LW1_OEX_PCT | B0629 | E. coli | 143* | non-targeted | — |
| 1 | 6 | LW1_OEX_PCT | B0631 | E. coli | 162 | non-targeted | — |
| 1 | 7 | LW1_OEX_PCT | B0697 | E. coli | 213 | non-targeted | — |
| 1 | 8 | LW1_OEX_PCT | B0753 | E. coli | 358 | non-targeted | — |
| 1 | 9 | LW1_OEX_PCT | B0813 | E. coli | 367 | non-targeted | — |
| 1 | 10 | LW1_OEX_PCT | B0845 | E. coli | 420* | non-targeted | — |
| 1 | 11 | LW1_OEX_PCT | B0866 | E. coli | 455 | non-targeted | — |
| 1 | 12 | LW1_OEX_PCT | B0963 | E. coli | 535* | non-targeted | — |
| 1 | 13 | LW1_OEX_PCT | B0975 | E. coli | 618 | non-targeted | — |
| 1 | 14 | LW1_OEX_PCT | B1007 | E. coli | 671* | non-targeted | — |
| 1 | 15 | LW1_OEX_PCT | B1052 | E. coli | 764 | non-targeted | — |
| 1 | 16 | LW1_OEX_PCT | B1091 | E. coli | 768 | plastidic | 890, 892, 894 |
| 1 | 17 | LW1_OEX_PCT | B1161 | E. coli | 907 | non-targeted | — |
| 1 | 18 | LW1_OEX_PCT | B1186 | E. coli | 927 | non-targeted | — |
| 1 | 19 | LW1_OEX_PCT | B1291 | E. coli | 1009 | plastidic | — |
| 1 | 20 | LW1_OEX_PCT | B1294 | E. coli | 1154 | plastidic | — |
| 1 | 21 | LW1_OEX_PCT | B1423 | E. coli | 1308 | non-targeted | — |
| 1 | 22 | LW1_OEX_PCT | B1597 | E. coli | 1368* | non-targeted | — |
| 1 | 23 | LW1_OEX_PCT | B1605 | E. coli | 1374 | non-targeted | — |
| 1 | 24 | LW1_OEX_PCT | B1704 | E. coli | 1507 | non-targeted | — |
| 1 | 25 | LW1_OEX_PCT | B1736 | E. coli | 1953 | plastidic | — |
| 1 | 26 | LW1_OEX_PCT | B1798 | E. coli | 2156* | non-targeted | — |
| 1 | 27 | LW1_OEX_PCT | B1878 | E. coli | 2195 | non-targeted | — |
| 1 | 28 | LW1_OEX_PCT | B1901 | E. coli | 2219* | plastidic | — |
| 1 | 29 | LW1_OEX_PCT | B1912 | E. coli | 2277 | plastidic | 2457, 2459, 2461, 10012 |
| 1 | 30 | LW1_OEX_PCT | B2027 | E. coli | 2470* | non-targeted | — |
| 1 | 31 | LW1_OEX_PCT | B2039 | E. coli | 2493 | non-targeted | — |
| 1 | 32 | LW1_OEX_PCT | B2075 | E. coli | 2627 | non-targeted | — |
| 1 | 33 | LW1_OEX_PCT | B2153 | E. coli | 2858 | plastidic | — |
| 1 | 34 | LW1_OEX_PCT | B2194 | E. coli | 2942 | non-targeted | — |
| 1 | 35 | LW1_OEX_PCT | B2226 | E. coli | 2965* | non-targeted | — |
| 1 | 36 | LW1_OEX_PCT | B2309 | E. coli | 2981 | plastidic | — |
| 1 | 37 | LW1_OEX_PCT | B2469 | E. coli | 3130* | non-targeted | — |
| 1 | 38 | LW1_OEX_PCT | B2475 | E. coli | 3216 | non-targeted | — |
| 1 | 39 | LW1_OEX_PCT | B2482 | E. coli | 3335 | non-targeted | — |
| 1 | 40 | LW1_OEX_PCT | B2541 | E. coli | 3401 | non-targeted | 3555, 3557, 3559, 3561, 3563, 3565, 3567, 3569, 3571, 3573, |
| | | | | | | | 3575, 3577, 3579, 3581, 3583, 10016, 10018 |
| 1 | 41 | LW1_OEX_PCT | B2559 | E. coli | 3590 | plastidic | 3802, 3804, 3806, 3808, 3810, 3812, 3814, 3816, 3818, 3820, |
| | | | | | | | 3822, 3824 |
| 1 | 42 | LW1_OEX_PCT | B2605 | E. coli | 3831 | non-targeted | — |
| 1 | 43 | LW1_OEX_PCT | B2630 | E. coli | 3857 | non-targeted | — |
| 1 | 44 | LW1_OEX_PCT | B2678 | E. coli | 3861 | plastidic | — |
| 1 | 45 | LW1_OEX_PCT | B2715 | E. coli | 4022* | plastidic | — |
| 1 | 46 | LW1_OEX_PCT | B2776 | E. coli | 4059 | non-targeted | — |
| 1 | 47 | LW1_OEX_PCT | B2791 | E. coli | 4076 | non-targeted | — |
| 1 | 48 | LW1_OEX_PCT | B2912 | E. coli | 4157 | non-targeted | — |
| 1 | 49 | LW1_OEX_PCT | B2965 | E. coli | 4260* | plastidic | — |
| 1 | 50 | LW1_OEX_PCT | B2987 | E. coli | 4350 | plastidic | — |
| 1 | 51 | LW1_OEX_PCT | B2987 | E. coli | 4350 | non-targeted | — |
| 1 | 52 | LW1_OEX_PCT | B3093 | E. coli | 4459 | plastidic | — |
| 1 | 53 | LW1_OEX_PCT | B3363 | E. coli | 4505 | plastidic | 4599, 4601, 4603, 4605, 4607, 4609, 4611, 4613, 4615, 4617, |
| | | | | | | | 4619, 4621, 4623, 4625, 4627, 4629, 4631, 4633, 10022, |
| | | | | | | | 10024, 10026, 10028, 10030, 10032, 10034, 10036 |
| 1 | 54 | LW1_OEX_PCT | B3429 | E. coli | 4640 | plastidic | — |
| 1 | 55 | LW1_OEX_PCT | B3568 | E. coli | 4806 | plastidic | — |
| 1 | 56 | LW1_OEX_PCT | B3616 | E. coli | 5124 | plastidic | 5344, 5346, 5348, 5350, 5352, 5354, 5356, 5358, 5360, 5362, |
| | | | | | | | 5364, 5366, 5368, 5370, 5372, 5374, 5376, 5378, 5380, 5382, |
| | | | | | | | 5384, 5386, 5388, 5390, 5392, 5394, 5396, 5398, 5400, 5402, |
| | | | | | | | 5404, 5406, 5408, 5410, 10040, 10042, 10044, 10046, 10048, |
| | | | | | | | 10050, 10052, 10054, 10056 |
| 1 | 57 | LW1_OEX_PCT | B3616 | E. coli | 5124 | non-targeted | 5344, 5346, 5348, 5350, 5352, 5354, 5356, 5358, 5360, 5362, |
| | | | | | | | 5364, 5366, 5368, 5370, 5372, 5374, 5376, 5378, 5380, 5382, |
| | | | | | | | 5384, 5386, 5388, 5390, 5392, 5394, 5396, 5398, 5400, 5402, |
| | | | | | | | 5404, 5406, 5408, 5410, 10040, 10042, 10044, 10046, 10048, |
| | | | | | | | 10050, 10052, 10054, 10056 |
| 1 | 58 | LW1_OEX_PCT | B3812 | E. coli | 5417 | non-targeted | — |
| 1 | 59 | LW1_OEX_PCT | B3899 | E. coli | 5495* | non-targeted | — |
| 1 | 60 | LW1_OEX_PCT | B3929 | E. coli | 5585 | plastidic | 5777, 5779, 5781, 5783, 5785, 5787, 5789, 5791, 5793, |
| | | | | | | | 10060 |
| 1 | 61 | LW1_OEX_PCT | B3938 | E. coli | 5800 | non-targeted | — |
| 1 | 62 | LW1_OEX_PCT | B3974 | E. coli | 5850 | non-targeted | — |
| 1 | 63 | LW1_OEX_PCT | B3989 | E. coli | 5992 | non-targeted | — |
| 1 | 64 | LW1_OEX_PCT | B4029 | E. coli | 5999 | non-targeted | — |
| 1 | 65 | LW1_OEX_PCT | B4139 | E. coli | 6056* | plastidic | 6474, 6476, 6478, 6480, 6482, 6484, 6486, 10068 |
| 1 | 66 | LW1_OEX_PCT | B4390 | E. coli | 6500* | non-targeted | — |
| 1 | 67 | LW1_OEX_PCT | SII0290 | Synecho- | 6542 | non-targeted | — |
| | | | | cystis | | | |
| 1 | 68 | LW1_OEX_PCT | YAL049C | Yeast | 6823 | non-targeted | 10072, 10074 |
| 1 | 69 | LW1_OEX_PCT | YCR059C | Yeast | 6870 | non-targeted | — |
| 1 | 70 | LW1_OEX_PCT | YDR035W | Yeast | 6910 | plastidic | — |
| 1 | 71 | LW1_OEX_PCT | YEL005C | Yeast | 7261 | non-targeted | — |
| 1 | 72 | LW1_OEX_PCT | YER112W | Yeast | 7265* | non-targeted | 7269, 7271, 7273, 7275, 7277, 7279, 7281, 7283, 7285, 7287, |
| | | | | | | | 7289, 7291, 7293, 7295 |
| 1 | 73 | LW1_OEX_PCT | YER156C | Yeast | 7301 | non-targeted | 7369, 7371, 7373, 10078 |
| 1 | 74 | LW1_OEX_PCT | YER173W | Yeast | 7384 | non-targeted | — |
| 1 | 75 | LW1_OEX_PCT | YGL045W | Yeast | 7407* | non-targeted | — |
| 1 | 76 | LW1_OEX_PCT | YGL189C | Yeast | 7429 | non-targeted | 7487, 7489, 7491, 7493, 7495, 7497, 7499, 7501, 7503, 7505, |
| | | | | | | | 7507, 7509, 7511, 7513, 7515, 7517, 7519, 7521, 7523, 7525, |
| | | | | | | | 7527, 7529, 7531, 7533, 7535, 7537, 7539, 7541, 7543, 7545, |
| | | | | | | | 7547, 7549, 7551, 10086, 10088, 10090 |
| 1 | 77 | LW1_OEX_PCT | YNR015W | Yeast | 7558 | non-targeted | 7594, 7596, 10094 |
| 1 | 78 | LW1_OEX_PCT | YOR024W | Yeast | 7606 | non-targeted | — |
| 1 | 79 | LW1_OEX_PCT | YOR168W | Yeast | 7610* | non-targeted | 7652, 7654, 7656, 7658, 7660, 7662, 7664, 7666, 7668, 7670, |
| | | | | | | | 7672 |
| 1 | 80 | LW1_OEX_PCT | YPL151C | Yeast | 7685 | non-targeted | 7727, 7729, 7731 |
| 1 | 81 | LW1_OEX_PCT | B1297 | E. coli | 1201* | plastidic | — |
| 1 | 82 | LW1_OEX_PCT | B0970 | E. coli | 7741 | non-targeted | 10008 |
| 1 | 83 | LW1_OEX_PCT | B1829 | E. coli | 7850 | non-targeted | — |
| 1 | 84 | LW1_OEX_PCT | B2664 | E. coli | 7971* | non-targeted | — |
| 1 | 85 | LW1_OEX_PCT | B2796 | E. coli | 8021 | non-targeted | — |
| 1 | 86 | LW1_OEX_PCT | YER174C | Yeast | 8177 | non-targeted | 8233, 8235, 8237, 8239, 8241, 8243, 8245, 8247, 8249, 8251, |
| | | | | | | | 8253, 8255, 8257, 8259, 8261, 8263, 8265, 10082 |
| 1 | 87 | LW1_OEX_PCT | YFR042W | Yeast | 8272 | non-targeted | — |
| 1 | 88 | LW1_OEX_PCT | YKR057W | Yeast | 8288 | non-targeted | 8378, 8380, 8382, 8384, 8386, 8388, 8390, 8392, 8394, 8396, |
| | | | | | | | 8398, 8400, 8402, 8404, 8406, 8408, 8410, 8412, 8414, 8416, |
| | | | | | | | 8418, 8420, 8422, 8424 |
| 1 | 89 | LW1_OEX_PCT | B0629_2 | E. coli | 8438 | non-targeted | — |
| 1 | 90 | LW1_OEX_PCT | B1007_2 | E. coli | 8630 | non-targeted | — |
| 1 | 91 | LW1_OEX_PCT | B2715_2 | E. coli | 9268 | plastidic | — |
| 1 | 92 | LW1_OEX_PCT | B3899_2 | E. coli | 9444 | non-targeted | — |
| 1 | 93 | LW1_OEX_PCT | B4390_2 | E. coli | 9824 | non-targeted | — |
| 1 | 94 | LW1_OEX_PCT | YGL045W_2 | Yeast | 9905 | non-targeted | — |
| 1 | 95 | LW1_OEX_PCT | B2664_2 | E. coli | 9193 | non-targeted | — |
| 1 | 96 | LW1_OEX_PCT | B0963_2 | E. coli | 8497 | non-targeted | — |
| 1 | 97 | LW1_OEX_PCT | B1297_2 | E. coli | 8742 | plastidic | — |
| 1 | 98 | LW1_OEX_PCT | B1597_2 | E. coli | 8891 | non-targeted | — |
| 1 | 99 | LW1_OEX_PCT | B2027_2 | E. coli | 9031 | non-targeted | — |
| 1 | 100 | LW1_OEX_PCT | B2965_2 | E. coli | 9315 | plastidic | — |
| 1 | 101 | LW1_OEX_PCT | B4139_2 | E. coli | 9529 | plastidic | 9805, 9807, 9809, 9811, 10064 |
| 1 | 102 | LW1_OEX_PCT | B0845_2 | E. coli | 8462 | non-targeted | — |
| 1 | 103 | LW1_OEX_PCT | B1901_2 | E. coli | 8973 | plastidic | — |
| 1 | 104 | LW1_OEX_PCT | YER112W_2 | Yeast | 9883 | non-targeted | 9887, 9889, 9891, 9893, 9895, 9897, 9899 |
| 1 | 105 | LW1_OEX_PCT | B1798_2 | E. coli | 8934 | non-targeted | — |
| 1 | 106 | LW1_OEX_PCT | B2226_2 | E. coli | 9093 | non-targeted | — |
| 1 | 107 | LW1_OEX_PCT | B2469_2 | E. coli | 9109 | non-targeted | — |
| 1 | 108 | LW1_OEX_PCT | YOR168W_2 | Yeast | 9931 | non-targeted | 9973, 9975, 9977, 9979, 9981, 9983, 9985, 9987, 9989, 9991, |
| | | | | | | | 9993 |
| 1 | 109 | LW1_OEX_PCT | B4321 | E. coli | 10096 | non-targeted | — |

*Sequences marked with asterisk * reflect the respective sequence derived from public data bases information

TABLE IIA
Amino acid sequence ID numbers

| Ap- | | | | 4. | 5. | | |
|---|---|---|---|---|---|---|---|
| plica- | 1. | 2. | 3. | Organ- | Lead | 6. | 7. |
| tion | Hit | Project | Locus | ism | SEQ ID | Target | SEQ IDs of Polypeptide Homologs |
| 1 | 1 | LW1_OEX_PCT | B0081 | E. coli | 39 | non-targeted | 41, 43, 45, 47 |
| 1 | 2 | LW1_OEX_PCT | B0445 | E. coli | 55 | non-targeted | 57, 59, 61, 63 |
| 1 | 3 | LW1_OEX_PCT | B0482 | E. coli | 71 | non-targeted | 73, 75, 77, 79, 81 |
| 1 | 4 | LW1_OEX_PCT | B0607 | E. coli | 90 | non-targeted | 92, 94, 96, 98, 100, 102, 104, 106, 108, 110, 112, 114, |
| | | | | | | | 116, 118, 120, 122, 124, 126, 128, 130, 132, 134, 136, 138 |
| 1 | 5 | LW1_OEX_PCT | B0629 | E. coli | 144* | non-targeted | 146, 148, 150, 152 |
| 1 | 6 | LW1_OEX_PCT | B0631 | E. coli | 163 | non-targeted | 165, 167, 169, 171, 173, 175, 177, 179, 181, 183, 185, |
| | | | | | | | 187, 189, 191, 193, 195, 197, 199, 201, 203, 205, 207 |
| 1 | 7 | LW1_OEX_PCT | B0697 | E. coli | 214 | non-targeted | 216, 218, 220, 222, 224, 226, 228, 230, 232, 234, 236, |
| | | | | | | | 238, 240, 242, 244, 246, 248, 250, 252, 254, 256, 258, 260, |
| | | | | | | | 262, 264, 266, 268, 270, 272, 274, 276, 278, 280, 282, 284, |
| | | | | | | | 286, 288, 290, 292, 294, 296, 298, 300, 302, 304, 306, 308, |
| | | | | | | | 310, 312, 314, 316, 318, 320, 322, 324, 326, 328, 330, 332, |
| | | | | | | | 334, 336, 338, 340 |
| 1 | 8 | LW1_OEX_PCT | B0753 | E. coli | 359 | non-targeted | 361 |
| 1 | 9 | LW1_OEX_PCT | B0813 | E. coli | 368 | non-targeted | 370, 372, 374, 376, 378, 380, 382, 384, 386, 388, 390, |
| | | | | | | | 392, 394, 396, 398, 400, 402, 404, 406, 408, 410, 412 |
| 1 | 10 | LW1_OEX_PCT | B0845 | E. coli | 421* | non-targeted | 423, 425, 427, 429, 431, 433, 435, 437, 439, 441, 443 |
| 1 | 11 | LW1_OEX_PCT | B0866 | E. coli | 456 | non-targeted | 458, 460, 462, 464, 466, 468, 470, 472, 474, 476, 478, |
| | | | | | | | 480, 482, 484, 486, 488, 490, 492, 494, 496, 498, 500, 502, |
| | | | | | | | 504, 506, 508, 510, 512, 514, 516, 518, 520, 522, 524, 526, |
| | | | | | | | 528 |
| 1 | 12 | LW1_OEX_PCT | B0963 | E. coli | 536* | non-targeted | 538, 540, 542, 544, 546, 548, 550, 552, 554, 556, 558, |
| | | | | | | | 560, 562, 564, 566, 568, 570, 572, 574, 576, 578, 580, 582, |
| | | | | | | | 584, 586, 588, 590, 592, 594, 596, 598, 600, 602, 604, 606, |
| | | | | | | | 608, 610, 612 |
| 1 | 13 | LW1_OEX_PCT | B0975 | E. coli | 619 | non-targeted | 621, 623, 625, 627, 629, 631, 633, 635, 637, 639, 641, |
| | | | | | | | 643, 645, 647, 649, 651, 653, 655, 657, 659, 661, 663, 665 |
| 1 | 14 | LW1_OEX_PCT | B1007 | E. coli | 672* | non-targeted | 674, 676, 678, 680, 682, 684, 686, 688, 690, 692, 694, |
| | | | | | | | 696, 698, 700, 702, 704, 706, 708, 710, 712, 714, 716, 718, |
| | | | | | | | 720, 722, 724, 726, 728, 730, 732, 734, 736, 738, 740, 742, |
| | | | | | | | 744, 746, 748, 750, 752, 754, 756, 758 |
| 1 | 15 | LW1_OEX_PCT | B1052 | E. coli | 765 | non-targeted | — |
| 1 | 16 | LW1_OEX_PCT | B1091 | E. coli | 769 | plastidic | 771, 773, 775, 777, 779, 781, 783, 785, 787, 789, 791, |
| | | | | | | | 793, 795, 797, 799, 801, 803, 805, 807, 809, 811, 813, 815, |
| | | | | | | | 817, 819, 821, 823, 825, 827, 829, 831, 833, 835, 837, 839, |
| | | | | | | | 841, 843, 845, 847, 849, 851, 853, 855, 857, 859, 861, 863, |
| | | | | | | | 865, 867, 869, 871, 873, 875, 877, 879, 881, 883, 885, 887, |
| | | | | | | | 889 |
| 1 | 17 | LW1_OEX_PCT | B1161 | E. coli | 908 | non-targeted | 910, 912, 914, 916, 918, 920, 922 |
| 1 | 18 | LW1_OEX_PCT | B1186 | E. coli | 928 | non-targeted | 930, 932, 934, 936, 938, 940, 942, 944, 946, 948, 950, |
| | | | | | | | 952, 954, 956, 958, 960, 962, 964, 966, 968, 970, 972, 974, |
| | | | | | | | 976, 978, 980, 982, 984, 986, 988, 990, 992, 994, 996 |
| 1 | 19 | LW1_OEX_PCT | B1291 | E. coli | 1010 | plastidic | 1012, 1014, 1016, 1018, 1020, 1022, 1024, 1026, 1028, 1030, |
| | | | | | | | 1032, 1034, 1036, 1038, 1040, 1042, 1044, 1046, 1048, 1050, |
| | | | | | | | 1052, 1054, 1056, 1058, 1060, 1062, 1064, 1066, 1068, 1070, |
| | | | | | | | 1072, 1074, 1076, 1078, 1080, 1082, 1084, 1086, 1088, 1090, |
| | | | | | | | 1092, 1094, 1096, 1098, 1100, 1102, 1104, 1106, 1108, 1110, |
| | | | | | | | 1112, 1114, 1116, 1118, 1120, 1122, 1124, 1126, 1128, 1130, |
| | | | | | | | 1132, 1134, 1136, 1138, 1140, 1142, 1144 |
| 1 | 20 | LW1_OEX_PCT | B1294 | E. coli | 1155 | plastidic | 1157, 1159, 1161, 1163, 1165, 1167, 1169, 1171, 1173, 1175, |
| | | | | | | | 1177, 1179, 1181, 1183, 1185, 1187 |
| 1 | 21 | LW1_OEX_PCT | B1423 | E. coli | 1309 | non-targeted | 1311, 1313, 1315, 1317, 1319, 1321, 1323, 1325, 1327, 1329, |
| | | | | | | | 1331, 1333, 1335, 1337, 1339, 1341, 1343, 1345, 1347, 1349, |
| | | | | | | | 1351, 1353 |
| 1 | 22 | LW1_OEX_PCT | B1597 | E. coli | 1369* | non-targeted | 1371 |
| 1 | 23 | LW1_OEX_PCT | B1605 | E. coli | 1375 | non-targeted | 1377, 1379, 1381, 1383, 1385, 1387, 1389, 1391, 1393, 1395, |
| | | | | | | | 1397, 1399, 1401, 1403, 1405, 1407, 1409, 1411, 1413, 1415, |
| | | | | | | | 1417, 1419, 1421, 1423, 1425, 1427, 1429, 1431, 1433, 1435, |
| | | | | | | | 1437, 1439, 1441, 1443, 1445, 1447, 1449, 1451, 1453, 1455, |
| | | | | | | | 1457, 1459, 1461, 1463, 1465, 1467, 1469, 1471, 1473, 1475, |
| | | | | | | | 1477, 1479, 1481, 1483, 1485, 1487, 1489, 1491, 1493, 1495 |
| 1 | 24 | LW1_OEX_PCT | B1704 | E. coli | 1508 | non-targeted | 1510, 1512, 1514, 1516, 1518, 1520, 1522, 1524, 1526, 1528, |
| | | | | | | | 1530, 1532, 1534, 1536, 1538, 1540, 1542, 1544, 1546, 1548, |
| | | | | | | | 1550, 1552, 1554, 1556, 1558, 1560, 1562, 1564, 1566, 1568, |
| | | | | | | | 1570, 1572, 1574, 1576, 1578, 1580, 1582, 1584, 1586, 1588, |
| | | | | | | | 1590, 1592, 1594, 1596, 1598, 1600, 1602, 1604, 1606, 1608, |
| | | | | | | | 1610, 1612, 1614, 1616, 1618, 1620, 1622, 1624, 1626, 1628, |
| | | | | | | | 1630, 1632, 1634, 1636, 1638, 1640, 1642, 1644, 1646, 1648, |
| | | | | | | | 1650, 1652, 1654, 1656, 1658, 1660, 1662, 1664, 1666, 1668, |
| | | | | | | | 1670, 1672, 1674, 1676, 1678, 1680, 1682, 1684, 1686, 1688, |
| | | | | | | | 1690, 1692, 1694, 1696, 1698, 1700, 1702, 1704, 1706, 1708, |
| | | | | | | | 1710, 1712, 1714, 1716, 1718, 1720, 1722, 1724, 1726, 1728, |
| | | | | | | | 1730, 1732, 1734, 1736, 1738, 1740, 1742, 1744, 1746, 1748, |
| | | | | | | | 1750, 1752, 1754, 1756, 1758, 1760, 1762, 1764, 1766, 1768, |
| | | | | | | | 1770, 1772, 1774, 1776, 1778, 1780, 1782, 1784, 1786, 1788, |
| | | | | | | | 1790, 1792, 1794, 1796, 1798, 1800, 1802, 1804, 1806, 1808, |
| | | | | | | | 1810, 1812, 1814, 1816, 1818, 1820, 1822, 1824, 1826, 1828, |
| | | | | | | | 1830, 1832, 1834, 1836, 1838, 1840, 1842, 1844, 1846, 1848, |
| | | | | | | | 1850, 1852, 1854, 1856, 1858, 1860, 1862, 1864, 1866, 1868, |
| | | | | | | | 1870, 1872, 1874, 1876, 1878, 1880, 1882, 1884, 1886, 1888, |
| | | | | | | | 1890, 1892, 1894, 1896, 1898, 1900, 1902, 1904, 1906, 1908, |
| | | | | | | | 1910, 1912, 1914, 1916, 1918, 1920, 1922, 1924, 1926, 1928, |
| | | | | | | | 1930, 1932, 1934, 1936, 1938, 1940 |
| 1 | 25 | LW1_OEX_PCT | B1736 | E. coli | 1954 | plastidic | 1956, 1958, 1960, 1962, 1964, 1966, 1968, 1970, 1972, 1974, |
| | | | | | | | 1976, 1978, 1980, 1982, 1984, 1986, 1988, 1990, 1992, 1994, |
| | | | | | | | 1996, 1998, 2000, 2002, 2004, 2006, 2008, 2010, 2012, 2014, |
| | | | | | | | 2016, 2018, 2020, 2022, 2024, 2026, 2028, 2030, 2032, 2034, |
| | | | | | | | 2036, 2038, 2040, 2042, 2044, 2046, 2048, 2050, 2052, 2054, |
| | | | | | | | 2056, 2058, 2060, 2062, 2064, 2066, 2068, 2070, 2072, 2074, |
| | | | | | | | 2076, 2078, 2080, 2082, 2084, 2086, 2088, 2090, 2092, 2094, |
| | | | | | | | 2096, 2098, 2100, 2102, 2104, 2106, 2108, 2110, 2112, 2114, |
| | | | | | | | 2116, 2118, 2120, 2122, 2124, 2126, 2128, 2130, 2132, 2134, |
| | | | | | | | 2136, 2138, 2140, 2142, 2144, 2146, 2148, 2150 |
| 1 | 26 | LW1_OEX_PCT | B1798 | E. coli | 2157* | non-targeted | 2159, 2161, 2163, 2165, 2167, 2169, 2171, 2173, 2175, 2177, |
| | | | | | | | 2179, 2181, 2183, 2185, 2187 |
| 1 | 27 | LW1_OEX_PCT | B1878 | E. coli | 2196 | non-targeted | 2198, 2200, 2202, 2204, 2206, 2208, 2210, 2212 |
| 1 | 28 | LW1_OEX_PCT | B1901 | E. coli | 2220* | plastidic | 2222, 2224, 2226, 2228, 2230, 2232, 2234, 2236, 2238, 2240, |
| | | | | | | | 2242, 2244, 2246, 2248, 2250, 2252, 2254, 2256, 2258, 2260, |
| | | | | | | | 2262, 2264, 2266, 2268 |
| 1 | 29 | LW1_OEX_PCT | B1912 | E. coli | 2278 | plastidic | 2280, 2282, 2284, 2286, 2288, 2290, 2292, 2294, 2296, 2298, |
| | | | | | | | 2300, 2302, 2304, 2306, 2308, 2310, 2312, 2314, 2316, 2318, |
| | | | | | | | 2320, 2322, 2324, 2326, 2328, 2330, 2332, 2334, 2336, 2338, |
| | | | | | | | 2340, 2342, 2344, 2346, 2348, 2350, 2352, 2354, 2356, 2358, |
| | | | | | | | 2360, 2362, 2364, 2366, 2368, 2370, 2372, 2374, 2376, 2378, |
| | | | | | | | 2380, 2382, 2384, 2386, 2388, 2390, 2392, 2394, 2396, 2398, |
| | | | | | | | 2400, 2402, 2404, 2406, 2408, 2410, 2412, 2414, 2416, 2418, |
| | | | | | | | 2420, 2422, 2424, 2426, 2428, 2430, 2432, 2434, 2436, 2438, |
| | | | | | | | 2440, 2442, 2444, 2446, 2448, 2450, 2452, 2454, 2456 |
| 1 | 30 | LW1_OEX_PCT | B2027 | E. coli | 2471* | non-targeted | 2473, 2475, 2477, 2479, 2481 |
| 1 | 31 | LW1_OEX_PCT | B2039 | E. coli | 2494 | non-targeted | 2496, 2498, 2500, 2502, 2504, 2506, 2508, 2510, 2512, 2514, |
| | | | | | | | 2516, 2518, 2520, 2522, 2524, 2526, 2528, 2530, 2532, 2534, |
| | | | | | | | 2536, 2538, 2540, 2542, 2544, 2546, 2548, 2550, 2552, 2554, |
| | | | | | | | 2556, 2558, 2560, 2562, 2564, 2566, 2568, 2570, 2572, 2574, |
| | | | | | | | 2576, 2578, 2580, 2582, 2584, 2586, 2588, 2590, 2592, 2594, |
| | | | | | | | 2596, 2598, 2600, 2602, 2604, 2606, 2608, 2610, 2612, 2614, |
| | | | | | | | 2616, 2618 |
| 1 | 32 | LW1_OEX_PCT | B2075 | E. coli | 2628 | non-targeted | 2630, 2632, 2634, 2636, 2638, 2640, 2642, 2644, 2646, 2648, |
| | | | | | | | 2650, 2652, 2654, 2656, 2658, 2660, 2662, 2664, 2666, 2668, |
| | | | | | | | 2670, 2672, 2674, 2676, 2678, 2680, 2682, 2684, 2686, 2688, |
| | | | | | | | 2690, 2692, 2694, 2696, 2698, 2700, 2702, 2704, 2706, 2708, |
| | | | | | | | 2710, 2712, 2714, 2716, 2718, 2720, 2722, 2724, 2726, 2728, |
| | | | | | | | 2730, 2732, 2734, 2736, 2738, 2740, 2742, 2744, 2746, 2748, |
| | | | | | | | 2750, 2752, 2754, 2756, 2758, 2760, 2762, 2764, 2766, 2768, |
| | | | | | | | 2770, 2772, 2774, 2776, 2778, 2780, 2782, 2784, 2786, 2788, |
| | | | | | | | 2790, 2792, 2794, 2796, 2798, 2800, 2802, 2804, 2806, 2808, |
| | | | | | | | 2810, 2812, 2814, 2816, 2818, 2820, 2822, 2824, 2826, 2828, |
| | | | | | | | 2830, 2832, 2834, 2836, 2838, 2840, 2842, 2844, 2846 |
| 1 | 33 | LW1_OEX_PCT | B2153 | E. coli | 2859 | plastidic | 2861, 2863, 2865, 2867, 2869, 2871, 2873, 2875, 2877, 2879, |
| | | | | | | | 2881, 2883, 2885, 2887, 2889, 2891, 2893, 2895, 2897, 2899, |
| | | | | | | | 2901, 2903, 2905, 2907, 2909, 2911, 2913, 2915, 2917, 2919, |
| | | | | | | | 2921, 2923, 2925, 2927, 2929, 2931, 2933 |
| 1 | 34 | LW1_OEX_PCT | B2194 | E. coli | 2943 | non-targeted | 2945, 2947, 2949, 2951, 2953, 2955, 2957 |
| 1 | 35 | LW1_OEX_PCT | B2226 | E. coli | 2966* | non-targeted | 2968, 2970, 2972, 2974 |
| 1 | 36 | LW1_OEX_PCT | B2309 | E. coli | 2982 | plastidic | 2984, 2986, 2988, 2990, 2992, 2994, 2996, 2998, 3000, 3002, |
| | | | | | | | 3004, 3006, 3008, 3010, 3012, 3014, 3016, 3018, 3020, 3022, |
| | | | | | | | 3024, 3026, 3028, 3030, 3032, 3034, 3036, 3038, 3040, 3042, |
| | | | | | | | 3044, 3046, 3048, 3050, 3052, 3054, 3056, 3058, 3060, 3062, |
| | | | | | | | 3064, 3066, 3068, 3070, 3072, 3074, 3076, 3078, 3080, 3082, |
| | | | | | | | 3084, 3086, 3088, 3090, 3092, 3094, 3096, 3098, 3100, 3102, |
| | | | | | | | 3104, 3106, 3108, 3110, 3112, 3114, 3116, 3118, 3120 |
| 1 | 37 | LW1_OEX_PCT | B2469 | E. coli | 3131* | non-targeted | 3133, 3135, 3137, 3139, 3141, 3143, 3145, 3147, 3149, 3151, |
| | | | | | | | 3153, 3155, 3157, 3159, 3161, 3163, 3165, 3167, 3169, 3171, |
| | | | | | | | 3173, 3175, 3177, 3179, 3181, 3183, 3185, 3187, 3189, 3191, |
| | | | | | | | 3193, 3195, 3197, 3199, 3201, 3203, 3205 |
| 1 | 38 | LW1_OEX_PCT | B2475 | E. coli | 3217 | non-targeted | 3219, 3221, 3223, 3225, 3227, 3229, 3231, 3233, 3235, 3237, |
| | | | | | | | 3239, 3241, 3243, 3245, 3247, 3249, 3251, 3253, 3255, 3257, |
| | | | | | | | 3259, 3261, 3263, 3265, 3267, 3269, 3271, 3273, 3275, 3277, |
| | | | | | | | 3279, 3281, 3283, 3285, 3287, 3289, 3291, 3293, 3295, 3297, |
| | | | | | | | 3299, 3301, 3303, 3305, 3307, 3309, 3311, 3313, 3315, 3317, |
| | | | | | | | 3319, 3321, 3323, 3325, 3327 |
| 1 | 39 | LW1_OEX_PCT | B2482 | E. coli | 3336 | non-targeted | 3338, 3340, 3342, 3344, 3346, 3348, 3350, 3352, 3354, 3356, |
| | | | | | | | 3358, 3360, 3362, 3364, 3366, 3368, 3370, 3372, 3374, 3376, |
| | | | | | | | 3378, 3380, 3382, 3384, 3386, 3388, 3390, 3392, 3394 |
| 1 | 40 | LW1_OEX_PCT | B2541 | E. coli | 3402 | non-targeted | 3404, 3406, 3408, 3410, 3412, 3414, 3416, 3418, 3420, 3422, |
| | | | | | | | 3424, 3426, 3428, 3430, 3432, 3434, 3436, 3438, 3440, 3442, |
| | | | | | | | 3444, 3446, 3448, 3450, 3452, 3454, 3456, 3458, 3460, 3462, |
| | | | | | | | 3464, 3466, 3468, 3470, 3472, 3474, 3476, 3478, 3480, 3482, |
| | | | | | | | 3484, 3486, 3488, 3490, 3492, 3494, 3496, 3498, 3500, 3502, |
| | | | | | | | 3504, 3506, 3508, 3510, 3512, 3514, 3516, 3518, 3520, 3522, |
| | | | | | | | 3524, 3526, 3528, 3530, 3532, 3534, 3536, 3538, 3540, 3542, |
| | | | | | | | 3544, 3546, 3548, 3550, 3552, 3554 |
| 1 | 41 | LW1_OEX_PCT | B2559 | E. coli | 3591 | plastidic | 3593, 3595, 3597, 3599, 3601, 3603, 3605, 3607, 3609, 3611, |
| | | | | | | | 3613, 3615, 3617, 3619, 3621, 3623, 3625, 3627, 3629, 3631, |
| | | | | | | | 3633, 3635, 3637, 3639, 3641, 3643, 3645, 3647, 3649, 3651, |
| | | | | | | | 3653, 3655, 3657, 3659, 3661, 3663, 3665, 3667, 3669, 3671, |
| | | | | | | | 3673, 3675, 3677, 3679, 3681, 3683, 3685, 3687, 3689, 3691, |
| | | | | | | | 3693, 3695, 3697, 3699, 3701, 3703, 3705, 3707, 3709, 3711, |
| | | | | | | | 3713, 3715, 3717, 3719, 3721, 3723, 3725, 3727, 3729, 3731, |
| | | | | | | | 3733, 3735, 3737, 3739, 3741, 3743, 3745, 3747, 3749, 3751, |
| | | | | | | | 3753, 3755, 3757, 3759, 3761, 3763, 3765, 3767, 3769, 3771, |
| | | | | | | | 3773, 3775, 3777, 3779, 3781, 3783, 3785, 3787, 3789, 3791, |
| | | | | | | | 3793, 3795, 3797, 3799, 3801 |
| 1 | 42 | LW1_OEX_PCT | B2605 | E. coli | 3832 | non-targeted | 3834, 3836, 3838, 3840, 3842, 3844, 3846, 3848, 3850, 3852 |
| 1 | 43 | LW1_OEX_PCT | B2630 | E. coli | 3858 | non-targeted | — |
| 1 | 44 | LW1_OEX_PCT | B2678 | E. coli | 3862 | plastidic | 3864, 3866, 3868, 3870, 3872, 3874, 3876, 3878, 3880, 3882, |
| | | | | | | | 3884, 3886, 3888, 3890, 3892, 3894, 3896, 3898, 3900, 3902, |
| | | | | | | | 3904, 3906, 3908, 3910, 3912, 3914, 3916, 3918, 3920, 3922, |
| | | | | | | | 3924, 3926, 3928, 3930, 3932, 3934, 3936, 3938, 3940, 3942, |
| | | | | | | | 3944, 3946, 3948, 3950, 3952, 3954, 3956, 3958, 3960, 3962, |
| | | | | | | | 3964, 3966, 3968, 3970, 3972, 3974, 3976, 3978, 3980, 3982, |
| | | | | | | | 3984, 3986, 3988, 3990, 3992, 3994, 3996, 3998, 4000, 4002, |
| | | | | | | | 4004, 4006, 4008, 4010, 4012, 4014 |
| 1 | 45 | LW1_OEX_PCT | B2715 | E. coli | 4023* | plastidic | 4025, 4027, 4029, 4031, 4033, 4035, 4037, 4039, 4041, 4043, |
| | | | | | | | 4045, 4047, 4049 |
| 1 | 46 | LW1_OEX_PCT | B2776 | E. coli | 4060 | non-targeted | 4062, 4064, 4066, 4068, 4070 |
| 1 | 47 | LW1_OEX_PCT | B2791 | E. coli | 4077 | non-targeted | 4079, 4081, 4083, 4085, 4087, 4089, 4091, 4093, 4095, 4097, |
| | | | | | | | 4099, 4101, 4103, 4105, 4107, 4109, 4111, 4113, 4115, 4117, |
| | | | | | | | 4119, 4121, 4123, 4125, 4127, 4129, 4131, 4133, 4135, 4137, |
| | | | | | | | 4139, 4141, 4143, 4145, 4147 |
| 1 | 48 | LW1_OEX_PCT | B2912 | E. coli | 4158 | non-targeted | 4160, 4162, 4164, 4166, 4168, 4170, 4172, 4174, 4176, 4178, |
| | | | | | | | 4180, 4182, 4184, 4186, 4188, 4190, 4192, 4194, 4196, 4198, |
| | | | | | | | 4200, 4202, 4204, 4206, 4208, 4210, 4212, 4214, 4216, 4218, |
| | | | | | | | 4220, 4222, 4224, 4226, 4228, 4230, 4232, 4234, 4236, 4238, |
| | | | | | | | 4240, 4242, 4244, 4246, 4248, 4250, 4252, 4254 |
| 1 | 49 | LW1_OEX_PCT | B2965 | E. coli | 4261* | plastidic | 4263, 4265, 4267, 4269, 4271, 4273, 4275, 4277, 4279, 4281, |
| | | | | | | | 4283, 4285, 4287, 4289, 4291, 4293, 4295, 4297, 4299, 4301, |
| | | | | | | | 4303, 4305, 4307, 4309, 4311, 4313, 4315, 4317, 4319, 4321, |
| | | | | | | | 4323, 4325, 4327, 4329, 4331 |
| 1 | 50 | LW1_OEX_PCT | B2987 | E. coli | 4351 | plastidic | 4353, 4355, 4357, 4359, 4361, 4363, 4365, 4367, 4369, 4371, |
| | | | | | | | 4373, 4375, 4377, 4379, 4381, 4383, 4385, 4387, 4389, 4391, |
| | | | | | | | 4393, 4395, 4397, 4399, 4401, 4403, 4405, 4407, 4409, 4411, |
| | | | | | | | 4413, 4415, 4417, 4419, 4421, 4423, 4425, 4427, 4429, 4431, |
| | | | | | | | 4433, 4435, 4437, 4439, 4441, 4443, 4445, 4447, 4449 |
| 1 | 51 | LW1_OEX_PCT | B2987 | E. coli | 4351 | non-targeted | 4353, 4355, 4357, 4359, 4361, 4363, 4365, 4367, 4369, 4371, |
| | | | | | | | 4373, 4375, 4377, 4379, 4381, 4383, 4385, 4387, 4389, 4391, |
| | | | | | | | 4393, 4395, 4397, 4399, 4401, 4403, 4405, 4407, 4409, 4411, |
| | | | | | | | 4413, 4415, 4417, 4419, 4421, 4423, 4425, 4427, 4429, 4431, |
| | | | | | | | 4433, 4435, 4437, 4439, 4441, 4443, 4445, 4447, 4449 |
| 1 | 52 | LW1_OEX_PCT | B3093 | E. coli | 4460 | plastidic | 4462, 4464, 4466, 4468, 4470, 4472, 4474, 4476, 4478, 4480, |
| | | | | | | | 4482, 4484, 4486, 4488, 4490, 4492, 4494 |
| 1 | 53 | LW1_OEX_PCT | B3363 | E. coli | 4506 | plastidic | 4508, 4510, 4512, 4514, 4516, 4518, 4520, 4522, 4524, 4526, |
| | | | | | | | 4528, 4530, 4532, 4534, 4536, 4538, 4540, 4542, 4544, 4546, |
| | | | | | | | 4548, 4550, 4552, 4554, 4556, 4558, 4560, 4562, 4564, 4566, |
| | | | | | | | 4568, 4570, 4572, 4574, 4576, 4578, 4580, 4582, 4584, 4586, |
| | | | | | | | 4588, 4590, 4592, 4594, 4596, 4598 |
| 1 | 54 | LW1_OEX_PCT | B3429 | E. coli | 4641 | plastidic | 4643, 4645, 4647, 4649, 4651, 4653, 4655, 4657, 4659, 4661, |
| | | | | | | | 4663, 4665, 4667, 4669, 4671, 4673, 4675, 4677, 4679, 4681, |
| | | | | | | | 4683, 4685, 4687, 4689, 4691, 4693, 4695, 4697, 4699, 4701, |
| | | | | | | | 4703, 4705, 4707, 4709, 4711, 4713, 4715, 4717, 4719, 4721, |
| | | | | | | | 4723, 4725, 4727, 4729, 4731, 4733, 4735, 4737, 4739, 4741, |
| | | | | | | | 4743, 4745, 4747, 4749, 4751, 4753, 4755, 4757, 4759, 4761, |
| | | | | | | | 4763, 4765, 4767, 4769, 4771, 4773, 4775, 4777, 4779, 4781, |
| | | | | | | | 4783, 4785, 4787, 4789, 4791, 4793, 4795, 4797 |
| 1 | 55 | LW1_OEX_PCT | B3568 | E. coli | 4807 | plastidic | 4809, 4811, 4813, 4815, 4817, 4819, 4821, 4823, 4825, 4827, |
| | | | | | | | 4829, 4831, 4833, 4835, 4837, 4839, 4841, 4843, 4845, 4847, |
| | | | | | | | 4849, 4851, 4853, 4855, 4857, 4859, 4861, 4863, 4865, 4867, |
| | | | | | | | 4869, 4871, 4873, 4875, 4877, 4879, 4881, 4883, 4885, 4887, |
| | | | | | | | 4889, 4891, 4893, 4895, 4897, 4899, 4901, 4903, 4905, 4907, |
| | | | | | | | 4909, 4911, 4913, 4915, 4917, 4919, 4921, 4923, 4925, 4927, |
| | | | | | | | 4929, 4931, 4933, 4935, 4937, 4939, 4941, 4943, 4945, 4947, |
| | | | | | | | 4949, 4951, 4953, 4955, 4957, 4959, 4961, 4963, 4965, 4967, |
| | | | | | | | 4969, 4971, 4973, 4975, 4977, 4979, 4981, 4983, 4985, 4987, |
| | | | | | | | 4989, 4991, 4993, 4995, 4997, 4999, 5001, 5003, 5005, 5007, |
| | | | | | | | 5009, 5011, 5013, 5015, 5017, 5019, 5021, 5023, 5025, 5027, |
| | | | | | | | 5029, 5031, 5033, 5035, 5037, 5039, 5041, 5043, 5045, 5047, |
| | | | | | | | 5049, 5051, 5053, 5055, 5057, 5059, 5061, 5063, 5065, 5067, |
| | | | | | | | 5069, 5071, 5073, 5075, 5077, 5079, 5081, 5083, 5085, 5087, |
| | | | | | | | 5089, 5091, 5093, 5095, 5097, 5099, 5101, 5103, 5105, 5107, |
| | | | | | | | 5109, 5111, 5113, 5115, 5117 |
| 1 | 56 | LW1_OEX_PCT | B3616 | E. coli | 5125 | plastidic | 5127, 5129, 5131, 5133, 5135, 5137, 5139, 5141, 5143, 5145, |
| | | | | | | | 5147, 5149, 5151, 5153, 5155, 5157, 5159, 5161, 5163, 5165, |
| | | | | | | | 5167, 5169, 5171, 5173, 5175, 5177, 5179, 5181, 5183, 5185, |
| | | | | | | | 5187, 5189, 5191, 5193, 5195, 5197, 5199, 5201, 5203, 5205, |
| | | | | | | | 5207, 5209, 5211, 5213, 5215, 5217, 5219, 5221, 5223, 5225, |
| | | | | | | | 5227, 5229, 5231, 5233, 5235, 5237, 5239, 5241, 5243, 5245, |
| | | | | | | | 5247, 5249, 5251, 5253, 5255, 5257, 5259, 5261, 5263, 5265, |
| | | | | | | | 5267, 5269, 5271, 5273, 5275, 5277, 5279, 5281, 5283, 5285, |
| | | | | | | | 5287, 5289, 5291, 5293, 5295, 5297, 5299, 5301, 5303, 5305, |
| | | | | | | | 5307, 5309, 5311, 5313, 5315, 5317, 5319, 5321, 5323, 5325, |
| | | | | | | | 5327, 5329, 5331, 5333, 5335, 5337, 5339, 5341, 5343 |
| 1 | 57 | LW1_OEX_PCT | B3616 | E. coli | 5125 | non-targeted | 5127, 5129, 5131, 5133, 5135, 5137, 5139, 5141, 5143, 5145, |
| | | | | | | | 5147, 5149, 5151, 5153, 5155, 5157, 5159, 5161, 5163, 5165, |
| | | | | | | | 5167, 5169, 5171, 5173, 5175, 5177, 5179, 5181, 5183, 5185, |
| | | | | | | | 5187, 5189, 5191, 5193, 5195, 5197, 5199, 5201, 5203, 5205, |
| | | | | | | | 5207, 5209, 5211, 5213, 5215, 5217, 5219, 5221, 5223, 5225, |
| | | | | | | | 5227, 5229, 5231, 5233, 5235, 5237, 5239, 5241, 5243, 5245, |
| | | | | | | | 5247, 5249, 5251, 5253, 5255, 5257, 5259, 5261, 5263, 5265, |
| | | | | | | | 5267, 5269, 5271, 5273, 5275, 5277, 5279, 5281, 5283, 5285, |
| | | | | | | | 5287, 5289, 5291, 5293, 5295, 5297, 5299, 5301, 5303, 5305, |
| | | | | | | | 5307, 5309, 5311, 5313, 5315, 5317, 5319, 5321, 5323, 5325, |
| | | | | | | | 5327, 5329, 5331, 5333, 5335, 5337, 5339, 5341, 5343 |
| 1 | 58 | LW1_OEX_PCT | B3812 | E. coli | 5418 | non-targeted | 5420, 5422, 5424, 5426, 5428, 5430, 5432, 5434, 5436, 5438, |
| | | | | | | | 5440, 5442, 5444, 5446, 5448, 5450, 5452, 5454, 5456, 5458, |
| | | | | | | | 5460, 5462, 5464, 5466, 5468, 5470, 5472, 5474, 5476, 5478, |
| | | | | | | | 5480, 5482, 5484, 5486, 5488 |
| 1 | 59 | LW1_OEX_PCT | B3899 | E. coli | 5496* | non-targeted | 5498, 5500, 5502, 5504, 5506, 5508, 5510, 5512, 5514, 5516, |
| | | | | | | | 5518, 5520, 5522, 5524, 5526, 5528, 5530, 5532, 5534, 5536, |
| | | | | | | | 5538, 5540, 5542, 5544, 5546, 5548, 5550, 5552, 5554, 5556, |
| | | | | | | | 5558, 5560, 5562, 5564, 5566, 5568, 5570, 5572, 5574, 5576, |
| | | | | | | | 5578 |
| 1 | 60 | LW1_OEX_PCT | B3929 | E. coli | 5586 | plastidic | 5588, 5590, 5592, 5594, 5596, 5598, 5600, 5602, 5604, 5606, |
| | | | | | | | 5608, 5610, 5612, 5614, 5616, 5618, 5620, 5622, 5624, 5626, |
| | | | | | | | 5628, 5630, 5632, 5634, 5636, 5638, 5640, 5642, 5644, 5646, |
| | | | | | | | 5648, 5650, 5652, 5654, 5656, 5658, 5660, 5662, 5664, 5666, |
| | | | | | | | 5668, 5670, 5672, 5674, 5676, 5678, 5680, 5682, 5684, 5686, |
| | | | | | | | 5688, 5690, 5692, 5694, 5696, 5698, 5700, 5702, 5704, 5706, |
| | | | | | | | 5708, 5710, 5712, 5714, 5716, 5718, 5720, 5722, 5724, 5726, |
| | | | | | | | 5728, 5730, 5732, 5734, 5736, 5738, 5740, 5742, 5744, 5746, |
| | | | | | | | 5748, 5750, 5752, 5754, 5756, 5758, 5760, 5762, 5764, 5766, |
| | | | | | | | 5768, 5770, 5772, 5774, 5776 |
| 1 | 61 | LW1_OEX_PCT | B3938 | E. coli | 5801 | non-targeted | 5803, 5805, 5807, 5809, 5811, 5813, 5815, 5817, 5819, 5821, |
| | | | | | | | 5823, 5825, 5827, 5829, 5831, 5833, 5835, 5837, 5839, 5841, |
| | | | | | | | 5843 |
| 1 | 62 | LW1_OEX_PCT | B3974 | E. coli | 5851 | non-targeted | 5853, 5855, 5857, 5859, 5861, 5863, 5865, 5867, 5869, 5871, |
| | | | | | | | 5873, 5875, 5877, 5879, 5881, 5883, 5885, 5887, 5889, 5891, |
| | | | | | | | 5893, 5895, 5897, 5899, 5901, 5903, 5905, 5907, 5909, 5911, |
| | | | | | | | 5913, 5915, 5917, 5919, 5921, 5923, 5925, 5927, 5929, 5931, |
| | | | | | | | 5933, 5935, 5937, 5939, 5941, 5943, 5945, 5947, 5949, 5951, |
| | | | | | | | 5953, 5955, 5957, 5959, 5961, 5963, 5965, 5967, 5969, 5971, |
| | | | | | | | 5973, 5975, 5977, 5979, 5981 |
| 1 | 63 | LW1_OEX_PCT | B3989 | E. coli | 5993 | non-targeted | 5995 |
| 1 | 64 | LW1_OEX_PCT | B4029 | E. coli | 6000 | non-targeted | 6002, 6004, 6006, 6008, 6010, 6012, 6014, 6016, 6018, 6020, |
| | | | | | | | 6022, 6024, 6026, 6028, 6030, 6032, 6034, 6036, 6038, 6040 |
| 1 | 65 | LW1_OEX_PCT | B4139 | E. coli | 6057* | plastidic | 6059, 6061, 6063, 6065, 6067, 6069, 6071, 6073, 6075, 6077, |
| | | | | | | | 6079, 6081, 6083, 6085, 6087, 6089, 6091, 6093, 6095, 6097, |
| | | | | | | | 6099, 6101, 6103, 6105, 6107, 6109, 6111, 6113, 6115, 6117, |
| | | | | | | | 6119, 6121, 6123, 6125, 6127, 6129, 6131, 6133, 6135, 6137, |
| | | | | | | | 6139, 6141, 6143, 6145, 6147, 6149, 6151, 6153, 6155, 6157, |
| | | | | | | | 6159, 6161, 6163, 6165, 6167, 6169, 6171, 6173, 6175, 6177, |
| | | | | | | | 6179, 6181, 6183, 6185, 6187, 6189, 6191, 6193, 6195, 6197, |
| | | | | | | | 6199, 6201, 6203, 6205, 6207, 6209, 6211, 6213, 6215, 6217, |
| | | | | | | | 6219, 6221, 6223, 6225, 6227, 6229, 6231, 6233, 6235, 6237, |
| | | | | | | | 6239, 6241, 6243, 6245, 6247, 6249, 6251, 6253, 6255, 6257, |
| | | | | | | | 6259, 6261, 6263, 6265, 6267, 6269, 6271, 6273, 6275, 6277, |
| | | | | | | | 6279, 6281, 6283, 6285, 6287, 6289, 6291, 6293, 6295, 6297, |
| | | | | | | | 6299, 6301, 6303, 6305, 6307, 6309, 6311, 6313, 6315, 6317, |
| | | | | | | | 6319, 6321, 6323, 6325, 6327, 6329, 6331, 6333, 6335, 6337, |
| | | | | | | | 6339, 6341, 6343, 6345, 6347, 6349, 6351, 6353, 6355, 6357, |
| | | | | | | | 6359, 6361, 6363, 6365, 6367, 6369, 6371, 6373, 6375, 6377, |
| | | | | | | | 6379, 6381, 6383, 6385, 6387, 6389, 6391, 6393, 6395, 6397, |
| | | | | | | | 6399, 6401, 6403, 6405, 6407, 6409, 6411, 6413, 6415, 6417, |
| | | | | | | | 6419, 6421, 6423, 6425, 6427, 6429, 6431, 6433, 6435, 6437, |
| | | | | | | | 6439, 6441, 6443, 6445, 6447, 6449, 6451, 6453, 6455, 6457, |
| | | | | | | | 6459, 6461, 6463, 6465, 6467, 6469, 6471, 6473 |
| 1 | 66 | LW1_OEX_PCT | B4390 | E. coli | 6501* | non-targeted | 6503, 6505, 6507, 6509, 6511, 6513, 6515, 6517, 6519, 6521, |
| | | | | | | | 6523, 6525, 6527, 6529 |
| 1 | 67 | LW1_OEX_PCT | SII0290 | Syne- | 6543 | non-targeted | 6545, 6547, 6549, 6551, 6553, 6555, 6557, 6559, 6561, 6563, |
| | | | | cho- | | | |
| | | | | cystis | | | |
| | | | | | | | 6565, 6567, 6569, 6571, 6573, 6575, 6577, 6579, 6581, 6583, |
| | | | | | | | 6585, 6587, 6589, 6591, 6593, 6595, 6597, 6599, 6601, 6603, |
| | | | | | | | 6605, 6607, 6609, 6611, 6613, 6615, 6617, 6619, 6621, 6623, |
| | | | | | | | 6625, 6627, 6629, 6631, 6633, 6635, 6637, 6639, 6641, 6643, |
| | | | | | | | 6645, 6647, 6649, 6651, 6653, 6655, 6657, 6659, 6661, 6663, |
| | | | | | | | 6665, 6667, 6669, 6671, 6673, 6675, 6677, 6679, 6681, 6683, |
| | | | | | | | 6685, 6687, 6689, 6691, 6693, 6695, 6697, 6699, 6701, 6703, |
| | | | | | | | 6705, 6707, 6709, 6711, 6713, 6715, 6717, 6719, 6721, 6723, |
| | | | | | | | 6725, 6727, 6729, 6731, 6733, 6735, 6737, 6739, 6741, 6743, |
| | | | | | | | 6745, 6747, 6749, 6751, 6753, 6755, 6757, 6759, 6761, 6763, |
| | | | | | | | 6765, 6767, 6769, 6771, 6773, 6775, 6777, 6779, 6781, 6783, |
| | | | | | | | 6785, 6787, 6789, 6791, 6793, 6795, 6797, 6799, 6801, 6803, |
| | | | | | | | 6805, 6807, 6809, 6811 |
| 1 | 68 | LW1_OEX_PCT | YAL049C | Yeast | 6824 | non-targeted | 6826, 6828, 6830, 6832, 6834, 6836, 6838, 6840, 6842, 6844, |
| | | | | | | | 6846, 6848, 6850, 6852, 6854, 6856, 6858, 6860, 6862 |
| 1 | 69 | LW1_OEX_PCT | YCR059C | Yeast | 6871 | non-targeted | 6873, 6875, 6877, 6879, 6881, 6883, 6885, 6887, 6889, 6891, |
| | | | | | | | 6893, 6895, 6897, 6899, 6901 |
| 1 | 70 | LW1_OEX_PCT | YDR035W | Yeast | 6911 | plastidic | 6913, 6915, 6917, 6919, 6921, 6923, 6925, 6927, 6929, 6931, |
| | | | | | | | 6933, 6935, 6937, 6939, 6941, 6943, 6945, 6947, 6949, 6951, |
| | | | | | | | 6953, 6955, 6957, 6959, 6961, 6963, 6965, 6967, 6969, 6971, |
| | | | | | | | 6973, 6975, 6977, 6979, 6981, 6983, 6985, 6987, 6989, 6991, |
| | | | | | | | 6993, 6995, 6997, 6999, 7001, 7003, 7005, 7007, 7009, 7011, |
| | | | | | | | 7013, 7015, 7017, 7019, 7021, 7023, 7025, 7027, 7029, 7031, |
| | | | | | | | 7033, 7035, 7037, 7039, 7041, 7043, 7045, 7047, 7049, 7051, |
| | | | | | | | 7053, 7055, 7057, 7059, 7061, 7063, 7065, 7067, 7069, 7071, |
| | | | | | | | 7073, 7075, 7077, 7079, 7081, 7083, 7085, 7087, 7089, 7091, |
| | | | | | | | 7093, 7095, 7097, 7099, 7101, 7103, 7105, 7107, 7109, 7111, |
| | | | | | | | 7113, 7115, 7117, 7119, 7121, 7123, 7125, 7127, 7129, 7131, |
| | | | | | | | 7133, 7135, 7137, 7139, 7141, 7143, 7145, 7147, 7149, 7151, |
| | | | | | | | 7153, 7155, 7157, 7159, 7161, 7163, 7165, 7167, 7169, 7171, |
| | | | | | | | 7173, 7175, 7177, 7179, 7181, 7183, 7185, 7187, 7189, 7191, |
| | | | | | | | 7193, 7195, 7197, 7199, 7201, 7203, 7205, 7207, 7209, 7211, |
| | | | | | | | 7213, 7215, 7217, 7219, 7221, 7223, 7225, 7227, 7229, 7231, |
| | | | | | | | 7233, 7235, 7237, 7239, 7241, 7243, 7245, 7247, 7249 |
| 1 | 71 | LW1_OEX_PCT | YEL005C | Yeast | 7262 | non-targeted | — |
| 1 | 72 | LW1_OEX_PCT | YER112W | Yeast | 7266* | non-targeted | 7268 |
| 1 | 73 | LW1_OEX_PCT | YER156C | Yeast | 7302 | non-targeted | 7304, 7306, 7308, 7310, 7312, 7314, 7316, 7318, 7320, 7322, |
| | | | | | | | 7324, 7326, 7328, 7330, 7332, 7334, 7336, 7338, 7340, 7342, |
| | | | | | | | 7344, 7346, 7348, 7350, 7352, 7354, 7356, 7358, 7360, 7362, |
| | | | | | | | 7364, 7366, 7368 |
| 1 | 74 | LW1_OEX_PCT | YER173W | Yeast | 7385 | non-targeted | 7387, 7389, 7391, 7393 |
| 1 | 75 | LW1_OEX_PCT | YGL045W | Yeast | 7408* | non-targeted | 7410, 7412, 7414, 7416 |
| 1 | 76 | LW1_OEX_PCT | YGL189C | Yeast | 7430 | non-targeted | 7432, 7434, 7436, 7438, 7440, 7442, 7444, 7446, 7448, 7450, |
| | | | | | | | 7452, 7454, 7456, 7458, 7460, 7462, 7464, 7466, 7468, 7470, |
| | | | | | | | 7472, 7474, 7476, 7478, 7480, 7482, 7484, 7486 |
| 1 | 77 | LW1_OEX_PCT | YNR015W | Yeast | 7559 | non-targeted | 7561, 7563, 7565, 7567, 7569, 7571, 7573, 7575, 7577, 7579, |
| | | | | | | | 7581, 7583, 7585, 7587, 7589, 7591, 7593 |
| 1 | 78 | LW1_OEX_PCT | YOR024W | Yeast | 7607 | non-targeted | — |
| 1 | 79 | LW1_OEX_PCT | YOR168W | Yeast | 7611* | non-targeted | 7613, 7615, 7617, 7619, 7621, 7623, 7625, 7627, 7629, 7631, |
| | | | | | | | 7633, 7635, 7637, 7639, 7641, 7643, 7645, 7647, 7649, 7651 |
| 1 | 80 | LW1_OEX_PCT | YPL151C | Yeast | 7686 | non-targeted | 7688, 7690, 7692, 7694, 7696, 7698, 7700, 7702, 7704, 7706, |
| | | | | | | | 7708, 7710, 7712, 7714, 7716, 7718, 7720, 7722, 7724, 7726 |
| 1 | 81 | LW1_OEX_PCT | B1297 | E. coli | 1202* | plastidic | 1204, 1206, 1208, 1209, 1211, 1213, 1215, 1217, 1219, 1221, |
| | | | | | | | 1223, 1225, 1227, 1229, 1231, 1233, 1235, 1237, 1239, 1241, |
| | | | | | | | 1243, 1245, 1247, 1249, 1251, 1253, 1255, 1257, 1259, 1261, |
| | | | | | | | 1263, 1265, 1267, 1269, 1271, 1273, 1275, 1277, 1279, 1281, |
| | | | | | | | 1283, 1285, 1287, 1289, 1291, 1293, 1295, 1297 |
| 1 | 82 | LW1_OEX_PCT | B0970 | E. coli | 7742 | non-targeted | 7744, 7746, 7748, 7750, 7752, 7754, 7756, 7758, 7760, 7762, |
| | | | | | | | 7764, 7766, 7768, 7770, 7772, 7774, 7776, 7778, 7780, 7782, |
| | | | | | | | 7784, 7786, 7788, 7790, 7792, 7794, 7796, 7798, 7800, 7802, |
| | | | | | | | 7804, 7806, 7808, 7810, 7812, 7814, 7816, 7818, 7820, 7822, |
| | | | | | | | 7824, 7826, 7828, 7830, 7832, 7834, 7836, 7838, 7840, 7842 |
| 1 | 83 | LW1_OEX_PCT | B1829 | E. coli | 7851 | non-targeted | 7853, 7855, 7857, 7859, 7861, 7863, 7865, 7867, 7869, 7871, |
| | | | | | | | 7873, 7875, 7877, 7879, 7881, 7883, 7885, 7887, 7889, 7891, |
| | | | | | | | 7893, 7895, 7897, 7899, 7901, 7903, 7905, 7907, 7909, 7911, |
| | | | | | | | 7913, 7915, 7917, 7919, 7921, 7923, 7925, 7927, 7929, 7931, |
| | | | | | | | 7933, 7935, 7937, 7939, 7941, 7943, 7945, 7947, 7949, 7951, |
| | | | | | | | 7953, 7955, 7957, 7959, 7961 |
| 1 | 84 | LW1_OEX_PCT | B2664 | E. coli | 7972* | non-targeted | 7974, 7976, 7978, 7980, 7982, 7984, 7986, 7988, 7990, 7992, |
| | | | | | | | 7994, 7996, 7998, 8000, 8002, 8004, 8006, 8008, 8010, 8012, |
| | | | | | | | 8014 |
| 1 | 85 | LW1_OEX_PCT | B2796 | E. coli | 8022 | non-targeted | 8024, 8026, 8028, 8030, 8032, 8034, 8036, 8038, 8040, 8042, |
| | | | | | | | 8044, 8046, 8048, 8050, 8052, 8054, 8056, 8058, 8060, 8062, |
| | | | | | | | 8064, 8066, 8068, 8070, 8072, 8074, 8076, 8078, 8080, 8082, |
| | | | | | | | 8084, 8086, 8088, 8090, 8092, 8094, 8096, 8098, 8100, 8102, |
| | | | | | | | 8104, 8106, 8108, 8110, 8112, 8114, 8116, 8118, 8120, 8122, |
| | | | | | | | 8124, 8126, 8128, 8130, 8132, 8134, 8136, 8138, 8140, 8142, |
| | | | | | | | 8144, 8146, 8148, 8150, 8152, 8154, 8156, 8158, 8160, 8162, |
| | | | | | | | 8164, 8166 |
| 1 | 86 | LW1_OEX_PCT | YER174C | Yeast | 8178 | non-targeted | 8180, 8182, 8184, 8186, 8188, 8190, 8192, 8194, 8196, 8198, |
| | | | | | | | 8200, 8202, 8204, 8206, 8208, 8210, 8212, 8214, 8216, 8218, |
| | | | | | | | 8220, 8222, 8224, 8226, 8228, 8230, 8232 |
| 1 | 87 | LW1_OEX_PCT | YFR042W | Yeast | 8273 | non-targeted | 8275, 8277, 8279, 8281 |
| 1 | 88 | LW1_OEX_PCT | YKR057W | Yeast | 8289 | non-targeted | 8291, 8293, 8295, 8297, 8299, 8301, 8303, 8305, 8307, 8309, |
| | | | | | | | 8311, 8313, 8315, 8317, 8319, 8321, 8323, 8325, 8327, 8329, |
| | | | | | | | 8331, 8333, 8335, 8337, 8339, 8341, 8343, 8345, 8347, 8349, |
| | | | | | | | 8351, 8353, 8355, 8357, 8359, 8361, 8363, 8365, 8367, 8369, |
| | | | | | | | 8371, 8373, 8375, 8377 |
| 1 | 89 | LW1_OEX_PCT | B0629_2 | E. coli | 8439 | non-targeted | 8441, 8443, 8445, 8447, 8449, 8451 |
| 1 | 90 | LW1_OEX_PCT | B1007_2 | E. coli | 8631 | non-targeted | 8633, 8635, 8637, 8639, 8641, 8643, 8645, 8647, 8649, 8651, |
| | | | | | | | 8653, 8655, 8657, 8659, 8661, 8663, 8665, 8667, 8669, 8671, |
| | | | | | | | 8673, 8675, 8677, 8679, 8681, 8683, 8685, 8687, 8689, 8691, |
| | | | | | | | 8693, 8695, 8697, 8699, 8701, 8703, 8705, 8707, 8709, 8711, |
| | | | | | | | 8713, 8715, 8717, 8719, 8721, 8723, 8725, 8727, 8729, 8731, |
| | | | | | | | 8733, 8735, 8737 |
| 1 | 91 | LW1_OEX_PCT | B2715_2 | E. coli | 9269 | plastidic | 9271, 9273, 9275, 9277, 9279, 9281, 9283, 9285, 9287, 9289, |
| | | | | | | | 9291, 9293, 9295, 9297, 9299, 9301, 9303, 9305 |
| 1 | 92 | LW1_OEX_PCT | B3899_2 | E. coli | 9445 | non-targeted | 9447, 9449, 9451, 9453, 9455, 9457, 9459, 9461, 9463, 9465, |
| | | | | | | | 9467, 9469, 9471, 9473, 9475, 9477, 9479, 9481, 9483, 9485, |
| | | | | | | | 9487, 9489, 9491, 9493, 9495, 9497, 9499, 9501, 9503, 9505, |
| | | | | | | | 9507, 9509, 9511, 9513, 9515, 9517, 9519, 9521, 9523 |
| 1 | 93 | LW1_OEX_PCT | B4390_2 | E. coli | 9825 | non-targeted | 9827, 9829, 9831, 9833, 9835, 9837, 9839, 9841, 9843, 9845, |
| | | | | | | | 9847, 9849, 9851, 9853, 9855, 9857, 9859, 9861, 9863, 9865, |
| | | | | | | | 9867, 9869 |
| 1 | 94 | LW1_OEX_PCT | YGL045W_2 | Yeast | 9906 | non-targeted | 9908, 9910, 9912, 9914, 9916, 9918, 9920, 9922, 9924 |
| 1 | 95 | LW1_OEX_PCT | B2664_2 | E. coli | 9194 | non-targeted | 9196, 9198, 9200, 9202, 9204, 9206, 9208, 9210, 9212, 9214, |
| | | | | | | | 9216, 9218, 9220, 9222, 9224, 9226, 9228, 9230, 9232, 9234, |
| | | | | | | | 9236, 9238, 9240, 9242, 9244, 9246, 9248, 9250, 9252, 9254, |
| | | | | | | | 9256, 9258, 9260, 9262 |
| 1 | 96 | LW1_OEX_PCT | B0963_2 | E. coli | 8498 | non-targeted | 8500, 8502, 8504, 8506, 8508, 8510, 8512, 8514, 8516, 8518, |
| | | | | | | | 8520, 8522, 8524, 8526, 8528, 8530, 8532, 8534, 8536, 8538, |
| | | | | | | | 8540, 8542, 8544, 8546, 8548, 8550, 8552, 8554, 8556, 8558, |
| | | | | | | | 8560, 8562, 8564, 8566, 8568, 8570, 8572, 8574, 8576, 8578, |
| | | | | | | | 8580, 8582, 8584, 8586, 8588, 8590, 8592, 8594, 8596, 8598, |
| | | | | | | | 8600, 8602, 8604, 8606, 8608, 8610, 8612, 8614, 8616, 8618, |
| | | | | | | | 8620, 8622, 8624 |
| 1 | 97 | LW1_OEX_PCT | B1297_2 | E. coli | 8743 | plastidic | 8745, 8747, 8749, 8751, 8753, 8755, 8757, 8759, 8761, 8763, |
| | | | | | | | 8765, 8767, 8769, 8771, 8773, 8775, 8777, 8779, 8781, 8783, |
| | | | | | | | 8785, 8787, 8789, 8791, 8793, 8795, 8797, 8799, 8801, 8803, |
| | | | | | | | 8805, 8807, 8809, 8811, 8813, 8815, 8817, 8819, 8821, 8823, |
| | | | | | | | 8825, 8827, 8829, 8831, 8833, 8835, 8837, 8839, 8841, 8843, |
| | | | | | | | 8845, 8847, 8849, 8851, 8853, 8855, 8857, 8859, 8861, 8863, |
| | | | | | | | 8865, 8867, 8869, 8871, 8873, 8875, 8877, 8879, 8881, 8883 |
| 1 | 98 | LW1_OEX_PCT | B1597_2 | E. coli | 8892 | non-targeted | 8894, 8896, 8898, 8900, 8902, 8904, 8906, 8908, 8910, 8912, |
| | | | | | | | 8914, 8916, 8918, 8920, 8922, 8924, 8926, 8928 |
| 1 | 99 | LW1_OEX_PCT | B2027_2 | E. coli | 9032 | non-targeted | 9034, 9036, 9038, 9040, 9042, 9044, 9046, 9048, 9050, 9052, |
| | | | | | | | 9054, 9056, 9058, 9060, 9062, 9064, 9066, 9068, 9070, 9072, |
| | | | | | | | 9074, 9076, 9078, 9080, 9082, 9084, 9086 |
| 1 | 100 | LW1_OEX_PCT | B2965_2 | E. coli | 9316 | plastidic | 9318, 9320, 9322, 9324, 9326, 9328, 9330, 9332, 9334, 9336, |
| | | | | | | | 9338, 9340, 9342, 9344, 9346, 9348, 9350, 9352, 9354, 9356, |
| | | | | | | | 9358, 9360, 9362, 9364, 9366, 9368, 9370, 9372, 9374, 9376, |
| | | | | | | | 9378, 9380, 9382, 9384, 9386, 9388, 9390, 9392, 9394, 9396, |
| | | | | | | | 9398, 9400, 9402, 9404, 9406, 9408, 9410, 9412, 9414, 9416, |
| | | | | | | | 9418, 9420, 9422, 9424, 9426, 9428, 9430 |
| 1 | 101 | LW1_OEX_PCT | B4139_2 | E. coli | 9530 | plastidic | 9532, 9534, 9536, 9538, 9540, 9542, 9544, 9546, 9548, 9550, |
| | | | | | | | 9552, 9554, 9556, 9558, 9560, 9562, 9564, 9566, 9568, 9570, |
| | | | | | | | 9572, 9574, 9576, 9578, 9580, 9582, 9584, 9586, 9588, 9590, |
| | | | | | | | 9592, 9594, 9596, 9598, 9600, 9602, 9604, 9606, 9608, 9610, |
| | | | | | | | 9612, 9614, 9616, 9618, 9620, 9622, 9624, 9626, 9628, 9630, |
| | | | | | | | 9632, 9634, 9636, 9638, 9640, 9642, 9644, 9646, 9648, 9650, |
| | | | | | | | 9652, 9654, 9656, 9658, 9660, 9662, 9664, 9666, 9668, 9670, |
| | | | | | | | 9672, 9674, 9676, 9678, 9680, 9682, 9684, 9686, 9688, 9690, |
| | | | | | | | 9692, 9694, 9696, 9698, 9700, 9702, 9704, 9706, 9708, 9710, |
| | | | | | | | 9712, 9714, 9716, 9718, 9720, 9722, 9724, 9726, 9728, 9730, |
| | | | | | | | 9732, 9734, 9736, 9738, 9740, 9742, 9744, 9746, 9748, 9750, |
| | | | | | | | 9752, 9754, 9756, 9758, 9760, 9762, 9764, 9766, 9768, 9770, |
| | | | | | | | 9772, 9774, 9776, 9778, 9780, 9782, 9784, 9786, 9788, 9790, |
| | | | | | | | 9792, 9794, 9796, 9798, 9800, 9802, 9804 |
| 1 | 102 | LW1_OEX_PCT | B0845_2 | E. coli | 8463 | non-targeted | 8465, 8467, 8469, 8471, 8473, 8475, 8477, 8479, 8481, 8483, |
| | | | | | | | 8485 |
| 1 | 103 | LW1_OEX_PCT | B1901_2 | E. coli | 8974 | plastidic | 8976, 8978, 8980, 8982, 8984, 8986, 8988, 8990, 8992, 8994, |
| | | | | | | | 8996, 8998, 9000, 9002, 9004, 9006, 9008, 9010, 9012, 9014, |
| | | | | | | | 9016, 9018, 9020, 9022 |
| 1 | 104 | LW1_OEX_PCT | YER112W_2 | Yeast | 9884 | non-targeted | 9886 |
| 1 | 105 | LW1_OEX_PCT | B1798_2 | E. coli | 8935 | non-targeted | 8937, 8939, 8941, 8943, 8945, 8947, 8949, 8951, 8953, 8955, |
| | | | | | | | 8957, 8959, 8961, 8963, 8965 |
| 1 | 106 | LW1_OEX_PCT | B2226_2 | E. coli | 9094 | non-targeted | 9096, 9098, 9100, 9102 |
| 1 | 107 | LW1_OEX_PCT | B2469_2 | E. coli | 9110 | non-targeted | 9112, 9114, 9116, 9118, 9120, 9122, 9124, 9126, 9128, 9130, |
| | | | | | | | 9132, 9134, 9136, 9138, 9140, 9142, 9144, 9146, 9148, 9150, |
| | | | | | | | 9152, 9154, 9156, 9158, 9160, 9162, 9164, 9166, 9168, 9170, |
| | | | | | | | 9172, 9174, 9176, 9178, 9180, 9182 |
| 1 | 108 | LW1_OEX_PCT | YOR168W_2 | Yeast | 9932 | non-targeted | 9934, 9936, 9938, 9940, 9942, 9944, 9946, 9948, 9950, 9952, |
| | | | | | | | 9954, 9956, 9958, 9960, 9962, 9964, 9966, 9968, 9970, 9972 |
| 1 | 109 | LW1_OEX_PCT | B4321 | E. coli | 10097 | non-targeted | 10099, 10101, 10103, 10105, 10107, 10109, 10111, 10113, |
| | | | | | | | 10115, 10117, 10119, 10121, 10123, 10125, 10127, 10129, |
| | | | | | | | 10131, 10133, 10135, 10137, 10139, 10141, 10143, 10145, |
| | | | | | | | 10147, 10149, 10151, 10153, 10155, 10157, 10159, 10161, |
| | | | | | | | 10163, 10165, 10167, 10169, 10171, 10173, 10175, 10177, |
| | | | | | | | 10179, 10181, 10183, 10185, 10187, 10189, 10191, 10193, |
| | | | | | | | 10195, 10197, 10199, 10201, 10203, 10205, 10207, 10209, |
| | | | | | | | 10211, 10213, 10215, 10217, 10219, 10221, 10223, 10225, |
| | | | | | | | 10227, 10229, 10231, 10233, 10235, 10237, 10239, 10241, |
| | | | | | | | 10243, 10245, 10247, 10249 |

*Sequences marked with asterisk * reflect the respective sequence derived from public data bases information

TABLE IIB
Amino acid sequence ID numbers

| | | | | | 5. | | |
|---|---|---|---|---|---|---|---|
| | 1. | 2. | 3. | 4. | Lead | 6. | 7. |
| Application | Hit | Project | Locus | Organism | SEQ ID | Target | SEQ IDs of Polypeptide Homologs |
| 1 | 1 | LW1_OEX_PCT | B0081 | E. coli | 39 | non-targeted | — |
| 1 | 2 | LW1_OEX_PCT | B0445 | E. coli | 55 | non-targeted | — |
| 1 | 3 | LW1_OEX_PCT | B0482 | E. coli | 71 | non-targeted | — |
| 1 | 4 | LW1_OEX_PCT | B0607 | E. coli | 90 | non-targeted | — |
| 1 | 5 | LW1_OEX_PCT | B0629 | E. coli | 144* | non-targeted | — |
| 1 | 6 | LW1_OEX_PCT | B0631 | E. coli | 163 | non-targeted | — |
| 1 | 7 | LW1_OEX_PCT | B0697 | E. coli | 214 | non-targeted | — |
| 1 | 8 | LW1_OEX_PCT | B0753 | E. coli | 359 | non-targeted | — |
| 1 | 9 | LW1_OEX_PCT | B0813 | E. coli | 368 | non-targeted | — |
| 1 | 10 | LW1_OEX_PCT | B0845 | E. coli | 421* | non-targeted | — |
| 1 | 11 | LW1_OEX_PCT | B0866 | E. coli | 456 | non-targeted | — |
| 1 | 12 | LW1_OEX_PCT | B0963 | E. coli | 536* | non-targeted | — |
| 1 | 13 | LW1_OEX_PCT | B0975 | E. coli | 619 | non-targeted | — |
| 1 | 14 | LW1_OEX_PCT | B1007 | E. coli | 672* | non-targeted | — |
| 1 | 15 | LW1_OEX_PCT | B1052 | E. coli | 765 | non-targeted | — |
| 1 | 16 | LW1_OEX_PCT | B1091 | E. coli | 769 | plastidic | 891, 893, 895 |
| 1 | 17 | LW1_OEX_PCT | B1161 | E. coli | 908 | non-targeted | — |
| 1 | 18 | LW1_OEX_PCT | B1186 | E. coli | 928 | non-targeted | — |
| 1 | 19 | LW1_OEX_PCT | B1291 | E. coli | 1010 | plastidic | — |
| 1 | 20 | LW1_OEX_PCT | B1294 | E. coli | 1155 | plastidic | — |
| 1 | 21 | LW1_OEX_PCT | B1423 | E. coli | 1309 | non-targeted | — |
| 1 | 22 | LW1_OEX_PCT | B1597 | E. coli | 1369* | non-targeted | — |
| 1 | 23 | LW1_OEX_PCT | B1605 | E. coli | 1375 | non-targeted | — |
| 1 | 24 | LW1_OEX_PCT | B1704 | E. coli | 1508 | non-targeted | — |
| 1 | 25 | LW1_OEX_PCT | B1736 | E. coli | 1954 | plastidic | — |
| 1 | 26 | LW1_OEX_PCT | B1798 | E. coli | 2157* | non-targeted | — |
| 1 | 27 | LW1_OEX_PCT | B1878 | E. coli | 2196 | non-targeted | — |
| 1 | 28 | LW1_OEX_PCT | B1901 | E. coli | 2220* | plastidic | — |
| 1 | 29 | LW1_OEX_PCT | B1912 | E. coli | 2278 | plastidic | 2458, 2460, 2462, 10013 |
| 1 | 30 | LW1_OEX_PCT | B2027 | E. coli | 2471* | non-targeted | — |
| 1 | 31 | LW1_OEX_PCT | B2039 | E. coli | 2494 | non-targeted | — |
| 1 | 32 | LW1_OEX_PCT | B2075 | E. coli | 2628 | non-targeted | — |
| 1 | 33 | LW1_OEX_PCT | B2153 | E. coli | 2859 | plastidic | — |
| 1 | 34 | LW1_OEX_PCT | B2194 | E. coli | 2943 | non-targeted | — |
| 1 | 35 | LW1_OEX_PCT | B2226 | E. coli | 2966* | non-targeted | — |
| 1 | 36 | LW1_OEX_PCT | B2309 | E. coli | 2982 | plastidic | — |
| 1 | 37 | LW1_OEX_PCT | B2469 | E. coli | 3131* | non-targeted | — |
| 1 | 38 | LW1_OEX_PCT | B2475 | E. coli | 3217 | non-targeted | — |
| 1 | 39 | LW1_OEX_PCT | B2482 | E. coli | 3336 | non-targeted | — |
| 1 | 40 | LW1_OEX_PCT | B2541 | E. coli | 3402 | non-targeted | 3556, 3558, 3560, 3562, 3564, |
| | | | | | | | 3566, 3568, 3570, 3572, 3574, |
| | | | | | | | 3576, 3578, 3580, 3582, 3584, 10017, 10019 |
| 1 | 41 | LW1_OEX_PCT | B2559 | E. coli | 3591 | plastidic | 3803, 3805, 3807, 3809, 3811, |
| | | | | | | | 3813, 3815, 3817, 3819, 3821, |
| | | | | | | | 3823, 3825 |
| 1 | 42 | LW1_OEX_PCT | B2605 | E. coli | 3832 | non-targeted | — |
| 1 | 43 | LW1_OEX_PCT | B2630 | E. coli | 3858 | non-targeted | — |
| 1 | 44 | LW1_OEX_PCT | B2678 | E. coli | 3862 | plastidic | — |
| 1 | 45 | LW1_OEX_PCT | B2715 | E. coli | 4023* | plastidic | — |
| 1 | 46 | LW1_OEX_PCT | B2776 | E. coli | 4060 | non-targeted | — |
| 1 | 47 | LW1_OEX_PCT | B2791 | E. coli | 4077 | non-targeted | — |
| 1 | 48 | LW1_OEX_PCT | B2912 | E. coli | 4158 | non-targeted | — |
| 1 | 49 | LW1_OEX_PCT | B2965 | E. coli | 4261* | plastidic | — |
| 1 | 50 | LW1_OEX_PCT | B2987 | E. coli | 4351 | plastidic | — |
| 1 | 51 | LW1_OEX_PCT | B2987 | E. coli | 4351 | non-targeted | — |
| 1 | 52 | LW1_OEX_PCT | B3093 | E. coli | 4460 | plastidic | — |
| 1 | 53 | LW1_OEX_PCT | B3363 | E. coli | 4506 | plastidic | 4600, 4602, 4604, 4606, 4608, 4610, 4612, 4614, |
| | | | | | | | 4616, 4618, 4620, 4622, 4624, 4626, 4628, |
| | | | | | | | 4630, 4632, 4634, 10023, 10025, 10027, 10029, |
| | | | | | | | 10031, 10033, 10035, 10037 |
| 1 | 54 | LW1_OEX_PCT | B3429 | E. coli | 4641 | plastidic | — |
| 1 | 55 | LW1_OEX_PCT | B3568 | E. coli | 4807 | plastidic | — |
| 1 | 56 | LW1_OEX_PCT | B3616 | E. coli | 5125 | plastidic | 5345, 5347, 5349, 5351, |
| | | | | | | | 5353, 5355, 5357, 5359, 5361, 5363, |
| | | | | | | | 5365, 5367, 5369, 5371, 5373, 5375, |
| | | | | | | | 5377, 5379, 5381, 5383, |
| | | | | | | | 5385, 5387, 5389, 5391, 5393, 5395, 5397, |
| | | | | | | | 5399, 5401, 5403, |
| | | | | | | | 5405, 5407, 5409, 5411, 10041, 10043, 10045, |
| | | | | | | | 10047, 10049, |
| | | | | | | | 10051, 10053, 10055, 10057 |
| 1 | 57 | LW1_OEX_PCT | B3616 | E. coli | 5125 | non-targeted | 5345, 5347, 5349, 5351, 5353, 5355, |
| | | | | | | | 5357, 5359, 5361, 5363, |
| | | | | | | | 5365, 5367, 5369, 5371, 5373, |
| | | | | | | | 5375, 5377, 5379, 5381, 5383, |
| | | | | | | | 5385, 5387, 5389, 5391, 5393, 5395, |
| | | | | | | | 5397, 5399, 5401, 5403, |
| | | | | | | | 5405, 5407, 5409, 5411, 10041, 10043, |
| | | | | | | | 10045, 10047, 10049, |
| | | | | | | | 10051, 10053, 10055, 10057 |
| 1 | 58 | LW1_OEX_PCT | B3812 | E. coli | 5418 | non-targeted | — |
| 1 | 59 | LW1_OEX_PCT | B3899 | E. coli | 5496* | non-targeted | — |
| 1 | 60 | LW1_OEX_PCT | B3929 | E. coli | 5586 | plastidic | 5778, 5780, 5782, 5784, 5786, 5788, |
| | | | | | | | 5790, 5792, 5794, 10061 |
| 1 | 61 | LW1_OEX_PCT | B3938 | E. coli | 5801 | non-targeted | — |
| 1 | 62 | LW1_OEX_PCT | B3974 | E. coli | 5851 | non-targeted | — |
| 1 | 63 | LW1_OEX_PCT | B3989 | E. coli | 5993 | non-targeted | — |
| 1 | 64 | LW1_OEX_PCT | B4029 | E. coli | 6000 | non-targeted | — |
| 1 | 65 | LW1_OEX_PCT | B4139 | E. coli | 6057* | plastidic | 6475, 6477, 6479, 6481, 6483, 6485, 6487, 10069 |
| 1 | 66 | LW1_OEX_PCT | B4390 | E. coli | 6501* | non-targeted | — |
| 1 | 67 | LW1_OEX_PCT | SII0290 | Synechocystis | 6543 | non-targeted | — |
| 1 | 68 | LW1_OEX_PCT | YAL049C | Yeast | 6824 | non-targeted | 10073, 10075 |
| 1 | 69 | LW1_OEX_PCT | YCR059C | Yeast | 6871 | non-targeted | — |
| 1 | 70 | LW1_OEX_PCT | YDR035W | Yeast | 6911 | plastidic | — |
| 1 | 71 | LW1_OEX_PCT | YEL005C | Yeast | 7262 | non-targeted | — |
| 1 | 72 | LW1_OEX_PCT | YER112W | Yeast | 7266* | non-targeted | 7270, 7272, 7274, 7276, 7278, |
| | | | | | | | 7280, 7282, 7284, 7286, 7288, |
| | | | | | | | 7290, 7292, 7294, 7296 |
| 1 | 73 | LW1_OEX_PCT | YER156C | Yeast | 7302 | non-targeted | 7370, 7372, 7374, 10079 |
| 1 | 74 | LW1_OEX_PCT | YER173W | Yeast | 7385 | non-targeted | — |
| 1 | 75 | LW1_OEX_PCT | YGL045W | Yeast | 7408* | non-targeted | — |
| 1 | 76 | LW1_OEX_PCT | YGL189C | Yeast | 7430 | non-targeted | 7488, 7490, 7492, 7494, 7496, 7498, |
| | | | | | | | 7500, 7502, 7504, 7506, |
| | | | | | | | 7508, 7510, 7512, 7514, 7516, 7518, |
| | | | | | | | 7520, 7522, 7524, 7526, |
| | | | | | | | 7528, 7530, 7532, 7534, 7536, 7538, |
| | | | | | | | 7540, 7542, 7544, 7546, |
| | | | | | | | 7548, 7550, 7552, 10087, 10089, 10091 |
| 1 | 77 | LW1_OEX_PCT | YNR015W | Yeast | 7559 | non-targeted | 7595, 7597, 10095 |
| 1 | 78 | LW1_OEX_PCT | YOR024W | Yeast | 7607 | non-targeted | — |
| 1 | 79 | LW1_OEX_PCT | YOR168W | Yeast | 7611* | non-targeted | 7653, 7655, 7657, 7659, 7661, 7663, 7665, 7667, |
| | | | | | | | 7669, 7671, 7673 |
| 1 | 80 | LW1_OEX_PCT | YPL151C | Yeast | 7686 | non-targeted | 7728, 7730, 7732 |
| 1 | 81 | LW1_OEX_PCT | B1297 | E. coli | 1202* | plastidic | — |
| 1 | 82 | LW1_OEX_PCT | B0970 | E. coli | 7742 | non-targeted | 10009 |
| 1 | 83 | LW1_OEX_PCT | B1829 | E. coli | 7851 | non-targeted | — |
| 1 | 84 | LW1_OEX_PCT | B2664 | E. coli | 7972* | non-targeted | — |
| 1 | 85 | LW1_OEX_PCT | B2796 | E. coli | 8022 | non-targeted | — |
| 1 | 86 | LW1_OEX_PCT | YER174C | Yeast | 8178 | non-targeted | 8234, 8236, 8238, 8240, 8242, 8244, |
| | | | | | | | 8246, 8248, 8250, 8252, |
| | | | | | | | 8254, 8256, 8258, 8260, 8262, 8264, 8266, 10083 |
| 1 | 87 | LW1_OEX_PCT | YFR042W | Yeast | 8273 | non-targeted | — |
| 1 | 88 | LW1_OEX_PCT | YKR057W | Yeast | 8289 | non-targeted | 8379, 8381, 8383, 8385, 8387, |
| | | | | | | | 8389, 8391, 8393, 8395, 8397, |
| | | | | | | | 8399, 8401, 8403, 8405, 8407, 8409, |
| | | | | | | | 8411, 8413, 8415, 8417, |
| | | | | | | | 8419, 8421, 8423, 8425 |
| 1 | 89 | LW1_OEX_PCT | B0629_2 | E. coli | 8439 | non-targeted | — |
| 1 | 90 | LW1_OEX_PCT | B1007_2 | E. coli | 8631 | non-targeted | — |
| 1 | 91 | LW1_OEX_PCT | B2715_2 | E. coli | 9269 | plastidic | — |
| 1 | 92 | LW1_OEX_PCT | B3899_2 | E. coli | 9445 | non-targeted | — |
| 1 | 93 | LW1_OEX_PCT | B4390_2 | E. coli | 9825 | non-targeted | — |
| 1 | 94 | LW1_OEX_PCT | YGL045W_2 | Yeast | 9906 | non-targeted | — |
| 1 | 95 | LW1_OEX_PCT | B2664_2 | E. coli | 9194 | non-targeted | — |
| 1 | 96 | LW1_OEX_PCT | B0963_2 | E. coli | 8498 | non-targeted | — |
| 1 | 97 | LW1_OEX_PCT | B1297_2 | E. coli | 8743 | plastidic | — |
| 1 | 98 | LW1_OEX_PCT | B1597_2 | E. coli | 8892 | non-targeted | — |
| 1 | 99 | LW1_OEX_PCT | B2027_2 | E. coli | 9032 | non-targeted | — |
| 1 | 100 | LW1_OEX_PCT | B2965_2 | E. coli | 9316 | plastidic | — |
| 1 | 101 | LW1_OEX_PCT | B4139_2 | E. coli | 9530 | plastidic | 9806, 9808, 9810, 9812, 10065 |
| 1 | 102 | LW1_OEX_PCT | B0845_2 | E. coli | 8463 | non-targeted | — |
| 1 | 103 | LW1_OEX_PCT | B1901_2 | E. coli | 8974 | plastidic | — |
| 1 | 104 | LW1_OEX_PCT | YER112W_2 | Yeast | 9884 | non-targeted | 9888, 9890, 9892, 9894, 9896, 9898, 9900 |
| 1 | 105 | LW1_OEX_PCT | B1798_2 | E. coli | 8935 | non-targeted | — |
| 1 | 106 | LW1_OEX_PCT | B2226_2 | E. coli | 9094 | non-targeted | — |
| 1 | 107 | LW1_OEX_PCT | B2469_2 | E. coli | 9110 | non-targeted | — |
| 1 | 108 | LW1_OEX_PCT | YOR168W_2 | Yeast | 9932 | non-targeted | 9974, 9976, 9978, 9980, 9982, 9984, 9986, 9988, |
| | | | | | | | 9990, 9992, 9994 |
| 1 | 109 | LW1_OEX_PCT | B4321 | E. coli | 10097 | non-targeted | — |

*Sequences marked with asterisk * reflect the respective sequence derived from public data bases information

TABLE III
Primer nucleic acid sequence ID numbers

| | | | | | 5. | | |
|---|---|---|---|---|---|---|---|
| | 1. | 2. | 3. | 4. | Lead | 6. | 7. |
| Application | Hit | Project | Locus | Organism | SEQ ID | Target | SEQ IDs of Primers |
| 1 | 1 | LW1_OEX_PCT | B0081 | E. coli | 38 | non-targeted | 48, 49 |
| 1 | 2 | LW1_OEX_PCT | B0445 | E. coli | 54 | non-targeted | 64, 65 |
| 1 | 3 | LW1_OEX_PCT | B0482 | E. coli | 70 | non-targeted | 82, 83 |
| 1 | 4 | LW1_OEX_PCT | B0607 | E. coli | 89 | non-targeted | 139, 140 |
| 1 | 5 | LW1_OEX_PCT | B0629 | E. coli | 143 | non-targeted | 153, 154 |
| 1 | 6 | LW1_OEX_PCT | B0631 | E. coli | 162 | non-targeted | 208, 209 |
| 1 | 7 | LW1_OEX_PCT | B0697 | E. coli | 213 | non-targeted | 341, 342 |
| 1 | 8 | LW1_OEX_PCT | B0753 | E. coli | 358 | non-targeted | 362, 363 |
| 1 | 9 | LW1_OEX_PCT | B0813 | E. coli | 367 | non-targeted | 413, 414 |
| 1 | 10 | LW1_OEX_PCT | B0845 | E. coli | 420 | non-targeted | 444, 445 |
| 1 | 11 | LW1_OEX_PCT | B0866 | E. coli | 455 | non-targeted | 529, 530 |
| 1 | 12 | LW1_OEX_PCT | B0963 | E. coli | 535 | non-targeted | 613, 614 |
| 1 | 13 | LW1_OEX_PCT | B0975 | E. coli | 618 | non-targeted | 666, 667 |
| 1 | 14 | LW1_OEX_PCT | B1007 | E. coli | 671 | non-targeted | 759, 760 |
| 1 | 15 | LW1_OEX_PCT | B1052 | E. coli | 764 | non-targeted | 766, 767 |
| 1 | 16 | LW1_OEX_PCT | B1091 | E. coli | 768 | plastidic | 896, 897 |
| 1 | 17 | LW1_OEX_PCT | B1161 | E. coli | 907 | non-targeted | 923, 924 |
| 1 | 18 | LW1_OEX_PCT | B1186 | E. coli | 927 | non-targeted | 997, 998 |
| 1 | 19 | LW1_OEX_PCT | B1291 | E. coli | 1009 | plastidic | 1145, 1146 |
| 1 | 20 | LW1_OEX_PCT | B1294 | E. coli | 1154 | plastidic | 1188, 1189 |
| 1 | 21 | LW1_OEX_PCT | B1423 | E. coli | 1308 | non-targeted | 1354, 1355 |
| 1 | 22 | LW1_OEX_PCT | B1597 | E. coli | 1368 | non-targeted | 1372, 1373 |
| 1 | 23 | LW1_OEX_PCT | B1605 | E. coli | 1374 | non-targeted | 1496, 1497 |
| 1 | 24 | LW1_OEX_PCT | B1704 | E. coli | 1507 | non-targeted | 1941, 1942 |
| 1 | 25 | LW1_OEX_PCT | B1736 | E. coli | 1953 | plastidic | 2151, 2152 |
| 1 | 26 | LW1_OEX_PCT | B1798 | E. coli | 2156 | non-targeted | 2188, 2189 |
| 1 | 27 | LW1_OEX_PCT | B1878 | E. coli | 2195 | non-targeted | 2213, 2214 |
| 1 | 28 | LW1_OEX_PCT | B1901 | E. coli | 2219 | plastidic | 2269, 2270 |
| 1 | 29 | LW1_OEX_PCT | B1912 | E. coli | 2277 | plastidic | 2463, 2464 |
| 1 | 30 | LW1_OEX_PCT | B2027 | E. coli | 2470 | non-targeted | 2482, 2483 |
| 1 | 31 | LW1_OEX_PCT | B2039 | E. coli | 2493 | non-targeted | 2619, 2620 |
| 1 | 32 | LW1_OEX_PCT | B2075 | E. coli | 2627 | non-targeted | 2847, 2848 |
| 1 | 33 | LW1_OEX_PCT | B2153 | E. coli | 2858 | plastidic | 2934, 2935 |
| 1 | 34 | LW1_OEX_PCT | B2194 | E. coli | 2942 | non-targeted | 2958, 2959 |
| 1 | 35 | LW1_OEX_PCT | B2226 | E. coli | 2965 | non-targeted | 2975, 2976 |
| 1 | 36 | LW1_OEX_PCT | B2309 | E. coli | 2981 | plastidic | 3121, 3122 |
| 1 | 37 | LW1_OEX_PCT | B2469 | E. coli | 3130 | non-targeted | 3206, 3207 |
| 1 | 38 | LW1_OEX_PCT | B2475 | E. coli | 3216 | non-targeted | 3328, 3329 |
| 1 | 39 | LW1_OEX_PCT | B2482 | E. coli | 3335 | non-targeted | 3395, 3396 |
| 1 | 40 | LW1_OEX_PCT | B2541 | E. coli | 3401 | non-targeted | 3585, 3586 |
| 1 | 41 | LW1_OEX_PCT | B2559 | E. coli | 3590 | plastidic | 3826, 3827 |
| 1 | 42 | LW1_OEX_PCT | B2605 | E. coli | 3831 | non-targeted | 3853, 3854 |
| 1 | 43 | LW1_OEX_PCT | B2630 | E. coli | 3857 | non-targeted | 3859, 3860 |
| 1 | 44 | LW1_OEX_PCT | B2678 | E. coli | 3861 | plastidic | 4015, 4016 |
| 1 | 45 | LW1_OEX_PCT | B2715 | E. coli | 4022 | plastidic | 4050, 4051 |
| 1 | 46 | LW1_OEX_PCT | B2776 | E. coli | 4059 | non-targeted | 4071, 4072 |
| 1 | 47 | LW1_OEX_PCT | B2791 | E. coli | 4076 | non-targeted | 4148, 4149 |
| 1 | 48 | LW1_OEX_PCT | B2912 | E. coli | 4157 | non-targeted | 4255, 4256 |
| 1 | 49 | LW1_OEX_PCT | B2965 | E. coli | 4260 | plastidic | 4332, 4333 |
| 1 | 50 | LW1_OEX_PCT | B2987 | E. coli | 4350 | plastidic | 4450, 4451 |
| 1 | 51 | LW1_OEX_PCT | B2987 | E. coli | 4350 | non-targeted | 4450, 4451 |
| 1 | 52 | LW1_OEX_PCT | B3093 | E. coli | 4459 | plastidic | 4495, 4496 |
| 1 | 53 | LW1_OEX_PCT | B3363 | E. coli | 4505 | plastidic | 4635, 4636 |
| 1 | 54 | LW1_OEX_PCT | B3429 | E. coli | 4640 | plastidic | 4798, 4799 |
| 1 | 55 | LW1_OEX_PCT | B3568 | E. coli | 4806 | plastidic | 5118, 5119 |
| 1 | 56 | LW1_OEX_PCT | B3616 | E. coli | 5124 | plastidic | 5412, 5413 |
| 1 | 57 | LW1_OEX_PCT | B3616 | E. coli | 5124 | non-targeted | 5412, 5413 |
| 1 | 58 | LW1_OEX_PCT | B3812 | E. coli | 5417 | non-targeted | 5489, 5490 |
| 1 | 59 | LW1_OEX_PCT | B3899 | E. coli | 5495 | non-targeted | 5579, 5580 |
| 1 | 60 | LW1_OEX_PCT | B3929 | E. coli | 5585 | plastidic | 5795, 5796 |
| 1 | 61 | LW1_OEX_PCT | B3938 | E. coli | 5800 | non-targeted | 5844, 5845 |
| 1 | 62 | LW1_OEX_PCT | B3974 | E. coli | 5850 | non-targeted | 5982, 5983 |
| 1 | 63 | LW1_OEX_PCT | B3989 | E. coli | 5992 | non-targeted | 5996, 5997 |
| 1 | 64 | LW1_OEX_PCT | B4029 | E. coli | 5999 | non-targeted | 6041, 6042 |
| 1 | 65 | LW1_OEX_PCT | B4139 | E. coli | 6056 | plastidic | 6488, 6489 |
| 1 | 66 | LW1_OEX_PCT | B4390 | E. coli | 6500 | non-targeted | 6530, 6531 |
| 1 | 67 | LW1_OEX_PCT | SII0290 | Synechocystis | 6542 | non-targeted | 6812, 6813 |
| 1 | 68 | LW1_OEX_PCT | YAL049C | Yeast | 6823 | non-targeted | 6863, 6864 |
| 1 | 69 | LW1_OEX_PCT | YCR059C | Yeast | 6870 | non-targeted | 6902, 6903 |
| 1 | 70 | LW1_OEX_PCT | YDR035W | Yeast | 6910 | plastidic | 7250, 7251 |
| 1 | 71 | LW1_OEX_PCT | YEL005C | Yeast | 7261 | non-targeted | 7263, 7264 |
| 1 | 72 | LW1_OEX_PCT | YER112W | Yeast | 7265 | non-targeted | 7297, 7298 |
| 1 | 73 | LW1_OEX_PCT | YER156C | Yeast | 7301 | non-targeted | 7375, 7376 |
| 1 | 74 | LW1_OEX_PCT | YER173W | Yeast | 7384 | non-targeted | 7394, 7395 |
| 1 | 75 | LW1_OEX_PCT | YGL045W | Yeast | 7407 | non-targeted | 7417, 7418 |
| 1 | 76 | LW1_OEX_PCT | YGL189C | Yeast | 7429 | non-targeted | 7553, 7554 |
| 1 | 77 | LW1_OEX_PCT | YNR015W | Yeast | 7558 | non-targeted | 7598, 7599 |
| 1 | 78 | LW1_OEX_PCT | YOR024W | Yeast | 7606 | non-targeted | 7608, 7609 |
| 1 | 79 | LW1_OEX_PCT | YOR168W | Yeast | 7610 | non-targeted | 7674, 7675 |
| 1 | 80 | LW1_OEX_PCT | YPL151C | Yeast | 7685 | non-targeted | 7733, 7734 |
| 1 | 81 | LW1_OEX_PCT | B1297 | E. coli | 1201 | plastidic | 1298, 1299 |
| 1 | 82 | LW1_OEX_PCT | B0970 | E. coli | 7741 | non-targeted | 7843, 7844 |
| 1 | 83 | LW1_OEX_PCT | B1829 | E. coli | 7850 | non-targeted | 7962, 7963 |
| 1 | 84 | LW1_OEX_PCT | B2664 | E. coli | 7971 | non-targeted | 8015, 8016 |
| 1 | 85 | LW1_OEX_PCT | B2796 | E. coli | 8021 | non-targeted | 8167, 8168 |
| 1 | 86 | LW1_OEX_PCT | YER174C | Yeast | 8177 | non-targeted | 8267, 8268 |
| 1 | 87 | LW1_OEX_PCT | YFR042W | Yeast | 8272 | non-targeted | 8282, 8283 |
| 1 | 88 | LW1_OEX_PCT | YKR057W | Yeast | 8288 | non-targeted | 8426, 8427 |
| 1 | 89 | LW1_OEX_PCT | B0629_2 | E. coli | 8438 | non-targeted | 8452, 8453 |
| 1 | 90 | LW1_OEX_PCT | B1007_2 | E. coli | 8630 | non-targeted | 8738, 8739 |
| 1 | 91 | LW1_OEX_PCT | B2715_2 | E. coli | 9268 | plastidic | 9306, 9307 |
| 1 | 92 | LW1_OEX_PCT | B3899_2 | E. coli | 9444 | non-targeted | 9524, 9525 |
| 1 | 93 | LW1_OEX_PCT | B4390_2 | E. coli | 9824 | non-targeted | 9870, 9871 |
| 1 | 94 | LW1_OEX_PCT | YGL045W_2 | Yeast | 9905 | non-targeted | 9925, 9926 |
| 1 | 95 | LW1_OEX_PCT | B2664_2 | E. coli | 9193 | non-targeted | 9263, 9264 |
| 1 | 96 | LW1_OEX_PCT | B0963_2 | E. coli | 8497 | non-targeted | 8625, 8626 |
| 1 | 97 | LW1_OEX_PCT | B1297_2 | E. coli | 8742 | plastidic | 8884, 8885 |
| 1 | 98 | LW1_OEX_PCT | B1597_2 | E. coli | 8891 | non-targeted | 8929, 8930 |
| 1 | 99 | LW1_OEX_PCT | B2027_2 | E. coli | 9031 | non-targeted | 9087, 9088 |
| 1 | 100 | LW1_OEX_PCT | B2965_2 | E. coli | 9315 | plastidic | 9431, 9432 |
| 1 | 101 | LW1_OEX_PCT | B4139_2 | E. coli | 9529 | plastidic | 9813, 9814 |
| 1 | 102 | LW1_OEX_PCT | B0845_2 | E. coli | 8462 | non-targeted | 8486, 8487 |
| 1 | 103 | LW1_OEX_PCT | B1901_2 | E. coli | 8973 | plastidic | 9023, 9024 |
| 1 | 104 | LW1_OEX_PCT | YER112W_2 | Yeast | 9883 | non-targeted | 9901, 9902 |
| 1 | 105 | LW1_OEX_PCT | B1798_2 | E. coli | 8934 | non-targeted | 8966, 8967 |
| 1 | 106 | LW1_OEX_PCT | B2226_2 | E. coli | 9093 | non-targeted | 9103, 9104 |
| 1 | 107 | LW1_OEX_PCT | B2469_2 | E. coli | 9109 | non-targeted | 9183, 9184 |
| 1 | 108 | LW1_OEX_PCT | YOR168W_2 | Yeast | 9931 | non-targeted | 9995, 9996 |
| 1 | 109 | LW1_OEX_PCT | B4321 | E. coli | 10096 | non-targeted | 10250, 10251 |

TABLE IV
Consensus amino acid sequence ID numbers

| | | | | | 5. | | |
|---|---|---|---|---|---|---|---|
| | 1. | 2. | 3. | 4. | Lead | 6. | 7. |
| Application | Hit | Project | Locus | Organism | SEQ ID | Target | SEQ IDs of Consensus/Pattern Sequences |
| 1 | 1 | LW1_OEX_PCT | B0081 | E. coli | 39 | non-targeted | 50, 51, 52, 53 |
| 1 | 2 | LW1_OEX_PCT | B0445 | E. coli | 55 | non-targeted | 66, 67, 68, 69 |
| 1 | 3 | LW1_OEX_PCT | B0482 | E. coli | 71 | non-targeted | 84, 85, 86, 87, 88 |
| 1 | 4 | LW1_OEX_PCT | B0607 | E. coli | 90 | non-targeted | 141, 142 |
| 1 | 5 | LW1_OEX_PCT | B0629 | E. coli | 144 | non-targeted | 155, 156, 157, 158, 159, 160, 161 |
| 1 | 6 | LW1_OEX_PCT | B0631 | E. coli | 163 | non-targeted | 210, 211, 212 |
| 1 | 7 | LW1_OEX_PCT | B0697 | E. coli | 214 | non-targeted | 343, 344, 345, 346, 347, 348, 349, |
| | | | | | | | 350, 351, 352, 353, 354, 355, |
| | | | | | | | 356, 357 |
| 1 | 8 | LW1_OEX_PCT | B0753 | E. coli | 359 | non-targeted | 364, 365, 366 |
| 1 | 9 | LW1_OEX_PCT | B0813 | E. coli | 368 | non-targeted | 415, 416, 417, 418, 419 |
| 1 | 10 | LW1_OEX_PCT | B0845 | E. coli | 421 | non-targeted | 446, 447, 448, 449, 450, 451, 452, 453, 454 |
| 1 | 11 | LW1_OEX_PCT | B0866 | E. coli | 456 | non-targeted | 531, 532, 533, 534 |
| 1 | 12 | LW1_OEX_PCT | B0963 | E. coli | 536 | non-targeted | 615, 616, 617 |
| 1 | 13 | LW1_OEX_PCT | B0975 | E. coli | 619 | non-targeted | 668, 669, 670 |
| 1 | 14 | LW1_OEX_PCT | B1007 | E. coli | 672 | non-targeted | 761, 762, 763 |
| 1 | 15 | LW1_OEX_PCT | B1052 | E. coli | 765 | non-targeted | — |
| 1 | 16 | LW1_OEX_PCT | B1091 | E. coli | 769 | plastidic | 898, 899, 900, 901, 902, 903, 904, 905, 906 |
| 1 | 17 | LW1_OEX_PCT | B1161 | E. coli | 908 | non-targeted | 925, 926 |
| 1 | 18 | LW1_OEX_PCT | B1186 | E. coli | 928 | non-targeted | 999, 1000, 1001, 1002, 1003, |
| | | | | | | | 1004, 1005, 1006, 1007, 1008 |
| 1 | 19 | LW1_OEX_PCT | B1291 | E. coli | 1010 | plastidic | 1147, 1148, 1149, 1150, 1151, 1152, 1153 |
| 1 | 20 | LW1_OEX_PCT | B1294 | E. coli | 1155 | plastidic | 1190, 1191, 1192, 1193, 1194, 1195, 1196, |
| | | | | | | | 1197, 1198, 1199, 1200 |
| 1 | 21 | LW1_OEX_PCT | B1423 | E. coli | 1309 | non-targeted | 1356, 1357, 1358, 1359, 1360, 1361, 1362, |
| | | | | | | | 1363, 1364, 1365, 1366, 1367 |
| 1 | 22 | LW1_OEX_PCT | B1597 | E. coli | 1369 | non-targeted | — |
| 1 | 23 | LW1_OEX_PCT | B1605 | E. coli | 1375 | non-targeted | 1498, 1499, 1500, 1501, 1502, |
| | | | | | | | 1503, 1504, 1505, 1506 |
| 1 | 24 | LW1_OEX_PCT | B1704 | E. coli | 1508 | non-targeted | 1943, 1944, 1945, 1946, 1947, |
| | | | | | | | 1948, 1949, 1950, 1951, 1952 |
| 1 | 25 | LW1_OEX_PCT | B1736 | E. coli | 1954 | plastidic | 2153, 2154, 2155 |
| 1 | 26 | LW1_OEX_PCT | B1798 | E. coli | 2157 | non-targeted | 2190, 2191, 2192, 2193, 2194 |
| 1 | 27 | LW1_OEX_PCT | B1878 | E. coli | 2196 | non-targeted | 2215, 2216, 2217, 2218 |
| 1 | 28 | LW1_OEX_PCT | B1901 | E. coli | 2220 | plastidic | 2271, 2272, 2273, 2274, 2275, 2276 |
| 1 | 29 | LW1_OEX_PCT | B1912 | E. coli | 2278 | plastidic | 2465, 2466, 2467, 2468, 2469 |
| 1 | 30 | LW1_OEX_PCT | B2027 | E. coli | 2471 | non-targeted | 2484, 2485, 2486, 2487, 2488, |
| | | | | | | | 2489, 2490, 2491, 2492 |
| 1 | 31 | LW1_OEX_PCT | B2039 | E. coli | 2494 | non-targeted | 2621, 2622, 2623, 2624, 2625, 2626 |
| 1 | 32 | LW1_OEX_PCT | B2075 | E. coli | 2628 | non-targeted | 2849, 2850, 2851, 2852, 2853, |
| | | | | | | | 2854, 2855, 2856, 2857 |
| 1 | 33 | LW1_OEX_PCT | B2153 | E. coli | 2859 | plastidic | 2936, 2937, 2938, 2939, 2940, 2941 |
| 1 | 34 | LW1_OEX_PCT | B2194 | E. coli | 2943 | non-targeted | 2960, 2961, 2962, 2963, 2964 |
| 1 | 35 | LW1_OEX_PCT | B2226 | E. coli | 2966 | non-targeted | 2977, 2978, 2979, 2980 |
| 1 | 36 | LW1_OEX_PCT | B2309 | E. coli | 2982 | plastidic | 3123, 3124, 3125, 3126, 3127, 3128, 3129 |
| 1 | 37 | LW1_OEX_PCT | B2469 | E. coli | 3131 | non-targeted | 3208, 3209, 3210, 3211, 3212, 3213, 3214, 3215 |
| 1 | 38 | LW1_OEX_PCT | B2475 | E. coli | 3217 | non-targeted | 3330, 3331, 3332, 3333, 3334 |
| 1 | 39 | LW1_OEX_PCT | B2482 | E. coli | 3336 | non-targeted | 3397, 3398, 3399, 3400 |
| 1 | 40 | LW1_OEX_PCT | B2541 | E. coli | 3402 | non-targeted | 3587, 3588, 3589 |
| 1 | 41 | LW1_OEX_PCT | B2559 | E. coli | 3591 | plastidic | 3828, 3829, 3830 |
| 1 | 42 | LW1_OEX_PCT | B2605 | E. coli | 3832 | non-targeted | 3855, 3856 |
| 1 | 43 | LW1_OEX_PCT | B2630 | E. coli | 3858 | non-targeted | — |
| 1 | 44 | LW1_OEX_PCT | B2678 | E. coli | 3862 | plastidic | 4017, 4018, 4019, 4020, 4021 |
| 1 | 45 | LW1_OEX_PCT | B2715 | E. coli | 4023 | plastidic | 4052, 4053, 4054, 4055, 4056, 4057, 4058 |
| 1 | 46 | LW1_OEX_PCT | B2776 | E. coli | 4060 | non-targeted | 4073, 4074, 4075 |
| 1 | 47 | LW1_OEX_PCT | B2791 | E. coli | 4077 | non-targeted | 4150, 4151, 4152, 4153, 4154, 4155, 4156 |
| 1 | 48 | LW1_OEX_PCT | B2912 | E. coli | 4158 | non-targeted | 4257, 4258, 4259 |
| 1 | 49 | LW1_OEX_PCT | B2965 | E. coli | 4261 | plastidic | 4334, 4335, 4336, 4337, 4338, |
| | | | | | | | 4339, 4340, 4341, 4342, 4343, |
| | | | | | | | 4344, 4345, 4346, 4347, 4348, 4349 |
| 1 | 50 | LW1_OEX_PCT | B2987 | E. coli | 4351 | plastidic | 4452, 4453, 4454, 4455, 4456, 4457, 4458 |
| 1 | 51 | LW1_OEX_PCT | B2987 | E. coli | 4351 | non-targeted | 4452, 4453, 4454, 4455, 4456, 4457, 4458 |
| 1 | 52 | LW1_OEX_PCT | B3093 | E. coli | 4460 | plastidic | 4497, 4498, 4499, 4500, 4501, 4502, 4503, 4504 |
| 1 | 53 | LW1_OEX_PCT | B3363 | E. coli | 4506 | plastidic | 4637, 4638, 4639 |
| 1 | 54 | LW1_OEX_PCT | B3429 | E. coli | 4641 | plastidic | 4800, 4801, 4802, 4803, 4804, 4805 |
| 1 | 55 | LW1_OEX_PCT | B3568 | E. coli | 4807 | plastidic | 5120, 5121, 5122, 5123 |
| 1 | 56 | LW1_OEX_PCT | B3616 | E. coli | 5125 | plastidic | 5414, 5415, 5416 |
| 1 | 57 | LW1_OEX_PCT | B3616 | E. coli | 5125 | non-targeted | 5414, 5415, 5416 |
| 1 | 58 | LW1_OEX_PCT | B3812 | E. coli | 5418 | non-targeted | 5491, 5492, 5493, 5494 |
| 1 | 59 | LW1_OEX_PCT | B3899 | E. coli | 5496 | non-targeted | 5581, 5582, 5583, 5584 |
| 1 | 60 | LW1_OEX_PCT | B3929 | E. coli | 5586 | plastidic | 5797, 5798, 5799 |
| 1 | 61 | LW1_OEX_PCT | B3938 | E. coli | 5801 | non-targeted | 5846, 5847, 5848, 5849 |
| 1 | 62 | LW1_OEX_PCT | B3974 | E. coli | 5851 | non-targeted | 5984, 5985, 5986, 5987, 5988, 5989, 5990, 5991 |
| 1 | 63 | LW1_OEX_PCT | B3989 | E. coli | 5993 | non-targeted | 5998 |
| 1 | 64 | LW1_OEX_PCT | B4029 | E. coli | 6000 | non-targeted | 6043, 6044, 6045, 6046, 6047, 6048, |
| | | | | | | | 6049, 6050, 6051, 6052, |
| | | | | | | | 6053, 6054, 6055 |
| 1 | 65 | LW1_OEX_PCT | B4139 | E. coli | 6057 | plastidic | 6490, 6491, 6492, 6493, 6494, 6495, |
| | | | | | | | 6496, 6497, 6498, 6499 |
| 1 | 66 | LW1_OEX_PCT | B4390 | E. coli | 6501 | non-targeted | 6532, 6533, 6534, 6535, 6536, |
| | | | | | | | 6537, 6538, 6539, 6540, 6541 |
| 1 | 67 | LW1_OEX_PCT | SII0290 | Synechocystis | 6543 | non-targeted | 6814, 6815, 6816, 6817, 6818, |
| | | | | | | | 6819, 6820, 6821, 6822 |
| 1 | 68 | LW1_OEX_PCT | YAL049C | Yeast | 6824 | non-targeted | 6865, 6866, 6867, 6868, 6869 |
| 1 | 69 | LW1_OEX_PCT | YCR059C | Yeast | 6871 | non-targeted | 6904, 6905, 6906, 6907, 6908, 6909 |
| 1 | 70 | LW1_OEX_PCT | YDR035W | Yeast | 6911 | plastidic | 7252, 7253, 7254, 7255, 7256, 7257, |
| | | | | | | | 7258, 7259, 7260 |
| 1 | 71 | LW1_OEX_PCT | YEL005C | Yeast | 7262 | non-targeted | — |
| 1 | 72 | LW1_OEX_PCT | YER112W | Yeast | 7266 | non-targeted | 7299, 7300 |
| 1 | 73 | LW1_OEX_PCT | YER156C | Yeast | 7302 | non-targeted | 7377, 7378, 7379, 7380, 7381, 7382, 7383 |
| 1 | 74 | LW1_OEX_PCT | YER173W | Yeast | 7385 | non-targeted | 7396, 7397, 7398, 7399, 7400, 7401, 7402, |
| | | | | | | | 7403, 7404, 7405, 7406 |
| 1 | 75 | LW1_OEX_PCT | YGL045W | Yeast | 7408 | non-targeted | 7419, 7420, 7421, 7422, 7423, 7424, |
| | | | | | | | 7425, 7426, 7427, 7428 |
| 1 | 76 | LW1_OEX_PCT | YGL189C | Yeast | 7430 | non-targeted | 7555, 7556, 7557 |
| 1 | 77 | LW1_OEX_PCT | YNR015W | Yeast | 7559 | non-targeted | 7600, 7601, 7602, 7603, 7604, 7605 |
| 1 | 78 | LW1_OEX_PCT | YOR024W | Yeast | 7607 | non-targeted | — |
| 1 | 79 | LW1_OEX_PCT | YOR168W | Yeast | 7611 | non-targeted | 7676, 7677, 7678, 7679, 7680, |
| | | | | | | | 7681, 7682, 7683, 7684 |
| 1 | 80 | LW1_OEX_PCT | YPL151C | Yeast | 7686 | non-targeted | 7735, 7736, 7737, 7738, 7739, 7740 |
| 1 | 81 | LW1_OEX_PCT | B1297 | E. coli | 1202 | plastidic | 1300, 1301, 1302, 1303, 1304, 1305, 1306, 1307 |
| 1 | 82 | LW1_OEX_PCT | B0970 | E. coli | 7742 | non-targeted | 7845, 7846, 7847, 7848, 7849 |
| 1 | 83 | LW1_OEX_PCT | B1829 | E. coli | 7851 | non-targeted | 7964, 7965, 7966, 7967, 7968, 7969, 7970 |
| 1 | 84 | LW1_OEX_PCT | B2664 | E. coli | 7972 | non-targeted | 8017, 8018, 8019, 8020 |
| 1 | 85 | LW1_OEX_PCT | B2796 | E. coli | 8022 | non-targeted | 8169, 8170, 8171, 8172, 8173, 8174, 8175, 8176 |
| 1 | 86 | LW1_OEX_PCT | YER174C | Yeast | 8178 | non-targeted | 8269, 8270, 8271 |
| 1 | 87 | LW1_OEX_PCT | YFR042W | Yeast | 8273 | non-targeted | 8284, 8285, 8286, 8287 |
| 1 | 88 | LW1_OEX_PCT | YKR057W | Yeast | 8289 | non-targeted | 8428, 8429, 8430 |
| 1 | 89 | LW1_OEX_PCT | B0629_2 | E. coli | 8439 | non-targeted | 8454, 8455, 8456, 8457, 8458, 8459, 8460, 8461 |
| 1 | 90 | LW1_OEX_PCT | B1007_2 | E. coli | 8631 | non-targeted | 8740, 8741 |
| 1 | 91 | LW1_OEX_PCT | B2715_2 | E. coli | 9269 | plastidic | 9308, 9309, 9310, 9311, 9312, 9313, 9314 |
| 1 | 92 | LW1_OEX_PCT | B3899_2 | E. coli | 9445 | non-targeted | 9526, 9527, 9528 |
| 1 | 93 | LW1_OEX_PCT | B4390_2 | E. coli | 9825 | non-targeted | 9872, 9873, 9874, 9875, 9876, 9877, 9878, |
| | | | | | | | 9879, 9880, 9881, 9882 |
| 1 | 94 | LW1_OEX_PCT | YGL045W_2 | Yeast | 9906 | non-targeted | 9927, 9928, 9929, 9930 |
| 1 | 95 | LW1_OEX_PCT | B2664_2 | E. coli | 9194 | non-targeted | 9265, 9266, 9267 |
| 1 | 96 | LW1_OEX_PCT | B0963_2 | E. coli | 8498 | non-targeted | 8627, 8628, 8629 |
| 1 | 97 | LW1_OEX_PCT | B1297_2 | E. coli | 8743 | plastidic | 8886, 8887, 8888, 8889, 8890 |
| 1 | 98 | LW1_OEX_PCT | B1597_2 | E. coli | 8892 | non-targeted | 8931, 8932, 8933 |
| 1 | 99 | LW1_OEX_PCT | B2027_2 | E. coli | 9032 | non-targeted | 9089, 9090, 9091, 9092 |
| 1 | 100 | LW1_OEX_PCT | B2965_2 | E. coli | 9316 | plastidic | 9433, 9434, 9435, 9436, 9437, 9438, |
| | | | | | | | 9439, 9440, 9441, 9442, 9443 |
| 1 | 101 | LW1_OEX_PCT | B4139_2 | E. coli | 9530 | plastidic | 9815, 9816, 9817, 9818, 9819, |
| | | | | | | | 9820, 9821, 9822, 9823 |
| 1 | 102 | LW1_OEX_PCT | B0845_2 | E. coli | 8463 | non-targeted | 8488, 8489, 8490, 8491, 8492, |
| | | | | | | | 8493, 8494, 8495, 8496 |
| 1 | 103 | LW1_OEX_PCT | B1901_2 | E. coli | 8974 | plastidic | 9025, 9026, 9027, 9028, 9029, 9030 |
| 1 | 104 | LW1_OEX_PCT | YER112W_2 | Yeast | 9884 | non-targeted | 9903, 9904 |
| 1 | 105 | LW1_OEX_PCT | B1798_2 | E. coli | 8935 | non-targeted | 8968, 8969, 8970, 8971, 8972 |
| 1 | 106 | LW1_OEX_PCT | B2226_2 | E. coli | 9094 | non-targeted | 9105, 9106, 9107, 9108 |
| 1 | 107 | LW1_OEX_PCT | B2469_2 | E. coli | 9110 | non-targeted | 9185, 9186, 9187, 9188, 9189, 9190, 9191, 9192 |
| 1 | 108 | LW1_OEX_PCT | YOR168W_2 | Yeast | 9932 | non-targeted | 9997, 9998, 9999, 10000, 10001, 10002, 10003, |
| | | | | | | | 10004, 10005 |
| 1 | 109 | LW1_OEX_PCT | B4321 | E. coli | 10097 | non-targeted | 10252, 10253, 10254, 10255, 10256, 10257 |

The application's sequence listing, which the Patent Office published only in electronic form, follows.

SEQUENCE LISTING (10257 sequences)

SEQ ID NO: 1 - DNA, 9045 bp, Artificial
  vector used for overexpression the gene of interest
agcttggacaatcagtaaattgaacggagaatattattcataaaaatacgatagtaacgggtgatatattcattagaatgaaccgaaaccggcggtaaggatctgagctacacatgctcaggttttttacaacgtgcacaacagaattgaaagcaaatatcatgcgatcataggcgtctcgcatatctcattaaagcagggcatgccggtcgagtcaaatctcggtgacgggcaggaccggacggggcggtaccggcaggctgaagtccagctgccagaaacccacgtcatgccagttcccgtgcttgaagccggccgcccgcagcatgccgcggggggcatatccgagcgcctcgtgcatgcgcacgctcgggtcgttgggcagcccgatgacagcgaccacgctcttgaagccctgtgcctccagggacttcagcaggtgggtgtagagcgtggagcccagtcccgtccgctggtggcggggggagacgtacacggtcgactcggccgtccagtcgtaggcgttgcgtgccttccaggggcccgcgtaggcgatgccggcgacctcgccgtccacctcggcgacgagccagggatagcgctcccgcagacggacgaggtcgtccgtccactcctgcggttcctgcggctcggtacggaagttgaccgtgcttgtctcgatgtagtggttgacgatggtgcagaccgccggcatgtccgcctcggtggcacggcggatgtcggccgggcgtcgttctgggctcatggtagactcgacggatccacgtgtggaagatatgaatttttttgagaaactagataagattaatgaatatcggtgttttggttttttcttgtggccgtctttgtttatattgagatttttcaaatcagtgcgcaagacgtgacgtaagtatccgagtcagtttttatttttctactaatttggtcgaagctttgggcggatcctctagattcgacggtatcgataagctcgcggatccctgaaagcgacgttggatgttaacatctacaaattgccttttcttatcgaccatgtacgtaagcgcttacgtttttggtggacccttgaggaaactggtagctgttgtgggcctgtggtctcaagatggatcattaatttccaccttcacctacgatggggggcatcgcaccggtgagtaatattgtacggctaagagcgaatttggcctgtaggatccctgaaagcgacgttggatgttaacatctacaaattgccttttcttatcgaccatgtacgtaagcgcttacgtttttggtggacccttgaggaaactggtagctgttgtgggcctgtggtctcaagatggatcattaatttccaccttcacctacgatggggggcatcgcaccggtgagtaatattgtacggctaagagcgaatttggcctgtaggatccctgaaagcgacgttggatgttaacatctacaaattgccttttcttatcgaccatgtacgtaagcgcttacgtttttggtggacccttgaggaaactggtagctgttgtgggcctgtggtctcaagatggatcattaatttccaccttcacctacgatggggggcatcgcaccggtgagtaatattgtacggctaagagcgaatttggcctgtaggatccgcgagctggtcaatcccattgcttttgaagcagctcaacattgatctctttctcgatcgagggagatttttcaaatcagtgcgcaagacgtgacgtaagtatccgagtcagtttttatttttctactaatttggtcgtttatttcggcgtgtaggacatggcaaccgggcctgaatttcgcgggtattctgtttctattccaactttttcttgatccgcagccattaacgacttttgaatagatacgctgacacgccaagcctcgctagtcaaaagtgtaccaaacaacgctttacagcaagaacggaatgcgcgtgacgctcgcggtgacgccatttcgccttttcagaaatggataaatagccttgcttcctattatatcttcccaaattaccaatacattacactagcatctgaatttcataaccaatctcgatacaccaaatcgaagatctcccgggttgctcttccatggcaatgattaattaacgaagagcaagagctcgaatttccccgatcgttcaaacatttggcaataaagtttcttaagattgaatcctgttgccggtcttgcgatgattatcatataatttctgttgaattacgttaagcatgtaataattaacatgtaatgcatgacgttatttatgagatgggtttttatgattagagtcccgcaattatacatttaatacgcgatagaaaacaaaatatagcgcgcaaactaggataaattatcgcgcgcggtgtcatctatgttactagatcgggaattggcatgcaagcttggcactggccgtcgttttacaacgtcgtgactgggaaaaccctggcgttacccaacttaatcgccttgcagcacatccccctttcgccagctggcgtaatagcgaagaggcccgcaccgatcgcccttcccaacagttgcgcagcctgaatggcgaatgctagagcagcttgagcttggatcagattgtcgtttcccgccttcagtttaaactatcagtgtttgacaggatatattggcgggtaaacctaagagaaaagagcgtttattagaataatcggatatttaaaagggcgtgaaaaggtttatccgttcgtccatttgtatgtgcatgccaaccacagggttcccctcgggatcaaagtactttgatccaacccctccgctgctatagtgcagtcggcttctgacgttcagtgcagccgtcttctgaaaacgacatgtcgcacaagtcctaagttacgcgacaggctgccgccctgcccttttcctggcgttttcttgtcgcgtgttttagtcgcataaagtagaatacttgcgactagaaccggagacattacgccatgaacaagagcgccgccgctggcctgctgggctatgcccgcgtcagcaccgacgaccaggacttgaccaaccaacgggccgaactgcacgcggccggctgcaccaagctgttttccgagaagatcaccggcaccaggcgcgaccgcccggagctggccaggatgcttgaccacctacgccctggcgacgttgtgacagtgaccaggctagaccgcctggcccgcagcacccgcgacctactggacattgccgagcgcatccaggaggccggcgcgggcctgcgtagcctggcagagccgtgggccgacaccaccacgccggccggccgcatggtgttgaccgtgttcgccggcattgccgagttcgagcgttccctaatcatcgaccgcacccggagcgggcgcgaggccgccaaggcccgaggcgtgaagtttggcccccgccctaccctcaccccggcacagatcgcgcacgcccgcgagctgatcgaccaggaaggccgcaccgtgaaagaggcggctgcactgcttggcgtgcatcgctcgaccctgtaccgcgcacttgagcgcagcgaggaagtgacgcccaccgaggccaggcggcgcggtgccttccgtgaggacgcattgaccgaggccgacgccctggcggccgccgagaatgaacgccaagaggaacaagcatgaaaccgcaccaggacggccaggacgaaccgtttttcattaccgaagagatcgaggcggagatgatcgcggccgggtacgtgttcgagccgcccgcgcacgtctcaaccgtgcggctgcatgaaatcctggccggtttgtctgatgccaagctggcggcctggccggccagcttggccgctgaagaaaccgagcgccgccgtctaaaaaggtgatgtgtatttgagtaaaacagcttgcgtcatgcggtcgctgcgtatatgatgcgatgagtaaataaacaaatacgcaaggggaacgcatgaaggttatcgctgtacttaaccagaaaggcgggtcaggcaagacgaccatcgcaacccatctagcccgcgccctgcaactcgccggggccgatgttctgttagtcgattccgatccccagggcagtgcccgcgattgggcggccgtgcgggaagatcaaccgctaaccgttgtcggcatcgaccgcccgacgattgaccgcgacgtgaaggccatcggccggcgcgacttcgtagtgatcgacggagcgccccaggcggcggacttggctgtgtccgcgatcaaggcagccgacttcgtgctgattccggtgcagccaagcccttacgacatatgggccaccgccgacctggtggagctggttaagcagcgcattgaggtcacggatggaaggctacaagcggcctttgtcgtgtcgcgggcgatcaaaggcacgcgcatcggcggtgaggttgccgaggcgctggccgggtacgagctgcccattcttgagtcccgtatcacgcagcgcgtgagctacccaggcactgccgccgccggcacaaccgttcttgaatcagaacccgagggcgacgctgcccgcgaggtccaggcgctggccgctgaaattaaatcaaaactcatttgagttaatgaggtaaagagaaaatgagcaaaagcacaaacacgctaagtgccggccgtccgagcgcacgcagcagcaaggctgcaacgttggccagcctggcagacacgccagccatgaagcgggtcaactttcagttgccggcggaggatcacaccaagctgaagatgtacgcggtacgccaaggcaagaccattaccgagctgctatctgaatacatcgcgcagctaccagagtaaatgagcaaatgaataaatgagtagatgaattttagcggctaaaggaggcggcatggaaaatcaagaacaaccaggcaccgacgccgtggaatgccccatgtgtggaggaacgggcggttggccaggcgtaagcggctgggttgcctgccggccctgcaatggcactggaacccccaagcccgaggaatcggcgtgagcggtcgcaaaccatccggcccggtacaaatcggcgcggcgctgggtgatgacctggtggagaagttgaaggccgcgcaggccgcccagcggcaacgcatcgaggcagaagcacgccccggtgaatcgtggcaagcggccgctgatcgaatccgcaaagaatcccggcaaccgccggcagccggtgcgccgtcgattaggaagccgcccaagggcgacgagcaaccagattttttcgttccgatgctctatgacgtgggcacccgcgatagtcgcagcatcatggacgtggccgttttccgtctgtcgaagcgtgaccgacgagctggcgaggtgatccgctacgagcttccagacgggcacgtagaggtttccgcagggccggccggcatggccagtgtgtgggattacgacctggtactgatggcggtttcccatctaaccgaatccatgaaccgataccgggaagggaagggagacaagcccggccgcgtgttccgtccacacgttgcggacgtactcaagttctgccggcgagccgatggcggaaagcagaaagacgacctggtagaaacctgcattcggttaaacaccacgcacgttgccatgcagcgtacgaagaaggccaagaacggccgcctggtgacggtatccgagggtgaagccttgattagccgctacaagatcgtaaagagcgaaaccgggcggccggagtacatcgagatcgagctagctgattggatgtaccgcgagatcacagaaggcaagaacccggacgtgctgacggttcaccccgattactttttgatcgatcccggcatcggccgttttctctaccgcctggcacgccgcgccgcaggcaaggcagaagccagatggttgttcaagacgatctacgaacgcagtggcagcgccggagagttcaagaagttctgtttcaccgtgcgcaagctgatcgggtcaaatgacctgccggagtacgatttgaaggaggaggcggggcaggctggcccgatcctagtcatgcgctaccgcaacctgatcgagggcgaagcatccgccggttcctaatgtacggagcagatgctagggcaaattgccctagcaggggaaaaaggtcgaaaaggtctctttcctgtggatagcacgtacattgggaacccaaagccgtacattgggaaccggaacccgtacattgggaacccaaagccgtacattgggaaccggtcacacatgtaagtgactgatataaaagagaaaaaaggcgatttttccgcctaaaactctttaaaacttattaaaactcttaaaacccgcctggcctgtgcataactgtctggccagcgcacagccgaagagctgcaaaaagcgcctacccttcggtcgctgcgctccctacgccccgccgcttcgcgtcggcctatcgcggccgctggccgctcaaaaatggctggcctacggccaggcaatctaccagggcgcggacaagccgcgccgtcgccactcgaccgccggcgcccacatcaaggcaccctgcctcgcgcgtttcggtgatgacggtgaaaacctctgacacatgcagctcccggagacggtcacagcttgtctgtaagcggatgccgggagcagacaagcccgtcagggcgcgtcagcgggtgttggcgggtgtcggggcgcagccatgacccagtcacgtagcgatagcggagtgtatactggcttaactatgcggcatcagagcagattgtactgagagtgcaccatatgcggtgtgaaataccgcacagatgcgtaaggagaaaataccgcatcaggcgctcttccgcttcctcgctcactgactcgctgcgctcggtcgttcggctgcggcgagcggtatcagctcactcaaaggcggtaatacggttatccacagaatcaggggataacgcaggaaagaacatgtgagcaaaaggccagcaaaaggccaggaaccgtaaaaaggccgcgttgctggcgtttttccataggctccgcccccctgacgagcatcacaaaaatcgacgctcaagtcagaggtggcgaaacccgacaggactataaagataccaggcgtttccccctggaagctccctcgtgcgctctcctgttccgaccctgccgcttaccggatacctgtccgcctttctcccttcgggaagcgtggcgctttctcatagctcacgctgtaggtatctcagttcggtgtaggtcgttcgctccaagctgggctgtgtgcacgaaccccccgttcagcccgaccgctgcgccttatccggtaactatcgtcttgagtccaacccggtaagacacgacttatcgccactggcagcagccactggtaacaggattagcagagcgaggtatgtaggcggtgctacagagttcttgaagtggtggcctaactacggctacactagaaggacagtatttggtatctgcgctctgctgaagccagttaccttcggaaaaagagttggtagctcttgatccggcaaacaaaccaccgctggtagcggtggtttttttgtttgcaagcagcagattacgcgcagaaaaaaaggatctcaagaagatcctttgatcttttctacggggtctgacgctcagtggaacgaaaactcacgttaagggattttggtcatgcattctaggtactaaaacaattcatccagtaaaatataatattttattttctcccaatcaggcttgatccccagtaagtcaaaaaatagctcgacatactgttcttccccgatatcctccctgatcgaccggacgcagaaggcaatgtcataccacttgtccgccctgccgcttctcccaagatcaataaagccacttactttgccatctttcacaaagatgttgctgtctcccaggtcgccgtgggaaaagacaagttcctcttcgggcttttccgtctttaaaaaatcatacagctcgcgcggatctttaaatggagtgtcttcttcccagttttcgcaatccacatcggccagatcgttattcagtaagtaatccaattcggctaagcggctgtctaagctattcgtatagggacaatccgatatgtcgatggagtgaaagagcctgatgcactccgcatacagctcgataatcttttcagggctttgttcatcttcatactcttccgagcaaaggacgccatcggcctcactcatgagcagattgctccagccatcatgccgttcaaagtgcaggacctttggaacaggcagctttccttccagccatagcatcatgtccttttcccgttccacatcataggtggtccctttataccggctgtccgtcatttttaaatataggttttcattttctcccaccagcttatataccttagcaggagacattccttccgtatcttttacgcagcggtatttttcgatcagttttttcaattccggtgatattctcattttagccatttattatttccttcctcttttctacagtatttaaagataccccaagaagctaattataacaagacgaactccaattcactgttccttgcattctaaaaccttaaataccagaaaacagctttttcaaagttgttttcaaagttggcgtataacatagtatcgacggagccgattttgaaaccgcggtgatcacaggcagcaacgctctgtcatcgttacaatcaacatgctaccctccgcgagatcatccgtgtttcaaacccggcagcttagttgccgttcttccgaatagcatcggtaacatgagcaaagtctgccgccttacaacggctctcccgctgacgccgtcccggactgatgggctgcctgtatcgagtggtgattttgtgccgagctgccggtcggggagctgttggctggctggtggcaggatatattgtggtgtaaacaaattgacgcttagacaacttaataacacattgcggacgtttttaatgtactgaattaacgccgaatta

SEQ ID NO: 2 - DNA, 8883 bp, Artificial
  vector used for overexpression the gene of interest
agcttggacaatcagtaaattgaacggagaatattattcataaaaatacgatagtaacgggtgatatattcattagaatgaaccgaaaccggcggtaaggatctgagctacacatgctcaggttttttacaacgtgcacaacagaattgaaagcaaatatcatgcgatcataggcgtctcgcatatctcattaaagcagggcatgccggtcgagtcaaatctcggtgacgggcaggaccggacggggcggtaccggcaggctgaagtccagctgccagaaacccacgtcatgccagttcccgtgcttgaagccggccgcccgcagcatgccgcggggggcatatccgagcgcctcgtgcatgcgcacgctcgggtcgttgggcagcccgatgacagcgaccacgctcttgaagccctgtgcctccagggacttcagcaggtgggtgtagagcgtggagcccagtcccgtccgctggtggcggggggagacgtacacggtcgactcggccgtccagtcgtaggcgttgcgtgccttccaggggcccgcgtaggcgatgccggcgacctcgccgtccacctcggcgacgagccagggatagcgctcccgcagacggacgaggtcgtccgtccactcctgcggttcctgcggctcggtacggaagttgaccgtgcttgtctcgatgtagtggttgacgatggtgcagaccgccggcatgtccgcctcggtggcacggcggatgtcggccgggcgtcgttctgggctcatggtagactcgacggatccacgtgtggaagatatgaatttttttgagaaactagataagattaatgaatatcggtgttttggttttttcttgtggccgtctttgtttatattgagatttttcaaatcagtgcgcaagacgtgacgtaagtatccgagtcagtttttatttttctactaatttggtcgaagctttgggcggatcctctagaattcgaatccaaaaattacggatatgaatataggcatatccgtatccgaattatccgtttgacagctagcaacgattgtacaattgcttctttaaaaaaggaagaaagaaagaaagaaaagaatcaacatcagcgttaacaaacggccccgttacggcccaaacggtcatatagagtaacggcgttaagcgttgaaagactcctatcgaaatacgtaaccgcaaacgtgtcatagtcagatcccctcttccttcaccgcctcaaacacaaaaataatcttctacagcctatatatacaacccccccttctatctctcctttctcacaattcatcatctttctttctctacccccaattttaagaaatcctctcttctcctcttcattttcaaggtaaatctctctctctctctctctctctgttattccttgttttaattaggtatgtattattgctagtttgttaatctgcttatcttatgtatgccttatgtgaatatctttatcttgttcatctcatccgtttagaagctataaatttgttgatttgactgtgtatctacacgtggttatgtttatatctaatcagatatgaatttcttcatattgttgcgtttgtgtgtaccaatccgaaatcgttgatttttttcatttaatcgtgtagctaattgtacgtatacatatggatctacgtatcaattgttcatctgtttgtgtttgtatgtatacagatctgaaaacatcacttctctcatctgattgtgttgttacatacatagatatagatctgttatatcattttttttattaattgtgtatatatatatgtgcatagatctggattacatgattgtgattatttacatgattttgttatttacgtatgtatatatgtagatctggactttttggagttgttgacttgattgtatttgtgtgtgtatatgtgtgttctgatcttgatatgttatgtatgtgcagcccgggttgctcttccatggcaatgattaattaacgaagagcaagagctcgaatttccccgatcgttcaaacatttggcaataaagtttcttaagattgaatcctgttgccggtcttgcgatgattatcatataatttctgttgaattacgttaagcatgtaataattaacatgtaatgcatgacgttatttatgagatgggtttttatgattagagtcccgcaattatacatttaatacgcgatagaaaacaaaatatagcgcgcaaactaggataaattatcgcgcgcggtgtcatctatgttactagatcgggaattggcatgcaagcttggcactggccgtcgttttacaacgtcgtgactgggaaaaccctggcgttacccaacttaatcgccttgcagcacatccccctttcgccagctggcgtaatagcgaagaggcccgcaccgatcgcccttcccaacagttgcgcagcctgaatggcgaatgctagagcagcttgagcttggatcagattgtcgtttcccgccttcagtttaaactatcagtgtttgacaggatatattggcgggtaaacctaagagaaaagagcgtttattagaataacggatatttaaaagggcgtgaaaaggtttatccgttcgtccatttgtatgtgcatgccaaccacagggttcccctcgggatcaaagtactttgatccaacccctccgctgctatagtgcagtcggcttctgacgttcagtgcagccgtcttctgaaaacgacatgtcgcacaagtcctaagttacgcgacaggctgccgccctgcccttttcctggcgttttcttgtcgcgtgttttagtcgcataaagtagaatacttgcgactagaaccggagacattacgccatgaacaagagcgccgccgctggcctgctgggctatgcccgcgtcagcaccgacgaccaggacttgaccaaccaacgggccgaactgcacgcggccggctgcaccaagctgttttccgagaagatcaccggcaccaggcgcgaccgcccggagctggccaggatgcttgaccacctacgccctggcgacgttgtgacagtgaccaggctagaccgcctggcccgcagcacccgcgacctactggacattgccgagcgcatccaggaggccggcgcgggcctgcgtagcctggcagagccgtgggccgacaccaccacgccggccggccgcatggtgttgaccgtgttcgccggcattgccgagttcgagcgttccctaatcatcgaccgcacccggagcgggcgcgaggccgccaaggcccgaggcgtgaagtttggcccccgccctaccctcaccccggcacagatcgcgcacgcccgcgagctgatcgaccaggaaggccgcaccgtgaaagaggcggctgcactgcttggcgtgcatcgctcgaccctgtaccgcgcacttgagcgcagcgaggaagtgacgcccaccgaggccaggcggcgcggtgccttccgtgaggacgcattgaccgaggccgacgccctggcggccgccgagaatgaacgccaagaggaacaagcatgaaaccgcaccaggacggccaggacgaaccgtttttcattaccgaagagatcgaggcggagatgatcgcggccgggtacgtgttcgagccgcccgcgcacgtctcaaccgtgcggctgcatgaaatcctggccggtttgtctgatgccaagctggcggcctggccggccagcttggccgctgaagaaaccgagcgccgccgtctaaaaaggtgatgtgtatttgagtaaaacagcttgcgtcatgcggtcgctgcgtatatgatgcgatgagtaaataaacaaatacgcaaggggaacgcatgaaggttatcgctgtacttaaccagaaaggcgggtcaggcaagacgaccatcgcaacccatctagcccgcgccctgcaactcgccggggccgatgttctgttagtcgattccgatccccagggcagtgcccgcgattgggcggccgtgcgggaagatcaaccgctaaccgttgtcggcatcgaccgcccgacgattgaccgcgacgtgaaggccatcggccggcgcgacttcgtagtgatcgacggagcgccccaggcggcggacttggctgtgtccgcgatcaaggcagccgacttcgtgctgattccggtgcagccaagcccttacgacatatgggccaccgccgacctggtggagctggttaagcagcgcattgaggtcacggatggaaggctacaagcggcctttgtcgtgtcgcgggcgatcaaaggcacgcgcatcggcggtgaggttgccgaggcgctggccgggtacgagctgcccattcttgagtcccgtatcacgcagcgcgtgagctacccaggcactgccgccgccggcacaaccgttcttgaatcagaacccgagggcgacgctgcccgcgaggtccaggcgctggccgctgaaattaaatcaaaactcatttgagttaatgaggtaaagagaaaatgagcaaaagcacaaacacgctaagtgccggccgtccgagcgcacgcagcagcaaggctgcaacgttggccagcctggcagacacgccagccatgaagcgggtcaactttcagttgccggcggaggatcacaccaagctgaagatgtacgcggtacgccaaggcaagaccattaccgagctgctatctgaatacatcgcgcagctaccagagtaaatgagcaaatgaataaatgagtagatgaattttagcggctaaaggaggcggcatggaaaatcaagaacaaccaggcaccgacgccgtggaatgccccatgtgtggaggaacgggcggttggccaggcgtaagcggctgggttgtctgccggccctgcaatggcactggaacccccaagcccgaggaatcggcgtgacggtcgcaaaccatccggcccggtacaaatcggcgcggcgctgggtgatgacctggtggagaagttgaaggccgcgcaggccgcccagcggcaacgcatcgaggcagaagcacgccccggtgaatcgtggcaagcggccgctgatcgaatccgcaaagaatcccggcaaccgccggcagccggtgcgccgtcgattaggaagccgcccaagggcgacgagcaaccagattttttcgttccgatgctctatgacgtgggcacccgcgatagtcgcagcatcatggacgtggccgttttccgtctgtcgaagcgtgaccgacgagctggcgaggtgatccgctacgagcttccagacgggcacgtagaggtttccgcagggccggccggcatggccagtgtgtgggattacgacctggtactgatggcggtttcccatctaaccgaatccatgaaccgataccgggaagggaagggagacaagcccggccgcgtgttccgtccacacgttgcggacgtactcaagttctgccggcgagccgatggcggaaagcagaaagacgacctggtagaaacctgcattcggttaaacaccacgcacgttgccatgcagcgtacgaagaaggccaagaacggccgcctggtgacggtatccgagggtgaagccttgattagccgctacaagatcgtaaagagcgaaaccgggcggccggagtacatcgagatcgagctagctgattggatgtaccgcgagatcacagaaggcaagaacccggacgtgctgacggttcaccccgattactttttgatcgatcccggcatcggccgttttctctaccgcctggcacgccgcgccgcaggcaaggcagaagccagatggttgttcaagacgatctacgaacgcagtggcagcgccggagagttcaagaagttctgtttcaccgtgcgcaagctgatcgggtcaaatgacctgccggagtacgatttgaaggaggaggcggggcaggctggcccgatcctagtcatgcgctaccgcaacctgatcgagggcgaagcatccgccggttcctaatgtacggagcagatgctagggcaaattgccctagcaggggaaaaaggtcgaaaaggtctctttcctgtggatagcacgtacattgggaacccaaagccgtacattgggaaccggaacccgtacattgggaacccaaagccgtacattgggaaccggtcacacatgtaagtgactgatataaaagagaaaaaaggcgatttttccgcctaaaactctttaaaacttattaaaactcttaaaacccgcctggcctgtgcataactgtctggccagcgcacagccgaagagctgcaaaaagcgcctacccttcggtcgctgcgctccctacgccccgccgcttcgcgtcggcctatcgcggccgctggccgctcaaaaatggctggcctacggccaggcaatctaccagggcgcggacaagccgcgccgtcgccactcgaccgccggcgcccacatcaaggcaccctgcctcgcgcgtttcggtgatgacggtgaaaacctctgacacatgcagctcccggagacggtcacagcttgtctgtaagcggatgccgggagcagacaagcccgtcagggcgcgtcagcgggtgttggcgggtgtcggggcgcagccatgacccagtcacgtagcgatagcggagtgtatactggcttaactatgcggcatcagagcagattgtactgagagtgcaccatatgcggtgtgaaataccgcacagatgcgtaaggagaaaataccgcatcaggcgctcttccgcttcctcgctcactgactcgctgcgctcggtcgttcggctgcggcgagcggtatcagctcactcaaaggcggtaatacggttatccacagaatcaggggataacgcaggaaagaacatgtgagcaaaaggccagcaaaaggccaggaaccgtaaaaaggccgcgttgctggcgtttttccataggctccgcccccctgacgagcatcacaaaaatcgacgctcaagtcagaggtggcgaaacccgacaggactataaagataccaggcgtttccccctggaagctccctcgtgcgctctcctgttccgaccctgccgcttaccggatacctgtccgcctttctcccttcgggaagcgtggcgctttctcatagctcacgctgtaggtatctcagttcggtgtaggtcgttcgctccaagctgggctgtgtgcacgaaccccccgttcagcccgaccgctgcgccttatccggtaactatcgtcttgagtccaacccggtaagacacgacttatcgccactggcagcagccactggtaacaggattagcagagcgaggtatgtaggcggtgctacagagttcttgaagtggtggcctaactacggctacactagaaggacagtatttggtatctgcgctctgctgaagccagttaccttcggaaaaagagttggtagctcttgatccggcaaacaaaccaccgctggtagcggtggtttttttgtttgcaagcagcagattacgcgcagaaaaaaaggatctcaagaagatcctttgatcttttctacggggtctgacgctcagtggaacgaaaactcacgttaagggattttggtcatgcattctaggtactaaaacaattcatccagtaaaatataatattttattttctcccaatcaggcttgatccccagtaagtcaaaaaatagctcgacatactgttcttccccgatatcctccctgatcgaccggacgcagaaggcaatgtcataccacttgtccgccctgccgcttctcccaagatcaataaagccacttactttgccatctttcacaaagatgttgctgtctcccaggtcgccgtgggaaaagacaagttcctcttcgggcttttccgtctttaaaaaatcatacagctcgcgcggatctttaaatggagtgtcttcttcccagttttcgcaatccacatcggccagatcgttattcagtaagtaatccaattcggctaagcggctgtctaagctattcgtatagggacaatccgatatgtcgatggagtgaaagagcctgatgcactccgcatacagctcgataatcttttcagggctttgttcatcttcatactcttccgagcaaaggacgccatcggcctcactcatgagcagattgctccagccatcatgccgttcaaagtgcaggacctttggaacaggcagctttccttccagccatagcatcatgtccttttcccgttccacatcataggtggtccctttataccggctgtccgtcatttttaaatataggttttcattttctcccaccagcttatataccttagcaggagacattccttccgtatcttttacgcagcggtatttttcgatcagttttttcaattccggtgatattctcattttagccatttattatttccttcctcttttctacagtatttaaagataccccaagaagctaattataacaagacgaactccaattcactgttccttgcattctaaaaccttaaataccagaaaacagctttttcaaagttgttttcaaagttggcgtataacatagtatcgacggagccgattttgaaaccgcggtgatcacaggcagcaacgctctgtcatcgttacaatcaacatgctaccctccgcgagatcatccgtgtttcaaacccggcagcttagttgccgttcttccgaatagcatcggtaacatgagcaaagtctgccgccttacaacggctctcccgctgacgccgtcccggactgatgggctgcctgtatcgagtggtgattttgtgccgagctgccggtcggggagctgttggctggctggtggcaggatatattgtggtgtaaacaaattgacgcttagacaacttaataacacattgcggacgtttttaatgtactgaattaacgccgaatta

SEQ ID NO: 3 - DNA, 9469 bp, Artificial
  vector used for overexpression the gene of interest
  CDS (2295)..(2404): FNR transit peptide
  CDS (2482)..(2545): FNR transit peptide
agctttgggcggatcctctagaggacaatcagtaaattgaacggagaatattattcataaaaatacgatagtaacgggtgatatattcattagaatgaaccgaaaccggcggtaaggatctgagctacacatgctcaggttttttacaacgtgcacaacagaattgaaagcaaatatcatgcgatcataggcgtctcgcatatctcattaaagcagggcatgccggtcgagtcaaatctcggtgacgggcaggaccggacggggcggtaccggcaggctgaagtccagctgccagaaacccacgtcatgccagttcccgtgcttgaagccggccgcccgcagcatgccgcggggggcatatccgagcgcctcgtgcatgcgcacgctcgggtcgttgggcagcccgatgacagcgaccacgctcttgaagccctgtgcctccagggacttcagcaggtgggtgtagagcgtggagcccagtcccgtccgctggtggcggggggagacgtacacggtcgactcggccgtccagtcgtaggcgttgcgtgccttccaggggcccgcgtaggcgatgccggcgacctcgccgtccacctcggcgacgagccagggatagcgctcccgcagacggacgaggtcgtccgtccactcctgcggttcctgcggctcggtacggaagttgaccgtgcttgtctcgatgtagtggttgacgatggtgcagaccgccggcatgtccgcctcggtggcacggcggatgtcggccgggcgtcgttctgggctcatggtagactcgacggatccacgtgtggaagatatgaatttttttgagaaactagataagattaatgaatatcggtgttttggttttttcttgtggccgtctttgtttatattgagatttttcaaatcagtgcgcaagacgtgacgtaagtatccgagtcagtttttatttttctactaatttggtcgaatctagattcgacggtatcgataagctcgcggatccctgaaagcgacgttggatgttaacatctacaaattgccttttcttatcgaccatgtacgtaagcgcttacgtttttggtggacccttgaggaaactggtagctgttgtgggcctgtggtctcaagatggatcattaatttccaccttcacctacgatggggggcatcgcaccggtgagtaatattgtacggctaagagcgaatttggcctgtaggatccctgaaagcgacgttggatgttaacatctacaaattgccttttcttatcgaccatgtacgtaagcgcttacgtttttggtggacccttgaggaaactggtagctgttgtgggcctgtggtctcaagatggatcattaatttccaccttcacctacgatggggggcatcgcaccggtgagtaatattgtacggctaagagcgaatttggcctgtaggatccctgaaagcgacgttggatgttaacatctacaaattgccttttcttatcgaccatgtacgtaagcgcttacgtttttggtggacccttgaggaaactggtagctgttgtgggcctgtggtctcaagatggatcattaatttccaccttcacctacgatggggggcatcgcaccggtgagtaatattgtacggctaagagcgaatttggcctgtaggatccgcgagctggtcaatcccattgcttttgaagcagctcaacattgatctctttctcgatcgagggagatttttcaaatcagtgcgcaagacgtgacgtaagtatccgagtcagtttttatttttctactaatttggtcgtttatttcggcgtgtaggacatggcaaccgggcctgaatttcgcgggtattctgtttctattccaactttttcttgatccgcagccattaacgacttttgaatagatacgctgacacgccaagcctcgctagtcaaaagtgtaccaaacaacgctttacagcaagaacggaatgcgcgtgacgctcgcggtgacgccatttcgccttttcagaaatggataaatagccttgcttcctattatatcttcccaaattaccaatacattacactagcatctgaatttcataaccaatctcgatacaccaaatcgaagatctccctggaattcgcataaacttatcttcatagttgccactccaatttgctccttgaatctcctccacccaatacataatccactcctccatcacccacttcactactaaatcaaacttaactctgtttttctctctcctcctttcatttcttattcttccaatcatcgtactccgccatgaccaccgctgtcaccgccgctgtttctttcccctctaccaaaaccacctctctctccgcccgaagctcctccgtcatttcccctgacaaaatcagctacaaaaaggtgattcccaatttcactgtgttttttattaataatttgttattttgatgatgagatgattaatttgggtgctgcaggttcctttgtactacaggaatgtatctgcaactgggaaaatgggacccatcagggcccagatcgcctctgaattccagctgaccacccatggcaattcccggggatcagctcgaatttccccgatcgttcaaacatttggcaataaagtttcttaagattgaatcctgttgccggtcttgcgatgattatcatataatttctgttgaattacgttaagcatgtaataattaacatgtaatgcatgacgttatttatgagatgggtttttatgattagagtcccgcaattatacatttaatacgcgatagaaaacaaaatatagcgcgcaaactaggataaattatcgcgcgcggtgtcatctatgttactagatcgggaattggcatgcaagcttggcactggccgtcgttttacaacgtcgtgactgggaaaaccctggcgttacccaacttaatcgccttgcagcacatccccctttcgccagctggcgtaatagcgaagaggcccgcaccgatcgcccttcccaacagttgcgcagcctgaatggcgaatgctagagcagcttgagcttggatcagattgtcgtttcccgccttcagtttaaactatcagtgtttgacaggatatattggcgggtaaacctaagagaaaagagcgtttattagaataatcggatatttaaaagggcgtgaaaaggtttatccgttcgtccatttgtatgtgcatgccaaccacagggttcccctcgggatcaaagtactttgatccaacccctccgctgctatagtgcagtcggcttctgacgttcagtgcagccgtcttctgaaaacgacatgtcgcacaagtcctaagttacgcgacaggctgccgccctgcccttttcctggcgttttcttgtcgcgtgttttagtcgcataaagtagaatacttgcgactagaaccggagacattacgccatgaacaagagcgccgccgctggcctgctgggctatgcccgcgtcagcaccgacgaccaggacttgaccaaccaacgggccgaactgcacgcggccggctgcaccaagctgttttccgagaagatcaccggcaccaggcgcgaccgcccggagctggccaggatgcttgaccacctacgccctggcgacgttgtgacagtgaccaggctagaccgcctggcccgcagcacccgcgacctactggacattgccgagcgcatccaggaggccggcgcgggcctgcgtagcctggcagagccgtgggccgacaccaccacgccggccggccgcatggtgttgaccgtgttcgccggcattgccgagttcgagcgttccctaatcatcgaccgcacccggagcgggcgcgaggccgccaaggcccgaggcgtgaagtttggcccccgccctaccctcaccccggcacagatcgcgcacgcccgcgagctgatcgaccaggaaggccgcaccgtgaaagaggcggctgcactgcttggcgtgcatcgctcgaccctgtaccgcgcacttgagcgcagcgaggaagtgacgcccaccgaggccaggcggcgcggtgccttccgtgaggacgcattgaccgaggccgacgccctggcggccgccgagaatgaacgccaagaggaacaagcatgaaaccgcaccaggacggccaggacgaaccgtttttcattaccgaagagatcgaggcggagatgatcgcggccgggtacgtgttcgagccgcccgcgcacgtctcaaccgtgcggctgcatgaaatcctggccggtttgtctgatgccaagctggcggcctggccggccagcttggccgctgaagaaaccgagcgccgccgtctaaaaaggtgatgtgtatttgagtaaaacagcttgcgtcatgcggtcgctgcgtatatgatgcgatgagtaaataaacaaatacgcaaggggaacgcatgaaggttatcgctgtacttaaccagaaaggcgggtcaggcaagacgaccatcgcaacccatctagcccgcgccctgcaactcgccggggccgatgttctgttagtcgattccgatccccagggcagtgcccgcgattgggcggccgtgcgggaagatcaaccgctaaccgttgtcggcatcgaccgcccgacgattgaccgcgacgtgaaggccatcggccggcgcgacttcgtagtgatcgacggagcgccccaggcggcggacttggctgtgtccgcgatcaaggcagccgacttcgtgctgattccggtgcagccaagcccttacgacatatgggccaccgccgacctggtggagctggttaagcagcgcattgaggtcacggatggaaggctacaagcggcctttgtcgtgtcgcgggcgatcaaaggcacgcgcatcggcggtgaggttgccgaggcgctggccgggtacgagctgcccattcttgagtcccgtatcacgcagcgcgtgagctacccaggcactgccgccgccggcacaaccgttcttgaatcagaacccgagggcgacgctgcccgcgaggtccaggcgctggccgctgaaattaaatcaaaactcatttgagttaatgaggtaaagagaaaatgagcaaaagcacaaacacgctaagtgccggccgtccgagcgcacgcagcagcaaggctgcaacgttggccagcctggcagacacgccagccatgaagcgggtcaactttcagttgccggcggaggatcacaccaagctgaagatgtacgcggtacgccaaggcaagaccattaccgagctgctatctgaatacatcgcgcagctaccagagtaaatgagcaaatgaataaatgagtagatgaattttagcggctaaaggaggcggcatggaaaatcaagaacaaccaggcaccgacgccgtggaatgccccatgtgtggaggaacgggcggttggccaggcgtaagcggctgggttgtctgccggccctgcaatggcactggaacccccaagcccgaggaatcggcgtgacggtcgcaaaccatccggcccggtacaaatcggcgcggcgctgggtgatgacctggtggagaagttgaaggccgcgcaggccgcccagcggcaacgcatcgaggcagaagcacgccccggtgaatcgtggcaagcggccgctgatcgaatccgcaaagaatcccggcaaccgccggcagccggtgcgccgtcgattaggaagccgcccaagggcgacgagcaaccagattttttcgttccgatgctctatgacgtgggcacccgcgatagtcgcagcatcatggacgtggccgttttccgtctgtcgaagcgtgaccgacgagctggcgaggtgatccgctacgagcttccagacgggcacgtagaggtttccgcagggccggccggcatggccagtgtgtgggattacgacctggtactgatggcggtttcccatctaaccgaatccatgaaccgataccgggaagggaagggagacaagcccggccgcgtgttccgtccacacgttgcggacgtactcaagttctgccggcgagccgatggcggaaagcagaaagacgacctggtagaaacctgcattcggttaaacaccacgcacgttgccatgcagcgtacgaagaaggccaagaacggccgcctggtgacggtatccgagggtgaagccttgattagccgctacaagatcgtaaagagcgaaaccgggcggccggagtacatcgagatcgagctagctgattggatgtaccgcgagatcacagaaggcaagaacccggacgtgctgacggttcaccccgattactttttgatcgatcccggcatcggccgttttctctaccgcctggcacgccgcgccgcaggcaaggcagaagccagatggttgttcaagacgatctacgaacgcagtggcagcgccggagagttcaagaagttctgtttcaccgtgcgcaagctgatcgggtcaaatgacctgccggagtacgatttgaaggaggaggcggggcaggctggcccgatcctagtcatgcgctaccgcaacctgatcgagggcgaagcatccgccggttcctaatgtacggagcagatgctagggcaaattgccctagcaggggaaaaaggtcgaaaaggtctctttcctgtggatagcacgtacattgggaacccaaagccgtacattgggaaccggaacccgtacattgggaacccaaagccgtacattgggaaccggtcacacatgtaagtgactgatataaaagagaaaaaaggcgatttttccgcctaaaactctttaaaacttattaaaactcttaaaacccgcctggcctgtgcataactgtctggccagcgcacagccgaagagctgcaaaaagcgcctacccttcggtcgctgcgctccctacgccccgccgcttcgcgtcggcctatcgcggccgctggccgctcaaaaatggctggcctacggccaggcaatctaccagggcgcggacaagccgcgccgtcgccactcgaccgccggcgcccacatcaaggcaccctgcctcgcgcgtttcggtgatgacggtgaaaacctctgacacatgcagctcccggagacggtcacagcttgtctgtaagcggatgccgggagcagacaagcccgtcagggcgcgtcagcgggtgttggcgggtgtcggggcgcagccatgacccagtcacgtagcgatagcggagtgtatactggcttaactatgcggcatcagagcagattgtactgagagtgcaccatatgcggtgtgaaataccgcacagatgcgtaaggagaaaataccgcatcaggcgctcttccgcttcctcgctcactgactcgctgcgctcggtcgttcggctgcggcgagcggtatcagctcactcaaaggcggtaatacggttatccacagaatcaggggataacgcaggaaagaacatgtgagcaaaaggccagcaaaaggccaggaaccgtaaaaaggccgcgttgctggcgtttttccataggctccgcccccctgacgagcatcacaaaaatcgacgctcaagtcagaggtggcgaaacccgacaggactataaagataccaggcgtttccccctggaagctccctcgtgcgctctcctgttccgaccctgccgcttaccggatacctgtccgcctttctcccttcgggaagcgtggcgctttctcatagctcacgctgtaggtatctcagttcggtgtaggtcgttcgctccaagctgggctgtgtgcacgaaccccccgttcagcccgaccgctgcgccttatccggtaactatcgtcttgagtccaacccggtaagacacgacttatcgccactggcagcagccactggtaacaggattagcagagcgaggtatgtaggcggtgctacagagttcttgaagtggtggcctaactacggctacactagaaggacagtatttggtatctgcgctctgctgaagccagttaccttcggaaaaagagttggtagctcttgatccggcaaacaaaccaccgctggtagcggtggtttttttgtttgcaagcagcagattacgcgcagaaaaaaaggatctcaagaagatcctttgatcttttctacggggtctgacgctcagtggaacgaaaactcacgttaagggattttggtcatgcattctaggtactaaaacaattcatccagtaaaatataatattttattttctcccaatcaggcttgatccccagtaagtcaaaaaatagctcgacatactgttcttccccgatatcctccctgatcgaccggacgcagaaggcaatgtcataccacttgtccgccctgccgcttctcccaagatcaataaagccacttactttgccatctttcacaaagatgttgctgtctcccaggtcgccgtgggaaaagacaagttcctcttcgggcttttccgtctttaaaaaatcatacagctcgcgcggatctttaaatggagtgtcttcttcccagttttcgcaatccacatcggccagatcgttattcagtaagtaatccaattcggctaagcggctgtctaagctattcgtatagggacaatccgatatgtcgatggagtgaaagagcctgatgcactccgcatacagctcgataatcttttcagggctttgttcatcttcatactcttccgagcaaaggacgccatcggcctcactcatgagcagattgctccagccatcatgccgttcaaagtgcaggacctttggaacaggcagctttccttccagccatagcatcatgtccttttcccgttccacatcataggtggtccctttataccggctgtccgtcatttttaaatataggttttcattttctcccaccagcttatataccttagcaggagacattccttccgtatcttttacgcagcggtatttttcgatcagttttttcaattccggtgatattctcattttagccatttattatttccttcctcttttctacagtatttaaagataccccaagaagctaattataacaagacgaactccaattcactgttccttgcattctaaaaccttaaataccagaaaacagctttttcaaagttgttttcaaagttggcgtataacatagtatcgacggagccgattttgaaaccgcggtgatcacaggcagcaacgctctgtcatcgttacaatcaacatgctaccctccgcgagatcatccgtgtttcaaacccggcagcttagttgccgttcttccgaatagcatcggtaacatgagcaaagtctgccgccttacaacggctctcccgctgacgccgtcccggactgatgggctgcctgtatcgagtggtgattttgtgccgagctgccggtcggggagctgttggctggctggtggcaggatatattgtggtgtaaacaaattgacgcttagacaacttaataacacattgcggacgtttttaatgtactgaattaacgccgaatta

SEQ ID NO: 4 - protein, 58 aa, Artificial
  Synthetic Construct
MTTAVTAAVSFPSTKTTSLSARSSSVISPDKISYKKVPLYYRNVSATGKMGPIRAQIA

SEQ ID NO: 5 - DNA, 9465 bp, Artificial
  vector used for overexpression the gene of interest
  CDS (2290)..(2400): FNR transit peptide
  CDS (2478)..(2540): FNR transit peptide
gctttgggcggatcctctagaggacaatcagtaaattgaacggagaatattattcataaaaatacgatagtaacgggtgatatattcattagaatgaaccgaaaccggcggtaaggatctgagctacacatgctcaggttttttacaacgtgcacaacagaattgaaagcaaatatcatgcgatcataggcgtctcgcatatctcattaaagcagggcatgccggtcgagtcaaatctcggtgacgggcaggaccggacggggcggtaccggcaggctgaagtccagctgccagaaacccacgtcatgccagttcccgtgcttgaagccggccgcccgcagcatgccgcggggggcatatccgagcgcctcgtgcatgcgcacgctcgggtcgttgggcagcccgatgacagcgaccacgctcttgaagccctgtgcctccagggacttcagcaggtgggtgtagagcgtggagcccagtcccgtccgctggtggcggggggagacgtacacggtcgactcggccgtccagtcgtaggcgttgcgtgccttccaggggcccgcgtaggcgatgccggcgacctcgccgtccacctcggcgacgagccagggatagcgctcccgcagacggacgaggtcgtccgtccactcctgcggttcctgcggctcggtacggaagttgaccgtgcttgtctcgatgtagtggttgacgatggtgcagaccgccggcatgtccgcctcggtggcacggcggatgtcggccgggcgtcgttctgggctcatggtagactcgacggatccacgtgtggaagatatgaatttttttgagaaactagataagattaatgaatatcggtgttttggttttttcttgtggccgtctttgtttatattgagatttttcaaatcagtgcgcaagacgtgacgtaagtatccgagtcagtttttatttttctactaatttggtcgaatctagattcgacggtatcgataagctcgcggatccctgaaagcgacgttggatgttaacatctacaaattgccttttcttatcgaccatgtacgtaagcgcttacgtttttggtggacccttgaggaaactggtagctgttgtgggcctgtggtctcaagatggatcattaatttccaccttcacctacgatggggggcatcgcaccggtgagtaatattgtacggctaagagcgaatttggcctgtaggatccctgaaagcgacgttggatgttaacatctacaaattgccttttcttatcgaccatgtacgtaagcgcttacgtttttggtggacccttgaggaaactggtagctgttgtgggcctgtggtctcaagatggatcattaatttccaccttcacctacgatggggggcatcgcaccggtgagtaatattgtacggctaagagcgaatttggcctgtaggatccctgaaagcgacgttggatgttaacatctacaaattgccttttcttatcgaccatgtacgtaagcgcttacgtttttggtggacccttgaggaaactggtagctgttgtgggcctgtggtctcaagatggatcattaatttccaccttcacctacgatggggggcatcgcaccggtgagtaatattgtacggctaagagcgaatttggcctgtaggatccgcgagctggtcaatcccattgcttttgaagcagctcaacattgatctctttctcgatcgagggagatttttcaaatcagtgcgcaagacgtgacgtaagtatccgagtcagtttttatttttctactaatttggtcgtttatttcggcgtgtaggacatggcaaccgggcctgaatttcgcgggtattctgtttctattccaactttttcttgatccgcagccattaacgacttttgaatagatacgctgacacgccaagcctcgctagtcaaaagtgtaccaaacaacgctttacagcaagaacggaatgcgcgtgacgctcgcggtgacgccatttcgccttttcagaaatggataaatagccttgcttcctattatatcttcccaaattaccaatacattacactagcatctgaatttcataaccaatctcgatacaccaaatcgaagatctcccaaacgcataaacttatcttcatagttgccactccaatttgctccttgaatctcctccacccaatacataatccactcctccatcacccacttcactactaaatcaaacttaactctgtttttctctctcctcctttcatttcttattcttccaatcatcgtactccgccatgaccaccgctgtcaccgccgctgtttctttcccctctaccaaaaccacctctctctccgcccgaagctcctccgtcatttcccctgacaaaatcagctacaaaaaggtgattcccaatttcactgtgttttttattaataatttgttattttgatgatgagatgattaatttgggtgctgcaggttcctttgtactacaggaatgtatctgcaactgggaaaatgggacccatcagggcccagatcgcctcttgctcttccatggcaatgattaattaacgaagagcaagagctcgaatttccccgatcgttcaaacatttggcaataaagtttcttaagattgaatcctgttgccggtcttgcgatgattatcatataatttctgttgaattacgttaagcatgtaataattaacatgtaatgcatgacgttatttatgagatgggtttttatgattagagtcccgcaattatacatttaatacgcgatagaaaacaaaatatagcgcgcaaactaggataaattatcgcgcgcggtgtcatctatgttactagatcgggaattggcatgcaagcttggcactggccgtcgttttacaacgtcgtgactgggaaaaccctggcgttacccaacttaatcgccttgcagcacatccccctttcgccagctggcgtaatagcgaagaggcccgcaccgatcgcccttcccaacagttgcgcagcctgaatggcgaatgctagagcagcttgagcttggatcagattgtcgtttcccgccttcagtttaaactatcagtgtttgacaggatatattggcgggtaaacctaagagaaaagagcgtttattagaataatcggatatttaaaagggcgtgaaaaggtttatccgttcgtccatttgtatgtgcatgccaaccacagggttcccctcgggatcaaagtactttgatccaacccctccgctgctatagtgcagtcggcttctgacgttcagtgcagccgtcttctgaaaacgacatgtcgcacaagtcctaagttacgcgacaggctgccgccctgcccttttcctggcgttttcttgtcgcgtgttttagtcgcataaagtagaatacttgcgactagaaccggagacattacgccatgaacaagagcgccgccgctggcctgctgggctatgcccgcgtcagcaccgacgaccaggacttgaccaaccaacgggccgaactgcacgcggccggctgcaccaagctgttttccgagaagatcaccggcaccaggcgcgaccgcccggagctggccaggatgcttgaccacctacgccctggcgacgttgtgacagtgaccaggctagaccgcctggcccgcagcacccgcgacctactggacattgccgagcgcatccaggaggccggcgcgggcctgcgtagcctggcagagccgtgggccgacaccaccacgccggccggccgcatggtgttgaccgtgttcgccggcattgccgagttcgagcgttccctaatcatcgaccgcacccggagcgggcgcgaggccgccaaggcccgaggcgtgaagtttggcccccgccctaccctcaccccggcacagatcgcgcacgcccgcgagctgatcgaccaggaaggccgcaccgtgaaagaggcggctgcactgcttggcgtgcatcgctcgaccctgtaccgcgcacttgagcgcagcgaggaagtgacgcccaccgaggccaggcggcgcggtgccttccgtgaggacgcattgaccgaggccgacgccctggcggccgccgagaatgaacgccaagaggaacaagcatgaaaccgcaccaggacggccaggacgaaccgtttttcattaccgaagagatcgaggcggagatgatcgcggccgggtacgtgttcgagccgcccgcgcacgtctcaaccgtgcggctgcatgaaatcctggccggtttgtctgatgccaagctggcggcctggccggccagcttggccgctgaagaaaccgagcgccgccgtctaaaaaggtgatgtgtatttgagtaaaacagcttgcgtcatgcggtcgctgcgtatatgatgcgatgagtaaataaacaaatacgcaaggggaacgcatgaaggttatcgctgtacttaaccagaaaggcgggtcaggcaagacgaccatcgcaacccatctagcccgcgccctgcaactcgccggggccgatgttctgttagtcgattccgatccccagggcagtgcccgcgattgggcggccgtgcgggaagatcaaccgctaaccgttgtcggcatcgaccgcccgacgattgaccgcgacgtgaaggccatcggccggcgcgacttcgtagtgatcgacggagcgccccaggcggcggacttggctgtgtccgcgatcaaggcagccgacttcgtgctgattccggtgcagccaagcccttacgacatatgggccaccgccgacctggtggagctggttaagcagcgcattgaggtcacggatggaaggctacaagcggcctttgtcgtgtcgcgggcgatcaaaggcacgcgcatcggcggtgaggttgccgaggcgctggccgggtacgagctgcccattcttgagtcccgtatcacgcagcgcgtgagctacccaggcactgccgccgccggcacaaccgttcttgaatcagaacccgagggcgacgctgcccgcgaggtccaggcgctggccgctgaaattaaatcaaaactcatttgagttaatgaggtaaagagaaaatgagcaaaagcacaaacacgctaagtgccggccgtccgagcgcacgcagcagcaaggctgcaacgttggccagcctggcagacacgccagccatgaagcgggtcaactttcagttgccggcggaggatcacaccaagctgaagatgtacgcggtacgccaaggcaagaccattaccgagctgctatctgaatacatcgcgcagctaccagagtaaatgagcaaatgaataaatgagtagatgaattttagcggctaaaggaggcggcatggaaaatcaagaacaaccaggcaccgacgccgtggaatgccccatgtgtggaggaacgggcggttggccaggcgtaagcggctgggttgtctgccggccctgcaatggcactggaacccccaagcccgaggaatcggcgtgacggtcgcaaaccatccggcccggtacaaatcggcgcggcgctgggtgatgacctggtggagaagttgaaggccgcgcaggccgcccagcggcaacgcatcgaggcagaagcacgccccggtgaatcgtggcaagcggccgctgatcgaatccgcaaagaatcccggcaaccgccggcagccggtgcgccgtcgattaggaagccgcccaagggcgacgagcaaccagattttttcgttccgatgctctatgacgtgggcacccgcgatagtcgcagcatcatggacgtggccgttttccgtctgtcgaagcgtgaccgacgagctggcgaggtgatccgctacgagcttccagacgggcacgtagaggtttccgcagggccggccggcatggccagtgtgtgggattacgacctggtactgatggcggtttcccatctaaccgaatccatgaaccgataccgggaagggaagggagacaagcccggccgcgtgttccgtccacacgttgcggacgtactcaagttctgccggcgagccgatggcggaaagcagaaagacgacctggtagaaacctgcattcggttaaacaccacgcacgttgccatgcagcgtacgaagaaggccaagaacggccgcctggtgacggtatccgagggtgaagccttgattagccgctacaagatcgtaaagagcgaaaccgggcggccggagtacatcgagatcgagctagctgattggatgtaccgcgagatcacagaaggcaagaacccggacgtgctgacggttcaccccgattactttttgatcgatcccggcatcggccgttttctctaccgcctggcacgccgcgccgcaggcaaggcagaagccagatggttgttcaagacgatctacgaacgcagtggcagcgccggagagttcaagaagttctgtttcaccgtgcgcaagctgatcgggtcaaatgacctgccggagtacgatttgaaggaggaggcggggcaggctggcccgatcctagtcatgcgctaccgcaacctgatcgagggcgaagcatccgccggttcctaatgtacggagcagatgctagggcaaattgccctagcaggggaaaaaggtcgaaaaggtctctttcctgtggatagcacgtacattgggaacccaaagccgtacattgggaaccggaacccgtacattgggaacccaaagccgtacattgggaaccggtcacacatgtaagtgactgatataaaagagaaaaaaggcgatttttccgcctaaaactctttaaaacttattaaaactcttaaaacccgcctggcctgtgcataactgtctggccagcgcacagccgaagagctgcaaaaagcgcctacccttcggtcgctgcgctccctacgccccgccgcttcgcgtcggcctatcgcggccgctggccgctcaaaaatggctggcctacggccaggcaatctaccagggcgcggacaagccgcgccgtcgccactcgaccgccggcgcccacatcaaggcaccctgcctcgcgcgtttcggtgatgacggtgaaaacctctgacacatgcagctcccggagacggtcacagcttgtctgtaagcggatgccgggagcagacaagcccgtcagggcgcgtcagcgggtgttggcgggtgtcggggcgcagccatgacccagtcacgtagcgatagcggagtgtatactggcttaactatgcggcatcagagcagattgtactgagagtgcaccatatgcggtgtgaaataccgcacagatgcgtaaggagaaaataccgcatcaggcgctcttccgcttcctcgctcactgactcgctgcgctcggtcgttcggctgcggcgagcggtatcagctcactcaaaggcggtaatacggttatccacagaatcaggggataacgcaggaaagaacatgtgagcaaaaggccagcaaaaggccaggaaccgtaaaaaggccgcgttgctggcgtttttccataggctccgcccccctgacgagcatcacaaaaatcgacgctcaagtcagaggtggcgaaacccgacaggactataaagataccaggcgtttccccctggaagctccctcgtgcgctctcctgttccgaccctgccgcttaccggatacctgtccgcctttctcccttcgggaagcgtggcgctttctcatagctcacgctgtaggtatctcagttcggtgtaggtcgttcgctccaagctgggctgtgtgcacgaaccccccgttcagcccgaccgctgcgccttatccggtaactatcgtcttgagtccaacccggtaagacacgacttatcgccactggcagcagccactggtaacaggattagcagagcgaggtatgtaggcggtgctacagagttcttgaagtggtggcctaactacggctacactagaaggacagtatttggtatctgcgctctgctgaagccagttaccttcggaaaaagagttggtagctcttgatccggcaaacaaaccaccgctggtagcggtggtttttttgtttgcaagcagcagattacgcgcagaaaaaaaggatctcaagaagatcctttgatcttttctacggggtctgacgctcagtggaacgaaaactcacgttaagggattttggtcatgcattctaggtactaaaacaattcatccagtaaaatataatattttattttctcccaatcaggcttgatccccagtaagtcaaaaaatagctcgacatactgttcttccccgatatcctccctgatcgaccggacgcagaaggcaatgtcataccacttgtccgccctgccgcttctcccaagatcaataaagccacttactttgccatctttcacaaagatgttgctgtctcccaggtcgccgtgggaaaagacaagttcctcttcgggcttttccgtctttaaaaaatcatacagctcgcgcggatctttaaatggagtgtcttcttcccagttttcgcaatccacatcggccagatcgttattcagtaagtaatccaattcggctaagcggctgtctaagctattcgtatagggacaatccgatatgtcgatggagtgaaagagcctgatgcactccgcatacagctcgataatcttttcagggctttgttcatcttcatactcttccgagcaaaggacgccatcggcctcactcatgagcagattgctccagccatcatgccgttcaaagtgcaggacctttggaacaggcagctttccttccagccatagcatcatgtccttttcccgttccacatcataggtggtccctttataccggctgtccgtcatttttaaatataggttttcattttctcccaccagcttatataccttagcaggagacattccttccgtatcttttacgcagcggtatttttcgatcagttttttcaattccggtgatattctcattttagccatttattatttccttcctcttttctacagtatttaaagataccccaagaagctaattataacaagacgaactccaattcactgttccttgcattctaaaaccttaaataccagaaaacagctttttcaaagttgttttcaaagttggcgtataacatagtatcgacggagccgattttgaaaccgcggtgatcacaggcagcaacgctctgtcatcgttacaatcaacatgctaccctccgcgagatcatccgtgtttcaaacccggcagcttagttgccgttcttccgaatagcatcggtaacatgagcaaagtctgccgccttacaacggctctcccgctgacgccgtcccggactgatgggctgcctgtatcgagtggtgattttgtgccgagctgccggtcggggagctgttggctggctggtggcaggatatattgtggtgtaaacaaattgacgcttagacaacttaataacacattgcggacgtttttaatgtactgaattaacgccgaattaa

SEQ ID NO: 6 - protein, 58 aa, Artificial; identical to SEQ ID NO: 4
  Synthetic Construct

SEQ ID NO: 7 - DNA, 19 bp, Artificial
  adapter sequence added to gene specific primers for cloning purposes
ggaattccagctgaccacc

SEQ ID NO: 8 - DNA, 20 bp, Artificial
  adapter sequence added to gene specific primers for cloning purposes
gatccccgggaattgccatg

SEQ ID NO: 9 - DNA, 10 bp, Artificial
  adapter sequence added to gene specific primers for cloning purposes
ttgctcttcc

SEQ ID NO: 10 - DNA, 10 bp, Artificial
  adapter sequence added to gene specific primers for cloning purposes
ttgctcttcg

SEQ ID NO: 11 - DNA, 34 bp, Artificial
  Amplification of the targeting sequence of the gene FNR from Spinacia oleracea to generate the S.cerevisiae plastidic targeting vector VC-MME354-1
atagaattcgcataaacttatcttcatagttgcc

SEQ ID NO: 12 - DNA, 27 bp, Artificial
  Amplification of the targeting sequence of the gene FNR from Spinacia oleracea to generate the S.cerevisiae plastidic targeting vector VC-MME354-1
atagaattcagaggcgatctgggccct

SEQ ID NO: 13 - DNA, 36 bp, Artificial
  Amplification of the targeting sequence of the gene FNR from Spinacia oleracea to generate the E.coli plastidic targeting vector VC-MME432-1
atagtttaaacgcataaacttatcttcatagttgcc

SEQ ID NO: 14 - DNA, 34 bp, Artificial
  Amplification of the targeting sequence of the gene FNR from Spinacia oleracea to generate the E.coli plastidic targeting vector VC-MME432-1
ataccatggaagagcaagaggcgatctgggccct

SEQ ID NO: 15 - DNA, 9044 bp, Artificial
  base vector used for cloning of plastidic targeting sequence
agctttgggcggatcctctagaggacaatcagtaaattgaacggagaatattattcataaaaatacgatagtaacgggtgatatattcattagaatgaaccgaaaccggcggtaaggatctgagctacacatgctcaggttttttacaacgtgcacaacagaattgaaagcaaatatcatgcgatcataggcgtctcgcatatctcattaaagcagggcatgccggtcgagtcaaatctcggtgacgggcaggaccggacggggcggtaccggcaggctgaagtccagctgccagaaacccacgtcatgccagttcccgtgcttgaagccggccgcccgcagcatgccgcggggggcatatccgagcgcctcgtgcatgcgcacgctcgggtcgttgggcagcccgatgacagcgaccacgctcttgaagccctgtgcctccagggacttcagcaggtgggtgtagagcgtggagcccagtcccgtccgctggtggcggggggagacgtacacggtcgactcggccgtccagtcgtaggcgttgcgtgccttccaggggcccgcgtaggcgatgccggcgacctcgccgtccacctcggcgacgagccagggatagcgctcccgcagacggacgaggtcgtccgtccactcctgcggttcctgcggctcggtacggaagttgaccgtgcttgtctcgatgtagtggttgacgatggtgcagaccgccggcatgtccgcctcggtggcacggcggatgtcggccgggcgtcgttctgggctcatggtagactcgacggatccacgtgtggaagatatgaatttttttgagaaactagataagattaatgaatatcggtgttttggttttttcttgtggccgtctttgtttatattgagatttttcaaatcagtgcgcaagacgtgacgtaagtatccgagtcagtttttatttttctactaatttggtcgaatctagattcgacggtatcgataagctcgcggatccctgaaagcgacgttggatgttaacatctacaaattgccttttcttatcgaccatgtacgtaagcgcttacgtttttggtggacccttgaggaaactggtagctgttgtgggcctgtggtctcaagatggatcattaatttccaccttcacctacgatggggggcatcgcaccggtgagtaatattgtacggctaagagcgaatttggcctgtaggatccctgaaagcgacgttggatgttaacatctacaaattgccttttcttatcgaccatgtacgtaagcgcttacgtttttggtggacccttgaggaaactggtagctgttgtgggcctgtggtctcaagatggatcattaatttccaccttcacctacgatggggggcatcgcaccggtgagtaatattgtacggctaagagcgaatttggcctgtaggatccctgaaagcgacgttggatgttaacatctacaaattgccttttcttatcgaccatgtacgtaagcgcttacgtttttggtggacccttgaggaaactggtagctgttgtgggcctgtggtctcaagatggatcattaatttccaccttcacctacgatggggggcatcgcaccggtgagtaatattgtacggctaagagcgaatttggcctgtaggatccgcgagctggtcaatcccattgcttttgaagcagctcaacattgatctctttctcgatcgagggagatttttcaaatcagtgcgcaagacgtgacgtaagtatccgagtcagtttttatttttctactaatttggtcgtttatttcggcgtgtaggacatggcaaccgggcctgaatttcgcgggtattctgtttctattccaactttttcttgatccgcagccattaacgacttttgaatagatacgctgacacgccaagcctcgctagtcaaaagtgtaccaaacaacgctttacagcaagaacggaatgcgcgtgacgctcgcggtgacgccatttcgccttttcagaaatggataaatagccttgcttcctattatatcttcccaaattaccaatacattacactagcatctgaatttcataaccaatctcgatacaccaaatcgaagatctccctggaattccagctgaccacccatggcaattcccggggatcagctcgaatttccccgatcgttcaaacatttggcaataaagtttcttaagattgaatcctgttgccggtcttgcgatgattatcatataatttctgttgaattacgttaagcatgtaataattaacatgtaatgcatgacgttatttatgagatgggtttttatgattagagtcccgcaattatacatttaatacgcgatagaaaacaaaatatagcgcgcaaactaggataaattatcgcgcgcggtgtcatctatgttactagatcgggaattggcatgcaagcttggcactggccgtcgttttacaacgtcgtgactgggaaaaccctggcgttacccaacttaatcgccttgcagcacatccccctttcgccagctggcgtaatagcgaagaggcccgcaccgatcgcccttcccaacagttgcgcagcctgaatggcgaatgctagagcagcttgagcttggatcagattgtcgtttcccgccttcagtttaaactatcagtgtttgacaggatatattggcgggtaaacctaagagaaaagagcgtttattagaataatcggatatttaaaagggcgtgaaaaggtttatccgttcgtccatttgtatgtgcatgccaaccacagggttcccctcgggatcaaagtactttgatccaacccctccgctgctatagtgcagtcggcttctgacgttcagtgcagccgtcttctgaaaacgacatgtcgcacaagtcctaagttacgcgacaggctgccgccctgcccttttcctggcgttttcttgtcgcgtgttttagtcgcataaagtagaatacttgcgactagaaccggagacattacgccatgaacaagagcgccgccgctggcctgctgggctatgcccgcgtcagcaccgacgaccaggacttgaccaaccaacgggccgaactgcacgcggccggctgcaccaagctgttttccgagaagatcaccggcaccaggcgcgaccgcccggagctggccaggatgcttgaccacctacgccctggcgacgttgtgacagtgaccaggctagaccgcctggcccgcagcacccgcgacctactggacattgccgagcgcatccaggaggccggcgcgggcctgcgtagcctggcagagccgtgggccgacaccaccacgccggccggccgcatggtgttgaccgtgttcgccggcattgccgagttcgagcgttccctaatcatcgaccgcacccggagcgggcgcgaggccgccaaggcccgaggcgtgaagtttggcccccgccctaccctcaccccggcacagatcgcgcacgcccgcgagctgatcgaccaggaaggccgcaccgtgaaagaggcggctgcactgcttggcgtgcatcgctcgaccctgtaccgcgcacttgagcgcagcgaggaagtgacgcccaccgaggccaggcggcgcggtgccttccgtgaggacgcattgaccgaggccgacgccctggcggccgccgagaatgaacgccaagaggaacaagcatgaaaccgcaccaggacggccaggacgaaccgtttttcattaccgaagagatcgaggcggagatgatcgcggccgggtacgtgttcgagccgcccgcgcacgtctcaaccgtgcggctgcatgaaatcctggccggtttgtctgatgccaagctggcggcctggccggccagcttggccgctgaagaaaccgagcgccgccgtctaaaaaggtgatgtgtatttgagtaaaacagcttgcgtcatgcggtcgctgcgtatatgatgcgatgagtaaataaacaaatacgcaaggggaacgcatgaaggttatcgctgtacttaaccagaaaggcgggtcaggcaagacgaccatcgcaacccatctagcccgcgccctgcaactcgccggggccgatgttctgttagtcgattccgatccccagggcagtgcccgcgattgggcggccgtgcgggaagatcaaccgctaaccgttgtcggcatcgaccgcccgacgattgaccgcgacgtgaaggccatcggccggcgcgacttcgtagtgatcgacggagcgccccaggcggcggacttggctgtgtccgcgatcaaggcagccgacttcgtgctgattccggtgcagccaagcccttacgacatatgggccaccgccgacctggtggagctggttaagcagcgcattgaggtcacggatggaaggctacaagcggcctttgtcgtgtcgcgggcgatcaaaggcacgcgcatcggcggtgaggttgccgaggcgctggccgggtacgagctgcccattcttgagtcccgtatcacgcagcgcgtgagctacccaggcactgccgccgccggcacaaccgttcttgaatcagaacccgagggcgacgctgcccgcgaggtccaggcgctggccgctgaaattaaatcaaaactcatttgagttaatgaggtaaagagaaaatgagcaaaagcacaaacacgctaagtgccggccgtccgagcgcacgcagcagcaaggctgcaacgttggccagcctggcagacacgccagccatgaagcgggtcaactttcagttgccggcggaggatcacaccaagctgaagatgtacgcggtacgccaaggcaagaccattaccgagctgctatctgaatacatcgcgcagctaccagagtaaatgagcaaatgaataaatgagtagatgaattttagcggctaaaggaggcggcatggaaaatcaagaacaaccaggcaccgacgccgtggaatgccccatgtgtggaggaacgggcggttggccaggcgtaagcggctgggttgtctgccggccctgcaatggcactggaacccccaagcccgaggaatcggcgtgacggtcgcaaaccatccggcccggtacaaatcggcgcggcgctgggtgatgacctggtggagaagttgaaggccgcgcaggccgcccagcggcaacgcatcgaggcagaagcacgccccggtgaatcgtggcaagcggccgctgatcgaatccgcaaagaatcccggcaaccgccggcagccggtgcgccgtcgattaggaagccgcccaagggcgacgagcaaccagattttttcgttccgatgctctatgacgtgggcacccgcgatagtcgcagcatcatggacgtggccgttttccgtctgtcgaagcgtgaccgacgagctggcgaggtgatccgctacgagcttccagacgggcacgtagaggtttccgcagggccggccggcatggccagtgtgtgggattacgacctggtactgatggcggtttcccatctaaccgaatccatgaaccgataccgggaagggaagggagacaagcccggccgcgtgttccgtccacacgttgcggacgtactcaagttctgccggcgagccgatggcggaaagcagaaagacgacctggtagaaacctgcattcggttaaacaccacgcacgttgccatgcagcgtacgaagaaggccaagaacggccgcctggtgacggtatccgagggtgaagccttgattagccgctacaagatcgtaaagagcgaaaccgggcggccggagtacatcgagatcgagctagctgattggatgtaccgcgagatcacagaaggcaagaacccggacgtgctgacggttcaccccgattactttttgatcgatcccggcatcggccgttttctctaccgcctggcacgccgcgccgcaggcaaggcagaagccagatggttgttcaagacgatctacgaacgcagtggcagcgccggagagttcaagaagttctgtttcaccgtgcgcaagctgatcgggtcaaatgacctgccggagtacgatttgaaggaggaggcggggcaggctggcccgatcctagtcatgcgctaccgcaacctgatcgagggcgaagcatccgccggttcctaatgtacggagcagatgctagggcaaattgccctagcaggggaaaaaggtcgaaaaggtctctttcctgtggatagcacgtacattgggaacccaaagccgtacattgggaaccggaacccgtacattgggaacccaaagccgtacattgggaaccggtcacacatgtaagtgactgatataaaagagaaaaaaggcgatttttccgcctaaaactctttaaaacttattaaaactcttaaaacccgcctggcctgtgcataactgtctggccagcgcacagccgaagagctgcaaaaagcgcctacccttcggtcgctgcgctccctacgccccgccgcttcgcgtcggcctatcgcggccgctggccgctcaaaaatggctggcctacggccaggcaatctaccagggcgcggacaagccgcgccgtcgccactcgaccgccggcgcccacatcaaggcaccctgcctcgcgcgtttcggtgatgacggtgaaaacctctgacacatgcagctcccggagacggtcacagcttgtctgtaagcggatgccgggagcagacaagcccgtcagggcgcgtcagcgggtgttggcgggtgtcggggcgcagccatgacccagtcacgtagcgatagcggagtgtatactggcttaactatgcggcatcagagcagattgtactgagagtgcaccatatgcggtgtgaaataccgcacagatgcgtaaggagaaaataccgcatcaggcgctcttccgcttcctcgctcactgactcgctgcgctcggtcgttcggctgcggcgagcggtatcagctcactcaaaggcggtaatacggttatccacagaatcaggggataacgcaggaaagaacatgtgagcaaaaggccagcaaaaggccaggaaccgtaaaaaggccgcgttgctggcgtttttccataggctccgcccccctgacgagcatcacaaaaatcgacgctcaagtcagaggtggcgaaacccgacaggactataaagataccaggcgtttccccctggaagctccctcgtgcgctctcctgttccgaccctgccgcttaccggatacctgtccgcctttctcccttcgggaagcgtggcgctttctcatagctcacgctgtaggtatctcagttcggtgtaggtcgttcgctccaagctgggctgtgtgcacgaaccccccgttcagcccgaccgctgcgccttatccggtaactatcgtcttgagtccaacccggtaagacacgacttatcgccactggcagcagccactggtaacaggattagcagagcgaggtatgtaggcggtgctacagagttcttgaagtggtggcctaactacggctacactagaaggacagtatttggtatctgcgctctgctgaagccagttaccttcggaaaaagagttggtagctcttgatccggcaaacaaaccaccgctggtagcggtggtttttttgtttgcaagcagcagattacgcgcagaaaaaaaggatctcaagaagatcctttgatcttttctacggggtctgacgctcagtggaacgaaaactcacgttaagggattttggtcatgcattctaggtactaaaacaattcatccagtaaaatataatattttattttctcccaatcaggcttgatccccagtaagtcaaaaaatagctcgacatactgttcttccccgatatcctccctgatcgaccggacgcagaaggcaatgtcataccacttgtccgccctgccgcttctcccaagatcaataaagccacttactttgccatctttcacaaagatgttgctgtctcccaggtcgccgtgggaaaagacaagttcctcttcgggcttttccgtctttaaaaaatcatacagctcgcgcggatctttaaatggagtgtcttcttcccagttttcgcaatccacatcggccagatcgttattcagtaagtaatccaattcggctaagcggctgtctaagctattcgtatagggacaatccgatatgtcgatggagtgaaagagcctgatgcactccgcatacagctcgataatcttttcagggctttgttcatcttcatactcttccgagcaaaggacgccatcggcctcactcatgagcagattgctccagccatcatgccgttcaaagtgcaggacctttggaacaggcagctttccttccagccatagcatcatgtccttttcccgttccacatcataggtggtccctttataccggctgtccgtcatttttaaatataggttttcattttctcccaccagcttatataccttagcaggagacattccttccgtatcttttacgcagcggtatttttcgatcagttttttcaattccggtgatattctcattttagccatttattatttccttcctcttttctacagtatttaaagataccccaagaagctaattataacaagacgaactccaattcactgttccttgcattctaaaaccttaaataccagaaaacagctttttcaaagttgttttcaaagttggcgtataacatagtatcgacggagccgattttgaaaccgcggtgatcacaggcagcaacgctctgtcatcgttacaatcaacatgctaccctccgcgagatcatccgtgtttcaaacccggcagcttagttgccgttcttccgaatagcatcggtaacatgagcaaagtctgccgccttacaacggctctcccgctgacgccgtcccggactgatgggctgcctgtatcgagtggtgattttgtgccgagctgccggtcggggagctgttggctggctggtggcaggatatattgtggtgtaaacaaattgacgcttagacaacttaataacacattgcggacgtttttaatgtactgaattaacgccgaatta

SEQ ID NO: 16 - DNA, 9041 bp, Artificial
  vector used for overexpression the gene of interest
gctttgggcggatccggacaatcagtaaattgaacggagaatattattcataaaaatacgatagtaacgggtgatatattcattagaatgaaccgaaaccggcggtaaggatctgagctacacatgctcaggttttttacaacgtgcacaacagaattgaaagcaaatatcatgcgatcataggcgtctcgcatatctcattaaagcagggcatgccggtcgagtcaaatctcggtgacgggcaggaccggacggggcggtaccggcaggctgaagtccagctgccagaaacccacgtcatgccagttcccgtgcttgaagccggccgcccgcagcatgccgcggggggcatatccgagcgcctcgtgcatgcgcacgctcgggtcgttgggcagcccgatgacagcgaccacgctcttgaagccctgtgcctccagggacttcagcaggtgggtgtagagcgtggagcccagtcccgtccgctggtggcggggggagacgtacacggtcgactcggccgtccagtcgtaggcgttgcgtgccttccaggggcccgcgtaggcgatgccggcgacctcgccgtccacctcggcgacgagccagggatagcgctcccgcagacggacgaggtcgtccgtccactcctgcggttcctgcggctcggtacggaagttgaccgtgcttgtctcgatgtagtggttgacgatggtgcagaccgccggcatgtccgcctcggtggcacggcggatgtcggccgggcgtcgttctgggctcatggtagactcgacggatccacgtgtggaagatatgaatttttttgagaaactagataagattaatgaatatcggtgttttggttttttcttgtggccgtctttgtttatattgagatttttcaaatcagtgcgcaagacgtgacgtaagtatccgagtcagtttttatttttctactaatttggtcgaatctagattcgacggtatcgataagctcgcggatccctgaaagcgacgttggatgttaacatctacaaattgccttttcttatcgaccatgtacgtaagcgcttacgtttttggtggacccttgaggaaactggtagctgttgtgggcctgtggtctcaagatggatcattaatttccaccttcacctacgatggggggcatcgcaccggtgagtaatattgtacggctaagagcgaatttggcctgtaggatccctgaaagcgacgttggatgttaacatctacaaattgccttttcttatcgaccatgtacgtaagcgcttacgtttttggtggacccttgaggaaactggtagctgttgtgggcctgtggtctcaagatggatcattaatttccaccttcacctacgatggggggcatcgcaccggtgagtaatattgtacggctaagagcgaatttggcctgtaggatccctgaaagcgacgttggatgttaacatctacaaattgccttttcttatcgaccatgtacgtaagcgcttacgtttttggtggacccttgaggaaactggtagctgttgtgggcctgtggtctcaagatggatcattaatttccaccttcacctacgatggggggcatcgcaccggtgagtaatattgtacggctaagagcgaatttggcctgtaggatccgcgagctggtcaatcccattgcttttgaagcagctcaacattgatctctttctcgatcgagggagatttttcaaatcagtgcgcaagacgtgacgtaagtatccgagtcagtttttatttttctactaatttggtcgtttatttcggcgtgtaggacatggcaaccgggcctgaatttcgcgggtattctgtttctattccaactttttcttgatccgcagccattaacgacttttgaatagatacgctgacacgccaagcctcgctagtcaaaagtgtaccaaacaacgctttacagcaagaacggaatgcgcgtgacgctcgcggtgacgccatttcgccttttcagaaatggataaatagccttgcttcctattatatcttcccaaattaccaatacattacactagcatctgaatttcataaccaatctcgatacaccaaatcgaagatctcccgggttgctcttccatggcaatgattaattaacgaagagcaagagctcgaatttccccgatcgttcaaacatttggcaataaagtttcttaagattgaatcctgttgccggtcttgcgatgattatcatataatttctgttgaattacgttaagcatgtaataattaacatgtaatgcatgacgttatttatgagatgggtttttatgattagagtcccgcaattatacatttaatacgcgatagaaaacaaaatatagcgcgcaaactaggataaattatcgcgcgcggtgtcatctatgttactagatcgggaattggcatgcaagcttggcactggccgtcgttttacaacgtcgtgactgggaaaaccctggcgttacccaacttaatcgccttgcagcacatccccctttcgccagctggcgtaatagcgaagaggcccgcaccgatcgcccttcccaacagttgcgcagcctgaatggcgaatgctagagcagcttgagcttggatcagattgtcgtttcccgccttcagtttaaactatcagtgtttgacaggatatattggcgggtaaacctaagagaaaagagcgtttattagaataatcggatatttaaaagggcgtgaaaaggtttatccgttcgtccatttgtatgtgcatgccaaccacagggttcccctcgggatcaaagtactttgatccaacccctccgctgctatagtgcagtcggcttctgacgttcagtgcagccgtcttctgaaaacgacatgtcgcacaagtcctaagttacgcgacaggctgccgccctgcccttttcctggcgttttcttgtcgcgtgttttagtcgcataaagtagaatacttgcgactagaaccggagacattacgccatgaacaagagcgccgccgctggcctgctgggctatgcccgcgtcagcaccgacgaccaggacttgaccaaccaacgggccgaactgcacgcggccggctgcaccaagctgttttccgagaagatcaccggcaccaggcgcgaccgcccggagctggccaggatgcttgaccacctacgccctggcgacgttgtgacagtgaccaggctagaccgcctggcccgcagcacccgcgacctactggacattgccgagcgcatccaggaggccggcgcgggcctgcgtagcctggcagagccgtgggccgacaccaccacgccggccggccgcatggtgttgaccgtgttcgccggcattgccgagttcgagcgttccctaatcatcgaccgcacccggagcgggcgcgaggccgccaaggcccgaggcgtgaagtttggcccccgccctaccctcaccccggcacagatcgcgcacgcccgcgagctgatcgaccaggaaggccgcaccgtgaaagaggcggctgcactgcttggcgtgcatcgctcgaccctgtaccgcgcacttgagcgcagcgaggaagtgacgcccaccgaggccaggcggcgcggtgccttccgtgaggacgcattgaccgaggccgacgccctggcggccgccgagaatgaacgccaagaggaacaagcatgaaaccgcaccaggacggccaggacgaaccgtttttcattaccgaagagatcgaggcggagatgatcgcggccgggtacgtgttcgagccgcccgcgcacgtctcaaccgtgcggctgcatgaaatcctggccggtttgtctgatgccaagctggcggcctggccggccagcttggccgctgaagaaaccgagcgccgccgtctaaaaaggtgatgtgtatttgagtaaaacagcttgcgtcatgcggtcgctgcgtatatgatgcgatgagtaaataaacaaatacgcaaggggaacgcatgaaggttatcgctgtacttaaccagaaaggcgggtcaggcaagacgaccatcgcaacccatctagcccgcgccctgcaactcgccggggccgatgttctgttagtcgattccgatccccagggcagtgcccgcgattgggcggccgtgcgggaagatcaaccgctaaccgttgtcggcatcgaccgcccgacgattgaccgcgacgtgaaggccatcggccggcgcgacttcgtagtgatcgacggagcgccccaggcggcggacttggctgtgtccgcgatcaaggcagccgacttcgtgctgattccggtgcagccaagcccttacgacatatgggccaccgccgacctggtggagctggttaagcagcgcattgaggtcacggatggaaggctacaagcggcctttgtcgtgtcgcgggcgatcaaaggcacgcgcatcggcggtgaggttgccgaggcgctggccgggtacgagctgcccattcttgagtcccgtatcacgcagcgcgtgagctacccaggcactgccgccgccggcacaaccgttcttgaatcagaacccgagggcgacgctgcccgcgaggtccaggcgctggccgctgaaattaaatcaaaactcatttgagttaatgaggtaaagagaaaatgagcaaaagcacaaacacgctaagtgccggccgtccgagcgcacgcagcagcaaggctgcaacgttggccagcctggcagacacgccagccatgaagcgggtcaactttcagttgccggcggaggatcacaccaagctgaagatgtacgcggtacgccaaggcaagaccattaccgagctgctatctgaatacatcgcgcagctaccagagtaaatgagcaaatgaataaatgagtagatgaattttagcggctaaaggaggcggcatggaaaatcaagaacaaccaggcaccgacgccgtggaatgccccatgtgtggaggaacgggcggttggccaggcgtaagcggctgggttgcctgccggccctgcaatggcactggaacccccaagcccgaggaatcggcgtgagcggtcgcaaaccatccggcccggtacaaatcggcgcggcgctgggtgatgacctggtggagaagttgaaggccgcgcaggccgcccagcggcaacgcatcgaggcagaagcacgccccggtgaatcgtggcaagcggccgctgatcgaatccgcaaagaatcccggcaaccgccggcagccggtgcgccgtcgattaggaagccgcccaagggcgacgagcaaccagattttttcgttccgatgctctatgacgtgggcacccgcgatagtcgcagcatcatggacgtggccgttttccgtctgtcgaagcgtgaccgacgagctggcgaggtgatccgctacgagcttccagacgggcacgtagaggtttccgcagggccggccggcatggccagtgtgtgggattacgacctggtactgatggcggtttcccatctaaccgaatccatgaaccgataccgggaagggaagggagacaagcccggccgcgtgttccgtccacacgttgcggacgtactcaagttctgccggcgagccgatggcggaaagcagaaagacgacctggtagaaacctgcattcggttaaacaccacgcacgttgccatgcagcgtacgaagaaggccaagaacggccgcctggtgacggtatccgagggtgaagccttgattagccgctacaagatcgtaaagagcgaaaccgggcggccggagtacatcgagatcgagctagctgattggatgtaccgcgagatcacagaaggcaagaacccggacgtgctgacggttcaccccgattactttttgatcgatcccggcatcggccgttttctctaccgcctggcacgccgcgccgcaggcaaggcagaagccagatggttgttcaagacgatctacgaacgcagtggcagcgccggagagttcaagaagttctgtttcaccgtgcgcaagctgatcgggtcaaatgacctgccggagtacgatttgaaggaggaggcggggcaggctggcccgatcctagtcatgcgctaccgcaacctgatcgagggcgaagcatccgccggttcctaatgtacggagcagatgctagggcaaattgccctagcaggggaaaaaggtcgaaaaggtctctttcctgtggatagcacgtacattgggaacccaaagccgtacattgggaaccggaacccgtacattgggaacccaaagccgtacattgggaaccggtcacacatgtaagtgactgatataaaagagaaaaaaggcgatttttccgcctaaaactctttaaaacttattaaaactcttaaaacccgcctggcctgtgcataactgtctggccagcgcacagccgaagagctgcaaaaagcgcctacccttcggtcgctgcgctccctacgccccgccgcttcgcgtcggcctatcgcggccgctggccgctcaaaaatggctggcctacggccaggcaatctaccagggcgcggacaagccgcgccgtcgccactcgaccgccggcgcccacatcaaggcaccctgcctcgcgcgtttcggtgatgacggtgaaaacctctgacacatgcagctcccggagacggtcacagcttgtctgtaagcggatgccgggagcagacaagcccgtcagggcgcgtcagcgggtgttggcgggtgtcggggcgcagccatgacccagtcacgtagcgatagcggagtgtatactggcttaactatgcggcatcagagcagattgtactgagagtgcaccatatgcggtgtgaaataccgcacagatgcgtaaggagaaaataccgcatcaggcgctcttccgcttcctcgctcactgactcgctgcgctcggtcgttcggctgcggcgagcggtatcagctcactcaaaggcggtaatacggttatccacagaatcaggggataacgcaggaaagaacatgtgagcaaaaggccagcaaaaggccaggaaccgtaaaaaggccgcgttgctggcgtttttccataggctccgcccccctgacgagcatcacaaaaatcgacgctcaagtcagaggtggcgaaacccgacaggactataaagataccaggcgtttccccctggaagctccctcgtgcgctctcctgttccgaccctgccgcttaccggatacctgtccgcctttctcccttcgggaagcgtggcgctttctcatagctcacgctgtaggtatctcagttcggtgtaggtcgttcgctccaagctgggctgtgtgcacgaaccccccgttcagcccgaccgctgcgccttatccggtaactatcgtcttgagtccaacccggtaagacacgacttatcgccactggcagcagccactggtaacaggattagcagagcgaggtatgtaggcggtgctacagagttcttgaagtggtggcctaactacggctacactagaaggacagtatttggtatctgcgctctgctgaagccagttaccttcggaaaaagagttggtagctcttgatccggcaaacaaaccaccgctggtagcggtggtttttttgtttgcaagcagcagattacgcgcagaaaaaaaggatctcaagaagatcctttgatcttttctacggggtctgacgctcagtggaacgaaaactcacgttaagggattttggtcatgcattctaggtactaaaacaattcatccagtaaaatataatattttattttctcccaatcaggcttgatccccagtaagtcaaaaaatagctcgacatactgttcttccccgatatcctccctgatcgaccggacgcagaaggcaatgtcataccacttgtccgccctgccgcttctcccaagatcaataaagccacttactttgccatctttcacaaagatgttgctgtctcccaggtcgccgtgggaaaagacaagttcctcttcgggcttttccgtctttaaaaaatcatacagctcgcgcggatctttaaatggagtgtcttcttcccagttttcgcaatccacatcggccagatcgttattcagtaagtaatccaattcggctaagcggctgtctaagctattcgtatagggacaatccgatatgtcgatggagtgaaagagcctgatgcactccgcatacagctcgataatcttttcagggctttgttcatcttcatactcttccgagcaaaggacgccatcggcctcactcatgagcagattgctccagccatcatgccgttcaaagtgcaggacctttggaacaggcagctttccttccagccatagcatcatgtccttttcccgttccacatcataggtggtccctttataccggctgtccgtcatttttaaatataggttttcattttctcccaccagcttatataccttagcaggagacattccttccgtatcttttacgcagcggtatttttcgatcagttttttcaattccggtgatattctcattttagccatttattatttccttcctcttttctacagtatttaaagataccccaagaagctaattataacaagacgaactccaattcactgttccttgcattctaaaaccttaaataccagaaaacagctttttcaaagttgttttcaaagttggcgtataacatagtatcgacggagccgattttgaaaccgcggtgatcacaggcagcaacgctctgtcatcgttacaatcaacatgctaccctccgcgagatcatccgtgtttcaaacccggcagcttagttgccgttcttccgaatagcatcggtaacatgagcaaagtctgccgccttacaacggctctcccgctgacgccgtcccggactgatgggctgcctgtatcgagtggtgattttgtgccgagctgccggtcggggagctgttggctggctggtggcaggatatattgtggtgtaaacaaattgacgcttagacaacttaataacacattgcggacgtttttaatgtactgaattaacgccgaattaa

SEQ ID NO: 17 - protein, 62 aa, Acetabularia mediterranea
MASIMMNKSVVLSKECAKPLATPKVTLNKRGFATTIATKNREMMVWQPFNNKMFETFSFLPP

SEQ ID NO: 18 - protein, 90 aa, Arabidopsis thaliana
MAASLQSTATFLQSAKIATAPSRGSSHLRSTQAVGKSFGLETSSARLTCSFQSDFKDFTGKCSDAVKIAGFALATSALVVSGASAEGAPK

SEQ ID NO: 19 - protein, 96 aa, Arabidopsis thaliana
MAQVSRICNGVQNPSLICNLSKSSQRKSPLSVSLKTQQHPRAYPISSSWGLKKSGMTLIGSELRPLKVMSSVSTAEKASEIVLQPIREISGLIKLP

SEQ ID NO: 20 - protein, 100 aa, Arabidopsis thaliana
MAAATTTTTTSSSISFSTKPSPSSSKSPLPISRFSLPFSLNPNKSSSSSRRRGIKSSSPSSISAVLNTTTNVTTTPSPTKPTKPETFISRFAPDQPRKGA

SEQ ID NO: 21 - protein, 46 aa, Arabidopsis thaliana
MITSSLTCSLQALKLSSPFAHGSTPLSSLSKPNSFPNHRMPALVPV

SEQ ID NO: 22 - protein, 93 aa, Arabidopsis thaliana
MASLLGTSSSAIWASPSLSSPSSKPSSSPICFRPGKLFGSKLNAGIQIRPKKNRSRYHVSVMNVATEINSTEQVVGKFDSKKSARPVYPFAAI

SEQ ID NO: 23 - protein, 52 aa, Arabidopsis thaliana
MASTALSSAIVGTSFIRRSPAPISLRSLPSANTQSLFGLKSGTARGGRVVAM

SEQ ID NO: 24 - protein, 39 aa, Arabidopsis thaliana
MAASTMALSSPAFAGKAVNLSPAASEVLGSGRVTNRKTV

SEQ ID NO: 25 - protein, 92 aa, Arabidopsis thaliana
MAAITSATVTIPSFTGLKLAVSSKPKTLSTISRSSSATRAPPKLALKSSLKDFGVIAVATAASIVLAGNAMAMEVLLGSDDGSLAFVPSEFT

SEQ ID NO: 26 - protein, 85 aa, Arabidopsis thaliana
MAAAVSTVGAINRAPLSLNGSGSGAVSAPASTFLGKKVVTVSRFAQSNKKSNGSFKVLAVKEDKQTDGDRWRGLAYDTSDDQIDI

SEQ ID NO: 27 - protein, 54 aa, Arabidopsis thaliana
MKSSMLSSTAWTSPAQATMVAPFTGLKSSASFPVTRKANNDITSITSNGGRVSC

SEQ ID NO: 28 - protein, 91 aa, Arabidopsis thaliana
MAASGTSATFRASVSSAPSSSSQLTHLKSPFKAVKYTPLPSSRSKSSSFSVSCTIAKDPPVLMAAGSDPALWQRPDSFGRFGKFGGKYVPE

SEQ ID NO: 29 - protein, 80 aa, Brassica campestris
MSTTFCSSVCMQATSLAATTRISFQKPALVSTTNLSFNLRRSIPTRFSISCAAKPETVEKVSKIVKKQLSLKDDQKVVAE

SEQ ID NO: 30 - protein, 51 aa, Brassica napus
MATTFSASVSMQATSLATTTRISFQKPVLVSNHGRTNLSFNLSRTRLSISC

SEQ ID NO: 31 - protein, 44 aa, Chlamydomonas reinhardtii
MQALSSRVNIAAKPQRAQRLVVRAEEVKAAPKKEVGPKRGSLVK

SEQ ID NO: 32 - protein, 51 aa, Cucurbita moschata
MAELIQDKESAQSAATAAAASSGYERRNEPAHSRKFLEVRSEEELLSCIKK

SEQ ID NO: 33 - protein, 62 aa, Spinacea oleracea
MSTINGCLTSISPSRTQLKNTSTLRPTFIANSRVNPSSSVPPSLIRNQPVFAAPAPIITPTL

SEQ ID NO: 34 - protein, 75 aa, Spinacea oleracea
MTTAVTAAVSFPSTKTTSLSARCSSVISPDKISYKKVPLYYRNVSATGKMGPIRAQIASDVEAPPPAPAKVEKMS

SEQ ID NO: 35 - protein, 55 aa, Spinacea oleracea
MTTAVTAAVSFPSTKTTSLSARSSSVISPDKISYKKVPLYYRNVSATGKMGPIRA

SEQ ID NO: 36 - DNA, 419 bp, Spinacia oleracea
  5'UTR (1)..(168)
  CDS (166)..(273)
  CDS (351)..(419)
gcataaacttatcttcatagttgccactccaatttgctccttgaatctcctccacccaatacataatccactcctccatcacccacttcactactaaatcaaacttaactctgtttttctctctcctcctttcatttcttattcttccaatcatcgtactccgccatgaccaccgctgtcaccgccgctgtttctttcccctctaccaaaaccacctctctctccgcccgaagctcctccgtcatttcccctgacaaaatcagctacaaaaaggtgattcccaatttcactgtgttttttattaataatttgttattttgatgatgagatgattaatttgggtgctgcaggttcctttgtactacaggaatgtatctgcaactgggaaaatgggacccatcagggcccagatcgcctct

SEQ ID NO: 37 - protein, 59 aa, Spinacia oleracea
MTTAVTAAVSFPSTKTTSLSARSSSVISPDKISYKKVPLYYRNVSATGKMGPIRAQIAS

SEQ ID NO: 38 - DNA, 459 bp, Escherichia coli K12
  CDS (1)..(459): transl_table=11
atgttccggggagcaacgttagtcaatctcgacagcaaagggcgcttatcagtgcctacccgttatcgggaacagctgcttgagaacgctgccggtcaaatggtttgcaccattgacatttatcacccgtgcctgctgctttaccccctgcctgaatgggaaattatcgagcaaaaattatcgcgtctgtcgagcatgaacccggttgagcgccgtgtgcagcgcctactgttaggtcatgccagcgaatgtcagatggatggcgcaggtcgattgttaatcgcgccagtactgcggcaacatgccgggctgacaaaagaagtgatgctggttggacagttcaacaagtttgagctgtgggatgaaacaacctggcatcaacaggtcaaggaagatatcgacgcagagcagttggctaccggagacttatcggagcgactgcaggacttgtctctataa

SEQ ID NO: 39 - protein, 152 aa, Escherichia coli K12
MFRGATLVNLDSKGRLSVPTRYREQLLENAAGQMVCTIDIYHPCLLLYPLPEWEIIEQKLSRLSSMNPVERRVQRLLLGHASECQMDGAGRLLIAPVLRQHAGLTKEVMLVGQFNKFELWDETTWHQQVKEDIDAEQLATGDLSERLQDLSL

SEQ ID NO: 40 - DNA, 474 bp, Pseudomonas putida KT2440
  CDS (1)..(474): transl_table=11
ttgtggggaatcacagccgtgttccgcggagccaacgccgtcagcctcgatgccaagggccgtctcgccatgccgagtcggtaccgtgacgagctcgactcacgttgcaatggccaactgatcgtgaccattgacgccgtagacccctgcttgtgtgtttatcccctcgatgagtgggaacagatagaagccaagttgcgtgccttgccatcgttgcgtgaggaaaaccgccgcctccagcgtttgctgattggtaatgcggttgacctggagctcgatggcagtgggcgtttcctggtgccgccccgcctgcgtgagtacgccaagctcgacaagaaggcgatgctggtggggcaactgaacaaattccagctgtgggatgaagatgcctggaacgcggtttcggcagctgaccttgcagctattcaacaaccgggcgccatgcccgacgaattgcgtgacctgatcctgtga

SEQ ID NO: 41 - protein, 157 aa, Pseudomonas putida KT2440
MWGITAVFRGANAVSLDAKGRLAMPSRYRDELDSRCNGQLIVTIDAVDPCLCVYPLDEWEQIEAKLRALPSLREENRRLQRLLIGNAVDLELDGSGRFLVPPRLREYAKLDKKAMLVGQLNKFQLWDEDAWNAVSAADLAAIQQPGAMPDELRDLIL

SEQ ID NO: 42 - DNA, 432 bp, Bacillus subtilis
  CDS (1)..(432)
atgtttatgggtgaatatcagcataccatcgatgcgaaaggccgcatgatcgtacccgctaaattcagagaaggcctaggtgagcaatttgtgctgactagaggacttgaccaatgtctcttcggctaccctatgcacgaatggaaacaaattgaagaaaaactaaaagctcttcctctcacaaagaaagatgcccgcgcgtttacccgcttcttcttttcaggggcgactgaatgcgaactggataagcaaggcagggtaaatatcgcatcatctctattgaattacgccaaactggaaaaagaatgtgttgttatcggggtttctaatcgaattgaattgtggagtaaagtaatttgggaacaatacacagaagagcaagaagattcatttgctgaaattgctgaaaacatgattgggtttgatatataa

SEQ ID NO: 43 - protein, 143 aa, Bacillus subtilis
MFMGEYQHTIDAKGRMIVPAKFREGLGEQFVLTRGLDQCLFGYPMHEWKQIEEKLKALPLTKKDARAFTRFFFSGATECELDKQGRVNIASSLLNYAKLEKECVVIGVSNRIELWSKVIWEQYTEEQEDSFAEIAENMIGFDI

SEQ ID NO: 44 - DNA, 432 bp, Corynebacterium glutamicum
  CDS (1)..(432): transl_table=11
atgttccttggtacctataccccgaaactcgatgacaaaggcaggctgactcttccagcaaagttccgtgaggaccttgcggggggattgatggtcactaaaggtcaagaccacagtctcgcggtttatccgaaggaagaatttgcagcaagggctcgcaaggcagctgcagtttctaggacaaaccctgaggctcgtgcgtttatccgaaaccttgcagcaagcgcggatgaacaacgacccgacggccaggggcgcatcaccctttcggcagcgcaccgcacatatgcggggctgacaaaagagtgtgtcgttatcggttcggtggattttctggagatttgggacgctcaagcctgggccgcgtatcaggaagagacggaggctgccttctcagcagctgaagatgacgtccttggaggattgctctga

SEQ ID NO: 45 - protein, 143 aa, Corynebacterium glutamicum
MFLGTYTPKLDDKGRLTLPAKFREDLAGGLMVTKGQDHSLAVYPKEEFAARARKAAAVSRTNPEARAFIRNLAASADEQRPDGQGRITLSAAHRTYAGLTKECVVIGSVDFLEIWDAQAWAAYQEETEAAFSAAEDDVLGGLL

SEQ ID NO: 46 - DNA, 459 bp, Erwinia carotovora subsp
  CDS (1)..(459): transl_table=11
atgtttcgtggggctacgctggttaacctcgacagtaaagggcgccttgccgtgcctacccgataccgggaaatgctgtacggggaatcgcaaggtcaaatggtttgcaccattgacctgcatcagccatgcctgctgctttatcccttacctgaatgggaaattattgaacaaaagctgtctcgtttgtcgagcatgaaccccgctgaacgtcgcgttcagcgtttgttgttggggcatgctagcgagtgtcaaatggatagtgcgggacgtttgttgattgcgaatacgttaaggcagcatgcggaccttaaaaaagaagtgatgctagtcggacagttcaacaagtttgaactgtgggatgaacagacttggtatcaacaggtcaaggatgatattgacgctgaacaatcgactcaggaacccttatctgagcggttgcaggacctatcgctatag

SEQ ID NO: 47 - protein, 152 aa, Erwinia carotovora subsp
MFRGATLVNLDSKGRLAVPTRYREMLYGESQGQMVCTIDLHQPCLLLYPLPEWEIIEQKLSRLSSMNPAERRVQRLLLGHASECQMDSAGRLLIANTLRQHADLKKEVMLVGQFNKFELWDEQTWYQQVKDDIDAEQSTQEPLSERLQDLSL

SEQ ID NO: 48 - DNA, 21 bp, Artificial sequence
  primer
atgttccggggagcaacgtta

SEQ ID NO: 49 - DNA, 24 bp, Artificial sequence
  primer
ttatagagacaagtcctgcagtcg

SEQ ID NO: 50 - protein, 147 aa, Artificial sequence
  consensus sequence
  Variant (3)..(3): Xaa in position 3 is any amino acid
  Variant (5)..(9): Xaa in position 5 to 9 is any amino acid
  Variant (12)..(12): Xaa in position 12 is any amino acid
  Variant (17)..(18): Xaa in position 17 to 18 is any amino acid
  Variant (20)..(22): Xaa in position 20 to 22 is any amino acid
  Variant (25)..(25): Xaa in position 25 is any amino acid
  Variant (27)..(38): Xaa in position 27 to 38 is any amino acid
  Variant (39)..(43): Xaa in position 39 to 43 is any or no amino acid
  Variant (46)..(47): Xaa in position 46 to 47 is any amino acid
  Variant (50)..(51): Xaa in position 50 to 51 is any amino acid
  Variant (54)..(55): Xaa in position 54 to 55 is any amino acid
  Variant (58)..(58): Xaa in position 58 is any amino acid
  Variant (61)..(62): Xaa in position 61 to 62 is any amino acid
  Variant (64)..(70): Xaa in position 64 to 70 is any amino acid
  Variant (72)..(74): Xaa in position 72 to 74 is any amino acid
  Variant (76)..(76): Xaa in position 76 is any amino acid
  Variant (78)..(80): Xaa in position 78 to 80 is any amino acid
  Variant (82)..(82): Xaa in position 82 is any amino acid
  Variant (84)..(86): Xaa in position 84 to 86 is any amino acid
  Variant (88)..(89): Xaa in position 88 to 89 is any amino acid
  Variant (92)..(97): Xaa in position 92 to 97 is any amino acid
  Variant (100)..(101): Xaa in position 100 to 101 is any amino acid
  Variant (103)..(103): Xaa in position 103 is any amino acid
  Variant (105)..(105): Xaa in position 105 is any amino acid
  Variant (108)..(111): Xaa in position 108 to 111 is any amino acid
  Variant (113)..(114): Xaa in position 113 to 114 is any amino acid
  Variant (116)..(117): Xaa in position 116 to 117 is any amino acid
  Variant (122)..(124): Xaa in position 122 to 124 is any amino acid
  Variant (126)..(134): Xaa in position 126 to 134 is any amino acid
  Variant (136)..(145): Xaa in position 136 to 145 is any amino acid
  Variant (146)..(146): Xaa in position 146 is any or no amino acid
MFXGXXXXXLDXKGRLXXPXXXREXLXXXXXXXXXXXXXXXXXCLXXYPXXEWXXIEXKLXXLXXXXXXXRXXXRXLXXXAXEXXXDXXGRXXXXXXLRXXAXLXKEXXXXGXXNXXELWDXXXWXXXXXXXXXAXXXXXXXXXXXL

SEQ ID NO: 51 - protein, 58 aa, Artificial sequence
  protein pattern
  Variant (2)..(3): Xaa in position 2 to 3 is any or no amino acid
  Variant (5)..(5): Xaa in position 5 is any amino acid
  Variant (6)..(6): Xaa in position 6 is Phe, Leu or Val
  Variant (7)..(7): Xaa in position 7 is any amino acid
  Variant (9)..(9): Xaa in position 9 is any amino acid
  Variant (11)..(11): Xaa in position 11 is Ala, Ile or Leu
  Variant (12)..(12): Xaa in position 12 is Ala or Gly
  Variant (13)..(13): Xaa in position 13 is any amino acid
  Variant (15)..(15): Xaa in position 15 is Asp, Ser or Val
  Variant (16)..(16): Xaa in position 16 is Asp or Glu
  Variant (17)..(17): Xaa in position 17 is any amino acid
  Variant (18)..(18): Xaa in position 18 is Glu, Gln or Arg
  Variant (19)..(19): Xaa in position 19 is any amino acid
  Variant (21)..(21): Xaa in position 21 is Gly or Ser
  Variant (22)..(22): Xaa in position 22 is Ala, Gln or Ser
  Variant (25)..(25): Xaa in position 25 is Phe, Ile or Leu
  Variant (26)..(26): Xaa in position 26 is any amino acid
  Variant (27)..(27): Xaa in position 27 is Ile, Leu or Val
  Variant (28)..(28): Xaa in position 28 is Ala, Pro or Ser
  Variant (29)..(29): Xaa in position 29 is Ala, Asn or Pro
  Variant (30)..(31): Xaa in position 30 to 31 is any amino acid
  Variant (33)..(33): Xaa in position 33 is Glu, Gln or Thr
  Variant (34)..(34): Xaa in position 34 is His or Tyr
  Variant (36)..(36): Xaa in position 36 is any amino acid
  Variant (38)..(38): Xaa in position 38 is any amino acid
  Variant (40)..(40): Xaa in position 40 is Glu or Lys
  Variant (41)..(41): Xaa in position 41 is Ala, Cys or Val
  Variant (42)..(42): Xaa in position 42 is Met or Val
  Variant (43)..(43): Xaa in position 43 is Leu or Val
  Variant (44)..(44): Xaa in position 44 is Ile or Val
  Variant (46)..(46): Xaa in position 46 is Gln or Ser
  Variant (47)..(47): Xaa in position 47 is Phe, Leu or Val
  Variant (48)..(48): Xaa in position 48 is Asp or Asn
  Variant (49)..(49): Xaa in position 49 is any amino acid
  Variant (50)..(50): Xaa in position 50 is Phe or Leu
  Variant (51)..(51): Xaa in position 51 is Glu or Gln
  Variant (52)..(52): Xaa in position 52 is Ile or Leu
  Variant (55)..(55): Xaa in position 55 is Ala or Glu
  Variant (56)..(56): Xaa in position 56 is Asp, Gln or Thr
  Variant (57)..(57): Xaa in position 57 is Ala or Thr
EXXRXXXRXLXXXAXXXXXDXXGRXXXXXXXRXXAXLXKXXXXXGXXXXXXXWDXXXW

SEQ ID NO: 52 - protein, 22 aa, Artificial sequence
  protein pattern
  Variant (2)..(2): Xaa in position 2 is any amino acid
  Variant (4)..(4): Xaa in position 4 is Ala or Thr
  Variant (5)..(6): Xaa in position 5 to 6 is any amino acid
  Variant (7)..(7): Xaa in position 7 is Pro or Val
  Variant (8)..(8): Xaa in position 8 is any amino acid
  Variant (11)..(11): Xaa in position 11 is Ala, Asp or Ser
  Variant (16)..(16): Xaa in position 16 is Ala, Ser or Thr
  Variant (17)..(17): Xaa in position 17 is Leu, Met or Val
  Variant (19)..(19): Xaa in position 19 is any amino acid
  Variant (20)..(21): Xaa in position 20 to 21 is any or no amino acid
FXGXXXXXLDXKGRLXXPXXXR

SEQ ID NO: 53 - protein, 13 aa, Artificial sequence
  protein pattern
  Variant (3)..(3): Xaa in position 3 is any amino acid
  Variant (4)..(4): Xaa in position 4 is Gly, Leu or Val
  Variant (7)..(7): Xaa in position 7 is Leu or Met
  Variant (8)..(8): Xaa in position 8 is any amino acid
  Variant (11)..(11): Xaa in position 11 is Glu or Lys
  Variant (12)..(12): Xaa in position 12 is any amino acid
CLXXYPXXEWXXI

SEQ ID NO: 54 - DNA, 1701 bp, Escherichia coli K12
  CDS (1)..(1701): transl_table=11
atgcgattgctcaaccgtcttaaccagtatcaacgtctgtggcaaccttccgccggaaagccgcaaaccgtcaccgtcagcgaactggccgaacgctgtttttgcagcgaacgccatgttcgtacgctgttgcgtcaggcacaggaggcgggatggctggagtggcaggcgcagtcaggacgcggaaagcgcggacaattacgctttctggtcacgccggaatcgctacgcaatgcgatgatggaacaggcactggaaaccggaaagcagcaagatgtgctggagctggcgcaactggccccaggtgagctgcgcactctgttacagccgtttatgggcggacaatggcaaaacgatacacccacgttgcgtattccctactatcgcccgctcgaaccgctacaaccaggctttttgcccggccgtgccgagcagcatctcgccgggcagatattttccggcctgacccgcttcgataataatactcagcgcccgattggcgatttagcgcatcactgggaaacctctactgacgggttacgctgggacttttatcttcgttcaaccctacactggcataacggcgatgcagtaaaagcctcacacttacaccagcgattattgatgctgttacaactgccagcactggatcaattatttattagcgtgaagcgtattgaagtcacccatccgcagtgtctgaccttctttttacatcgccctgattactggcttgcgcaccggctggcgagctattgcagccatctggcgcatccgcaattcccactgatcggcacgggtccttttcgcttaacacaattcacagcagagctggtgcgcctggaaagccatgattattaccatttacgtcatccgctgcttaaagcggttgagtactggataactccgccgcttttcgaaaaagatttgggaaccagttgtcggcatcccgtgcaaatcaccatcggcaaaccggaggagctgcaacgggtcagccaggtcagtagcggcatcagtttaggtttttgctatttgacgttgcgcaaaagtccccgactctccctctggcaggcgcgaaaagtgatctccattattcatcaatccggtttattacaaacgttagaagtcggagaaaacctgatcaccgccagtcatgcattactgccaggctggactattccgcattggcaggtaccggatgaagtcaaactaccgaaaaccttgacgctggtttatcacctaccgatagaacttcataccatggcagaacgcctacaggcgacactggcagcggaaggctgtgaactcacaattatttttcataacgcaaaaaactgggacgacacgaccctacaggcacacgcagacctcatgatgggcgacagattaattggcgaagcaccggaatatactctggagcaatggctgcgctgcgatccgctgtggccacatgttttcgacgctccagcatacgcacatctacaatcgacactggatgccgtgcaaataatgcctgatgaagaaaaccgatttaatgccctgaaagcggtttttagccagttaatgacagatgcgacgctgacgccgctgttcaactatcactatcgcattagtgcccctcccggcgtgaacggtgtgcgactgacaccgcgcggctggtttgaatttaccgaagcctggcttcccgcgccatcgcaatga

SEQ ID NO: 55 - protein, 566 aa, Escherichia coli K12
MRLLNRLNQYQRLWQPSAGKPQTVTVSELAERCFCSERHVRTLLRQAQEAGWLEWQAQSGRGKRGQLRFLVTPESLRNAMMEQALETGKQQDVLELAQLAPGELRTLLQPFMGGQWQNDTPTLRIPYYRPLEPLQPGFLPGRAEQHLAGQIFSGLTRFDNNTQRPIGDLAHHWETSTDGLRWDFYLRSTLHWHNGDAVKASHLHQRLLMLLQLPALDQLFISVKRIEVTHPQCLTFFLHRPDYWLAHRLASYCSHLAHPQFPLIGTGPFRLTQFTAELVRLESHDYYHLRHPLLKAVEYWITPPLFEKDLGTSCRHPVQITIGKPEELQRVSQVSSGISLGFCYLTLRKSPRLSLWQARKVISIIHQSGLLQTLEVGENLITASHALLPGWTIPHWQVPDEVKLPKTLTLVYHLPIELHTMAERLQATLAAEGCELTIIFHNAKNWDDTTLQAHADLMMGDRLIGEAPEYTLEQWLRCDPLWPHVFDAPAYAHLQSTLDAVQIMPDEENRFNALKAVFSQLMTDATLTPLFNYHYRISAPPGVNGVRLTPRGWFEFTEAWLPAPSQ

SEQ ID NO: 56 - DNA, 1701 bp, Salmonella enterica subsp. enterica serovar Typhi str. CT18
  CDS (1)..(1701): transl_table=11
atgaggctactgaatcggcttaatcaatatcaacgcctctggcagccttccgccggggaaacgcaacatgtcaccgttagcgaactggccgaacgctgtttttgtagcgagcgccatctgcgaacgctgctgcgtcaggcccagcaggcgggttggctaagatgggaggcgcagtccgggcgcgggaaacgtggacggctccagtttctggtcacgccggaatcgctccgcaccgccatgatggaacaggcgctggaaaaagggcagcagctcaacgtactggaactggcgcagctggcgcctggcgagttacgggcgatgctccagccttttatgggcggccaatggcaaaacgatacgccaacattgcgtattccctactatcgtccgcttgatccgctgcagccgggtttcctgccaggacgcgcggaacagcatctcgcagggcaagttttttccgggttaacgcgcttcgatcgcgatagccaatatccttgcggggatttggcgcatcactggaaggtttccgccgacggtttacgctgggatttttatattcgctccacgctgcactggcataatggcgatgcggtggataccgcgcagttacacgaacgcctggaaaggctgcttaccctaccggcgctaagcaaattgtttattagcgtcgcacggatcgaagtaacgcatcctcagtgcctgacctttctccttcaccgacctgattactggctggcgcatcgtctggcgagctattgtagcggtctggcgcatcctgacctgccgcttatcggcaccggtccttttcgcctggcgttgttcacgccggaactggtgcgtctggaaagtcatgaccattatcacctcagccatccgctgctgaaagcgattgaattctggatcaccccgcaactgtttgcccaggatctgggcaccagttgccgccatccggtgcagattgccatcggcaaaccggaagagctggcgacgctgagtcaggtaagtagtggtatcagtcttggcttttgttatttaaccctcaaaaagggctcacggctcaacgtacagcaggcgcggcgtctgatacatattatccatcatacttcgctgctgaaaaccttaccggtagatgagaacttgattatgccaagtcaggggctgctacccggctggacaatcccgcaatggcaggacgttgatgaaacaccattgccgaaaaaacttaccctggcgtatcaccttcccgtagagctgcatacgatggcggaacagcttcgacattacctggcgacgctcggctgtgagttaacgttgatttttcataatgccaaaaactggaataactgccctgcgttggcgcaagcggatctgatgatgggcgacaggctgatcggcgaagcgccggaatatacgctggagcagtggctacgttgcgatcagatctggtcacatgtcctggacgcgcctgcgttttcccatctgcaggctacgcttgacgctctgcaaattcagcccaatgaaaaagatcgccgcgccgcgctacaacaagtttttgccaacctgatggatgacgccacacttacgccgctgtttaattatcactatcgcatcagcgccccaccgggcgttaacggcgttcgactcacccctcgcggctggtttgaatttagcgaagcctggcttccgccgccttcgccgtga

SEQ ID NO: 57 - protein, 566 aa, Salmonella enterica subsp. enterica serovar Typhi str. CT18
MRLLNRLNQYQRLWQPSAGETQHVTVSELAERCFCSERHLRTLLRQAQQAGWLRWEAQSGRGKRGRLQFLVTPESLRTAMMEQALEKGQQLNVLELAQLAPGELRAMLQPFMGGQWQNDTPTLRIPYYRPLDPLQPGFLPGRAEQHLAGQVFSGLTRFDRDSQYPCGDLAHHWKVSADGLRWDFYIRSTLHWHNGDAVDTAQLHERLERLLTLPALSKLFISVARIEVTHPQCLTFLLHRPDYWLAHRLASYCSGLAHPDLPLIGTGPFRLALFTPELVRLESHDHYHLSHPLLKAIEFWITPQLFAQDLGTSCRHPVQIAIGKPEELATLSQVSSGISLGFCYLTLKKGSRLNVQQARRLIHIIHHTSLLKTLPVDENLIMPSQGLLPGWTIPQWQDVDETPLPKKLTLAYHLPVELHTMAEQLRHYLATLGCELTLIFHNAKNWNNCPALAQADLMMGDRLIGEAPEYTLEQWLRCDQIWSHVLDAPAFSHLQATLDALQIQPNEKDRRAALQQVFANLMDDATLTPLFNYHYRISAPPGVNGVRLTPRGWFEFSEAWLPPPSP

SEQ ID NO: 58 - DNA, 1701 bp, Salmonella typhimurium LT2
  CDS (1)..(1701): transl_table=11
atgaggctactgaatcggcttaatcaatatcaacgcctctggcagccttccgccggggaaacgcaacatgtcaccgttagcgaactggccgaacgctgtttttgtagcgagcgccatctgcgaacgctgctgcgtcaggcccagcaggcaggttggctaagatgggaggcgcagtccgggcgcgggaaacgtggacggctccagtttctggtcacgccggaatcgctccgcaccgccatgatggaacaggcgctggaaaaagggcagcagctcaacgtactggaactggcgcagctggcgccgggcgagttacgggcgatgctccagccttttatgggcggccaatggcaaaacgatacgccgacattgcgtattccctactatcgtccgcttgatccgctgcagccgggtttcctgccaggccgcgcggaacagcatctcgcagggcaagttttttccgggttaacgcgcttcgaccgcgacagtcaatatccttgcggggatttggcgcatcactgggaggtttccgccgacggtttacgctgggatttttatattcgctccacgctgcactggcataatggcgatgcggtggataccgcgcagctacacgaacgcctggaaaggctgcttaccctacccgcgctaagcaaattgtttattagcgtcgcacggatcgaagtaacgcatcctcagtgcctgacctttctccttcaccgacctgattactggctggcgcatcgtctggcgagctattgtagcggtctggcgcatcctgacctgccgcttatcggcaccggtccttttcgcctggcgttgttcacgccggaactggtgcgtctggaaagtcatgaccattatcacctcagccatccgctgctgaaagcgattgaattctggatcaccccgcaactgtttgcccaggatctgggcaccagttgccgccatccggtgcagattgccatcggcaaaccggaagagctggcgacgctgagtcaggtaagtagtggtatcagtcttggcttttgttatttaaccctcaaaaagggctcacggctcaacgtacagcaggcgcggcgtctgatacatattatccatcatacttcgctgctgaaaaccttaccggtagatgagaacttgattatgccaagtcaggggctgctacccggctggacaatcccgcaatggcaggacgttgatgaaacgccattgccgaaaaaacttaccctggcgtatcaccttcccgtagagctgcatacgatggcggaacagcttcgacattacctggcgacgctcggctgtgagttaacgttgatttttcataatgccaaaaactgggataactgccctgcgttggcgcaagcggatctgatgatgggcgacaggctgatcggcgaagcgccggaatatacgctggagcagtggctacgttgcgatcagatctggtcacatgtcctggacgcgcctgcgttttcccatctgcaggctacgcttgacgctctgcaaattcagcccaatgaaaaagatcgccgcgccgcgctacaacaagtttttgctaacctgatggatgacgccacacttacgccactatttaattatcactatcgcatcagcgccccaccgggcgttaacggcgttcgactcacccctcgcggctggtttgaatttagcgaagcctggcttccgccgccttcgccgtga

SEQ ID NO: 59 - protein, 566 aa, Salmonella typhimurium LT2
MRLLNRLNQYQRLWQPSAGETQHVTVSELAERCFCSERHLRTLLRQAQQAGWLRWEAQSGRGKRGRLQFLVTPESLRTAMMEQALEKGQQLNVLELAQLAPGELRAMLQPFMGGQWQNDTPTLRIPYYRPLDPLQPGFLPGRAEQHLAGQVFSGLTRFDRDSQYPCGDLAHHWEVSADGLRWDFYIRSTLHWHNGDAVDTAQLHERLERLLTLPALSKLFISVARIEVTHPQCLTFLLHRPDYWLAHRLASYCSGLAHPDLPLIGTGPFRLALFTPELVRLESHDHYHLSHPLLKAIEFWITPQLFAQDLGTSCRHPVQIAIGKPEELATLSQVSSGISLGFCYLTLKKGSRLNVQQARRLIHIIHHTSLLKTLPVDENLIMPSQGLLPGWTIPQWQDVDETPLPKKLTLAYHLPVELHTMAEQLRHYLATLGCELTLIFHNAKNWDNCPALAQADLMMGDRLIGEAPEYTLEQWLRCDQIWSHVLDAPAFSHLQATLDALQIQPNEKDRRAALQQVFANLMDDATLTPLFNYHYRISAPPGVNGVRLTPRGWFEFSEAWLPPPSP

SEQ ID NO: 60 - DNA, 1704 bp, Yersinia pestis KIM
  CDS (1)..(1704): transl_table=11
atgcgcattattcaccggcttacccaatatgagcgtttatatcaaaaatttggtgaccacccggtggcgactaccgtggctgacgtggctagtttactcttttgtagcgaacggcatgcccgcaccctgattcagcaactacagatgaagagttggctaagctggcattcacaagtgggtagagggaaacgagcgcaactgcaatgcctgaaaaaacctgatgcattacgggctatttacctgcaacagttccttgagcaaggcgatcatcaagcggcattctcaatagcacaattggaacccgagcgcctacagaccttacttaccccccatatgggcggacaatggcaagccgatagccctattctgcgtatcccctactaccgcgagctggaaccgcttaatcccatgaatgcttcagggcgggcagaacagcacctgatttatactttgcatgctgggctgacacggtttaatacaggtgacccgttgcctaaacctgatttggctcatcactggcaaatcagcgcagatggcttaacctggcagttcttcttacgcagccaactacgttggcataatggcgaccacattcatggtaagcaattattgcaaacactggagattctgcgcgcaaaccgacgtagccaccccagttttgctaatattgttactatcactctcccccacgctttatgcctacaatttaccctttcccaaccagattattggctagcacaccggctggctgatttaccctgtaggctttttcatccagacgatccctttttaggtgcgggtccttttaaattagcgacctttgataaacatttagttcgactaaagcagcacgaattttaccatttgcaacatccctatctggacattatcgagtactggatcacccctagcctgacggtaaattcaacaaatggcagttgccagcatccggttcgcatcaccatcggccaagaggaagagttcccactggcccgccccgtacagcgcggcatgagcctcggattctgctatctggctattaatcgccatcgtagcaacctcactccacagcaaatagccaagctactgatgttagtccaaacctcgggtatattagaggcgctctccatcagccgtgacgtaataacgccctgccatgaaatccttccaggctggcctattccacagttttcgacggatgaaaatccctcccttcccgcctgtttggttctgacctatcaaccgccgatggagcttgagagtgtcgctgagcaactaaaaatagtattagccgctcatggctgtacattagagatccgcgcctgccatgataaacagtggcaagatgttgacaaaattaaagagagcgatttactgttggccgatcatttagtcggtgaatcgccagaggccacaatggagagctggctacggctggaccctctgtggcgcggaattttacagaacgaacagtggaaccagcagcaaaaaacgctgaccttcattcagcagatagaaagcgcgccagaacgttttcgccaattacaggcacattacgatgacctgatgttagcgggactgattttgccgctgtttaactatgaatatcaggtcaatgccccatcacgcatcaatggggttacattaacggcatatggttggttcgatttctgtcaagcctggctaccgccaataacgaattaa

SEQ ID NO: 61 - protein, 567 aa, Yersinia pestis KIM
MRIIHRLTQYERLYQKFGDHPVATTVADVASLLFCSERHARTLIQQLQMKSWLSWHSQVGRGKRAQLQCLKKPDALRAIYLQQFLEQGDHQAAFSIAQLEPERLQTLLTPHMGGQWQADSPILRIPYYRELEPLNPMNASGRAEQHLIYTLHAGLTRFNTGDPLPKPDLAHHWQISADGLTWQFFLRSQLRWHNGDHIHGKQLLQTLEILRANRRSHPSFANIVTITLPHALCLQFTLSQPDYWLAHRLADLPCRLFHPDDPFLGAGPFKLATFDKHLVRLKQHEFYHLQHPYLDIIEYWITPSLTVNSTNGSCQHPVRITIGQEEEFPLARPVQRGMSLGFCYLAINRHRSNLTPQQIAKLLMLVQTSGILEALSISRDVITPCHEILPGWPIPQFSTDENPSLPACLVLTYQPPMELESVAEQLKIVLAAHGCTLEIRACHDKQWQDVDKIKESDLLLADHLVGESPEATMESWLRLDPLWRGILQNEQWNQQQKTLTFIQQIESAPERFRQLQAHYDDLMLAGLILPLFNYEYQVNAPSRINGVTLTAYGWFDFCQAWLPPITN

SEQ ID NO: 62 - DNA, 1704 bp, Yersinia pseudotuberculosis IP 32953
  CDS (1)..(1704): transl_table=11
atgcgcattattcaccggcttacccaatatgagcgtttatatcaaaaatttggtgaccacccggtggcgactaccgtggctgacgtggctagtttactcttttgtagcgaacggcatgcccgcaccctgattcagcaactacagatgaagagttggctaagctggcattcacaagtgggtagagggaaacgagcgcaactgcaatgcctgaaaaaacctgatgcattacgggctatttacctgcaacagttccttgagcaaggcgatcatcaggcggcattctcaatagcacaattggaacccgagcgcctacagaccttacttaccccccatatgggcggacaatggcaagccgatagccctattctgcgtatcccctactaccgcgagctggaaccgcttaatcccatgaatgctacagggcgggcagaacagcacctgatttatactttgcatgctgggctgacacggtttaatacaggtgacccgttgcctaaacctgatttggctcatcactggcaaatcagcgcagatggcttaacctggcagttcttcttacgcagccaactacgttggcataatggcgaccacattcatggtaagcaattattgcaaacactggagattctgcgcgcaaaccgacgtagccaacccagttttgctaatattgttactatcactctcccccacgctttatgcctacaatttaccctttcccaaccagattattggctagcacaccggctggctgatttaccctgtaggttttttcatccagacgatccctttttaggtgcgggtccttttaaattagcgacctttgataaacatttagttcgactaaagcagcacgaattttaccatttgcaacatccctatctggacattatcgagtactggatcacccctagcctgacggtaaattcaacaaatggcagttgccagcatccggttcgcatcaccatcggccaagaggaagagttcccactggcccgccccgtacagcgcagcatgagcctcggattctgctacctggctattaatcgccatcgtagcaacctcactccacagcaaatagccaagctactgatgttagtccaaacctcgggtatattagaggcgctctccatcagccgtgacgtaataacgccctgccatgaaatccttccaggctggcctattccacagttttcgacggatgaaaatccctcccttcccgcctgtttggttctgacctatcaaccgccgatggagcttgagagtgtcgctgagcaactaaaaatagtattagccgctcatggctgtacattagagatccgcgcctgccatgacaaacagtggcaagatgttgacaaaattaaagagagcgatttacttttggccgatcatttagtcggtgaatcgccagaggccacaatggagagctggctacggctggaccctctgtggcgcggaattttacagaacgaacagtggaaccagcagcaaaaaacgctgaccttcattcagcagatagaaagcgcgccagaacgttttcgccaattacaggcacattacgatgacctgatgttagcgggactgattttgccgctgtttaactatgaatatcaggtcaatgccccatcacgcatcaatggggttacattaacggcatatggttggttcgatttctgtcaagcctggctaccgccaataacgaattaa

SEQ ID NO: 63 - protein, 567 aa, Yersinia pseudotuberculosis IP 32953
MRIIHRLTQYERLYQKFGDHPVATTVADVASLLFCSERHARTLIQQLQMKSWLSWHSQVGRGKRAQLQCLKKPDALRAIYLQQFLEQGDHQAAFSIAQLEPERLQTLLTPHMGGQWQADSPILRIPYYRELEPLNPMNATGRAEQHLIYTLHAGLTRFNTGDPLPKPDLAHHWQISADGLTWQFFLRSQLRWHNGDHIHGKQLLQTLEILRANRRSQPSFANIVTITLPHALCLQFTLSQPDYWLAHRLADLPCRFFHPDDPFLGAGPFKLATFDKHLVRLKQHEFYHLQHPYLDIIEYWITPSLTVNSTNGSCQHPVRITIGQEEEFPLARPVQRSMSLGFCYLAINRHRSNLTPQQIAKLLMLVQTSGILEALSISRDVITPCHEILPGWPIPQFSTDENPSLPACLVLTYQPPMELESVAEQLKIVLAAHGCTLEIRACHDKQWQDVDKIKESDLLLADHLVGESPEATMESWLRLDPLWRGILQNEQWNQQQKTLTFIQQIESAPERFRQLQAHYDDLMLAGLILPLFNYEYQVNAPSRINGVTLTAYGWFDFCQAWLPPITN

SEQ ID NO: 64 - DNA, 24 bp, Artificial sequence
  primer
atgcgattgctcaaccgtcttaac

SEQ ID NO: 65 - DNA, 23 bp, Artificial sequence
  primer
ttattgcgatggcgcgggaagcc

SEQ ID NO: 66 - protein, 564 aa, Artificial sequence
  consensus sequence
  Variant (3)..(5): Xaa in position 3 to 5 is any amino acid
  Variant (8)..(8): Xaa in position 8 is any amino acid
  Variant (11)..(11): Xaa in position 11 is any amino acid
  Variant (14)..(14): Xaa in position 14 is any amino acid
  Variant (16)..(24): Xaa in position 16 to 24 is any amino acid
  Variant (27)..(29): Xaa in position 27 to 29 is any amino acid
  Variant (31)..(33): Xaa in position 31 to 33 is any amino acid
  Variant (40)..(40): Xaa in position 40 is any amino acid
  Variant (44)..(45): Xaa in position 44 to 45 is any amino acid
  Variant (47)..(47): Xaa in position 47 is any amino acid
  Variant (49)..(51): Xaa in position 49 to 51 is any amino acid
  Variant (54)..(54): Xaa in position 54 is any amino acid
  Variant (56)..(57): Xaa in position 56 to 57 is any amino acid
  Variant (59)..(59): Xaa in position 59 is any amino acid
  Variant (65)..(66): Xaa in position 65 to 66 is any amino acid
  Variant (69)..(69): Xaa in position 69 is any amino acid
  Variant (71)..(72): Xaa in position 71 to 72 is any amino acid
  Variant (74)..(75): Xaa in position 74 to 75 is any amino acid
  Variant (78)..(82): Xaa in position 78 to 82 is any amino acid
  Variant (84)..(84): Xaa in position 84 is any amino acid
  Variant (87)..(87): Xaa in position 87 is any amino acid
  Variant (89)..(96): Xaa in position 89 to 96 is any amino acid
  Variant (100)..(100): Xaa in position 100 is any amino acid
  Variant (102)..(103): Xaa in position 102 to 103 is any amino acid
  Variant (105)..(107): Xaa in position 105 to 107 is any amino acid
  Variant (109)..(109): Xaa in position 109 is any amino acid
  Variant (111)..(111): Xaa in position 111 is any amino acid
  Variant (118)..(118): Xaa in position 118 is any amino acid
  Variant (120)..(120): Xaa in position 120 is any amino acid
  Variant (122)..(122): Xaa in position 122 is any amino acid
  Variant (130)..(130): Xaa in position 130 is any amino acid
  Variant (132)..(132): Xaa in position 132 is any amino acid
  Variant (135)..(135): Xaa in position 135 is any amino acid
  Variant (137)..(140): Xaa in position 137 to 140 is any amino acid
  Variant (148)..(153): Xaa in position 148 to 153 is any amino acid
  Variant (159)..(164): Xaa in position 159 to 164 is any amino acid
  Variant (166)..(167): Xaa in position 166 to 167 is any amino acid
  Variant (174)..(175): Xaa in position 174 to 175 is any amino acid
  Variant (181)..(181): Xaa in position 181 is any amino acid
  Variant (183)..(183): Xaa in position 183 is any amino acid
  Variant (185)..(186): Xaa in position 185 to 186 is any amino acid
  Variant (189)..(189): Xaa in position 189 is any amino acid
  Variant (191)..(191): Xaa in position 191 is any amino acid
  Variant (197)..(201): Xaa in position 197 to 201 is any amino acid
  Variant (204)..(206): Xaa in position 204 to 206 is any amino acid
  Variant (209)..(209): Xaa in position 209 is any amino acid
  Variant (211)..(219): Xaa in position 211 to 219 is any amino acid
  Variant (221)..(225): Xaa in position 221 to 225 is any amino acid
  Variant (227)..(229): Xaa in position 227 to 229 is any amino acid
  Variant (231)..(232): Xaa in position 231 to 232 is any amino acid
  Variant (235)..(235): Xaa in position 235 is any amino acid
  Variant (237)..(237): Xaa in position 237 is any amino acid
  Variant (239)..(240): Xaa in position 239 to 240 is any amino acid
  Variant (251)..(255): Xaa in position 251 to 255 is any amino acid
  Variant (257)..(257): Xaa in position 257 is any amino acid
  Variant (261)..(261): Xaa in position 261 is any amino acid
  Variant (263)..(264): Xaa in position 263 to 264 is any amino acid
  Variant (266)..(266): Xaa in position 266 is any amino acid
  Variant (270)..(270): Xaa in position 270 is any amino acid
  Variant (273)..(273): Xaa in position 273 is any amino acid
  Variant (275)..(277): Xaa in position 275 to 277 is any amino acid
  Variant (282)..(283): Xaa in position 282 to 283 is any amino acid
  Variant (285)..(286): Xaa in position 285 to 286 is any amino acid
  Variant (290)..(290): Xaa in position 290 is any amino acid
  Variant (293)..(293): Xaa in position 293 is any amino acid
  Variant (295)..(296): Xaa in position 295 to 296 is any amino acid
  Variant (299)..(299): Xaa in position 299 is any amino acid
  Variant (304)..(304): Xaa in position 304 is any amino acid
  Variant (306)..(312): Xaa in position 306 to 312 is any amino acid
  Variant (315)..(315): Xaa in position 315 is any amino acid
  Variant (319)..(319): Xaa in position 319 is any amino acid
  Variant (321)..(321): Xaa in position 321 is any amino acid
  Variant (324)..(325): Xaa in position 324 to 325 is any amino acid
  Variant (328)..(333): Xaa in position 328 to 333 is any amino acid
  Variant (335)..(336): Xaa in position 335 to 336 is any amino acid
  Variant (338)..(338): Xaa in position 338 is any amino acid
  Variant (346)..(350): Xaa in position 346 to 350 is any amino acid
  Variant (351)..(351): Xaa in position 351 is any or no amino acid
  Variant (353)..(353): Xaa in position 353 is any amino acid
  Variant (355)..(356): Xaa in position 355 to 356 is any amino acid
  Variant (359)..(361): Xaa in position 359 to 361 is any amino acid
  Variant (363)..(371): Xaa in position 363 to 371 is any amino acid
  Variant (373)..(374): Xaa in position 373 to 374 is any amino acid
  Variant (376)..(381): Xaa in position 376 to 381 is any amino acid
  Variant (383)..(383): Xaa in position 383 is any amino acid
  Variant (385)..(388): Xaa in position 385 to 388 is any amino acid
  Variant (393)..(393): Xaa in position 393 is any amino acid
  Variant (397)..(404): Xaa in position 397 to 404 is any amino acid
  Variant (407)..(408): Xaa in position 407 to 408 is any amino acid
  Variant (410)..(410): Xaa in position 410 is any amino acid
  Variant (412)..(412): Xaa in position 412 is any amino acid
  Variant (414)..(415): Xaa in position 414 to 415 is any amino acid
  Variant (417)..(417): Xaa in position 417 is any amino acid
  Variant (420)..(422): Xaa in position 420 to 422 is any amino acid
  Variant (427)..(429): Xaa in position 427 to 429 is any amino acid
  Variant (432)..(433): Xaa in position 432 to 433 is any amino acid
  Variant (436)..(436): Xaa in position 436 is any amino acid
  Variant (438)..(444): Xaa in position 438 to 444 is any amino acid
  Variant (446)..(446): Xaa in position 446 is any amino acid
  Variant (448)..(456): Xaa in position 448 to 456 is any amino acid
  Variant (459)..(461): Xaa in position 459 to 461 is any amino acid
  Variant (463)..(463): Xaa in position 463 is any amino acid
  Variant (465)..(465): Xaa in position 465 is any amino acid
  Variant (468)..(468): Xaa in position 468 is any amino acid
  Variant (471)..(471): Xaa in position 471 is any amino acid
  Variant (473)..(473): Xaa in position 473 is any amino acid
  Variant (475)..(475): Xaa in position 475 is any amino acid
  Variant (479)..(479): Xaa in position 479 is any amino acid
  Variant (481)..(482): Xaa in position 481 to 482 is any amino acid
  Variant (484)..(486): Xaa in position 484 to 486 is any amino acid
  Variant (488)..(495): Xaa in position 488 to 495 is any amino acid
  Variant (497)..(497): Xaa in position 497 is any amino acid
  Variant (500)..(502): Xaa in position 500 to 502 is any amino acid
  Variant (504)..(510): Xaa in position 504 to 510 is any amino acid
  Variant (512)..(514): Xaa in position 512 to 514 is any amino acid
  Variant (517)..(521): Xaa in position 517 to 521 is any amino acid
  Variant (524)..(529): Xaa in position 524 to 529 is any amino acid
  Variant (535)..(535): Xaa in position 535 is any amino acid
  Variant (537)..(539): Xaa in position 537 to 539 is any amino acid
  Variant (542)..(544): Xaa in position 542 to 544 is any amino acid
  Variant (548)..(548): Xaa in position 548 is any amino acid
  Variant (551)..(552): Xaa in position 551 to 552 is any amino acid
  Variant (556)..(556): Xaa in position 556 is any amino acid
  Variant (558)..(559): Xaa in position 558 to 559 is any amino acid
MRXXXRLXQYXRLXQXXXXXXXXXTVXXXAXXXFCSERHXRTLXXQXQXXXWLXWXXQXGRGKRXXLQXLXXPXXLRXXXXXQXLEXGXXXXXXXXAQLXPXXLXXXLXPXMGGQWQXDXPXLRIPYYRXLXPLXPXXXXGRAEQHLXXXXXXGLTRFXXXXXXPXXDLAHHWXXSADGLXWXFXXRSXLXWHNGDXXXXXQLXXXLEXLXXXXXXXXXFXXXXXIXXXHXXCLXFXLXXPDYWLAHRLAXXXXXLXHPDXPXXGXGPFXLAXFXXXLVRLXXHXXYHLXHPXLXXIEXWITPXLXXXXXXXSCXHPVXIXIGXXEEXXXXXXVXXGXSLGFCYLXXXXXXSXLXXQQXXXLXXXXXXXXXLXXLXXXXXXIXPXXXXLPGWXIPQXXXXXXXXLPXXLXLXYXXPXELXXXAEQLXXXLAXXGCXLXXXXXXXKXWXXXXXXXXXDLXXXDXLXGEXPEXTXEXWLRXDXXWXXXLXXXXXXXXQXTLXXXQXXXXXXXRXXXLQXXXXXLMXXXXXXPLFNYXYXXXAPXXXNGVXLTXXGWFXFXXAWLPP

SEQ ID NO: 67 - protein, 61 aa, Artificial sequence
  protein pattern
  Variant (2)..(3): Xaa in position 2 to 3 is any amino acid
  Variant (4)..(4): Xaa in position 4 is any or no amino acid
  Variant (6)..(6): Xaa in position 6 is any amino acid
  Variant (7)..(7): Xaa in position 7 is any or no amino acid
  Variant (9)..(9): Xaa in position 9 is Glu or Thr
  Variant (10)..(10): Xaa in position 10 is Leu or Val
  Variant (11)..(11): Xaa in position 11 is Pro or Thr
  Variant (13)..(13): Xaa in position 13 is Ala or Pro
  Variant (14)..(14): Xaa in position 14 is any amino acid
  Variant (17)..(17): Xaa in position 17 is Gln or Thr
  Variant (19)..(19): Xaa in position 19 is any amino acid
  Variant (21)..(21): Xaa in position 21 is any amino acid
  Variant (22)..(22): Xaa in position 22 is Gln or Arg
  Variant (33)..(33): Xaa in position 33 is Asp or Ser
  Variant (34)..(34): Xaa in position 34 is any amino acid
  Variant (35)..(35): Xaa in position 35 is Cys or Pro
  Variant (36)..(36): Xaa in position 36 is Cys or Ser
  Variant (37)..(37): Xaa in position 37 is any amino acid
  Variant (39)..(39): Xaa in position 39 is any amino acid
  Variant (42)..(42): Xaa in position 42 is Asp or Gln
  Variant (43)..(43): Xaa in position 43 is any amino acid
  Variant (45)..(45): Xaa in position 45 is Phe or Leu
  Variant (46)..(46): Xaa in position 46 is Ile or Leu
  Variant (48)..(48): Xaa in position 48 is Ala or Thr
  Variant (52)..(52): Xaa in position 52 is Lys or Arg
  Variant (54)..(54): Xaa in position 54 is Ala or Thr
  Variant (55)..(55): Xaa in position 55 is any amino acid
  Variant (57)..(57): Xaa in position 57 is Asp or Thr
  Variant (58)..(58): Xaa in position 58 is any amino acid
  Variant (59)..(59): Xaa in position 59 is Glu or His
FXXXVXXIXXXHXXCLXFXLXXPDYWLAHRLAXXXXXLXHPXXPXXGXGPFXLXXFXXXLV

SEQ ID NO: 68 - protein, 57 aa, Artificial sequence
  protein pattern
  Variant (2)..(10): Xaa in position 2 to 10 is any amino acid
  Variant (13)..(13): Xaa in position 13 is Glu or Thr
  Variant (15)..(15): Xaa in position 15 is Glu or Thr
  Variant (16)..(16): Xaa in position 16 is Ile or Leu
  Variant (17)..(20): Xaa in position 17 to 20 is any amino acid
  Variant (21)..(21): Xaa in position 21 is Ala or Asp
  Variant (23)..(23): Xaa in position 23 is Asn or Gln
  Variant (25)..(25): Xaa in position 25 is Asp or Gln
  Variant (26)..(26): Xaa in position 26 is Asp or Asn
  Variant (27)..(27): Xaa in position 27 is Cys, Thr or Val
  Variant (28)..(28): Xaa in position 28 is Asp, Pro or Thr
  Variant (29)..(32): Xaa in position 29 to 32 is any amino acid
  Variant (33)..(33): Xaa in position 33 is Ala or Ser
  Variant (36)..(37): Xaa in position 36 to 37 is Leu or Met
  Variant (38)..(38): Xaa in position 38 is Ala or Gly
  Variant (40)..(40): Xaa in position 40 is His or Arg
  Variant (42)..(42): Xaa in position 42 is Ile or Val
  Variant (45)..(45): Xaa in position 45 is Ala or Ser
  Variant (48)..(48): Xaa in position 48 is any amino acid
  Variant (50)..(50): Xaa in position 50 is Leu or Met
  Variant (52)..(52): Xaa in position 52 is Gln or Ser
  Variant (56)..(56): Xaa in position 56 is any amino acid
EXXXXXXXXXGCXLXXXXXXXKXWXXXXXXXXXDLXXXDXLXGEXPEXTXEXWLRXD

SEQ ID NO: 69 - protein, 21 aa, Artificial sequence
  protein pattern
  Variant (2)..(2): Xaa in position 2 is Arg or Ser
  Variant (3)..(3): Xaa in position 3 is any amino acid
  Variant (4)..(4): Xaa in position 4 is Ile or Val
  Variant (6)..(6): Xaa in position 6 is Asp or Gln
  Variant (7)..(7): Xaa in position 7 is Ala or Asn
  Variant (8)..(8): Xaa in position 8 is Glu or Pro
  Variant (9)..(9): Xaa in position 9 is Ala or Gln
  Variant (10)..(10): Xaa in position 10 is Phe or Trp
  Variant (11)..(11): Xaa in position 11 is Asn or Ser
  Variant (12)..(13): Xaa in position 12 to 13 is any amino acid
  Variant (15)..(15): Xaa in position 15 is any amino acid
  Variant (18)..(18): Xaa in position 18 is Asp or Thr
  Variant (19)..(19): Xaa in position 19 is any amino acid
  Variant (20)..(20): Xaa in position 20 is Ile or Leu
WXXXLXXXXXXXXQXTLXXXQ

SEQ ID NO: 70 - DNA, 795 bp, Escherichia coli K12
  CDS (1)..(795): transl_table=11
atggatctgttgtaccgggtaaaaacgctttgggccgcgctgcgcggtaatcattacacctggcctgccatcgatatcaccctccccggcaatcgccattttcatctgattggcagtattcatatgggtagccacgatatggctcccctgcccacccgtttgctcaaaaagctcaaaaacgccgatgcgctgatcgtcgaggcggatgtttccaccagcgatacgccttttgctaatttgcctgcctgcgaggcgctggaagagcgcattagcgaggagcaactccaaaacctgcagcacattagccaggagatgggcatttctccctcactcttttctacccaaccgctgtggcaaatcgcgatggttcttcaggcgacgcaggcacaaaaactggggctgcgggcagaatacggtatcgattaccagctattgcaggcggcgaagcaacaacataaacccgtgattgaactggaaggggctgaaaaccagattgccatgttgctccagctccctgacaaaggactggcgctgctggacgatacgctgacccactggcataccaacgcacggttgctgcaacaaatgatgagctggtggctgaatgcaccgccgcaaaataatgatataacgctgcccaatacgttcagtcagtcgctgtacgatgtgctgatgcatcagcgaaatctcgcctggcgggataaattacgcgccatgccgccggggcgatatgtggtcgcggtcggtgcactacacctgtatggagaagggaatttgccgcaaatgttgcgctaa

SEQ ID NO: 71 - protein, 264 aa, Escherichia coli K12
MDLLYRVKTLWAALRGNHYTWPAIDITLPGNRHFHLIGSIHMGSHDMAPLPTRLLKKLKNADALIVEADVSTSDTPFANLPACEALEERISEEQLQNLQHISQEMGISPSLFSTQPLWQIAMVLQATQAQKLGLRAEYGIDYQLLQAAKQQHKPVIELEGAENQIAMLLQLPDKGLALLDDTLTHWHTNARLLQQMMSWWLNAPPQNNDITLPNTFSQSLYDVLMHQRNLAWRDKLRAMPPGRYVVAVGALHLYGEGNLPQMLR

SEQ ID NO: 72 - DNA, 795 bp, Salmonella enterica subsp. enterica serovar Typhi str. CT18
  CDS (1)..(795): transl_table=11
atggagctattaaatcaacttaaacgtttatgccgcgcgctgcgtggtaccccaaatagttggcctgctatcgatctctccctgcccggcggtcgtcatctgcatctggttggcagtattcatatggggacgcgcgatatagctcctcttccagcaaagctggtgaaaaagctacgccaggccgacgcgctggtcgttgaagcggatatttccggtaacgaaacgccattcagcaatctccccaaatgcccgccgttggtcgaacgtctcagcgccgggctgctaaacacactggaaaaacgggtcagcgagttgggtatgccgctgatccattttgataatcaacctttatggcagatagctatggtgctacaggccacgcaggcgcaacggctgggattgcgcccggactatggcattgattatcagctattacaggctgcccgcgaaatgtcgctgccggtgcaagagctggaaggggcgaaacaccagctcgaactactgtgcgatctgcccgatggcgggatggcgctgctcgacgacacgctgacgcactggcacaccaacgcacggcttttgcaggtgatgatcggctggtggcttgaacagccgccgaccagcatcggcgcttcgctccccagaacgtttagccaaccgctgtatgatgtactgatggtgaaacgcaatgaagcctggcgcgacgcgctgctggcactgccaccgggacgctacgtggtagccgtaggggcgctacatctgtacggcgaaggcaacctaccgcaaatattgaaataa

SEQ ID NO: 73 - protein, 264 aa, Salmonella enterica subsp. enterica serovar Typhi str. CT18
MELLNQLKRLCRALRGTPNSWPAIDLSLPGGRHLHLVGSIHMGTRDIAPLPAKLVKKLRQADALVVEADISGNETPFSNLPKCPPLVERLSAGLLNTLEKRVSELGMPLIHFDNQPLWQIAMVLQATQAQRLGLRPDYGIDYQLLQAAREMSLPVQELEGAKHQLELLCDLPDGGMALLDDTLTHWHTNARLLQVMIGWWLEQPPTSIGASLPRTFSQPLYDVLMVKRNEAWRDALLALPPGRYVVAVGALHLYGEGNLPQILK

SEQ ID NO: 74 - DNA, 795 bp, Salmonella typhimurium LT2
  CDS (1)..(795): transl_table=11
atggagctattaaatcaacttaaacgtttatggcgcgcgctgcgtggtaccccaaatagttggcctgctatcgatctctccctgcccggcggtcgtcatctgcatctggttggcagtattcatatggggacgcgcgatatggctcctcttccagcaaagctggtgaaaaagctacaccaggccgacgcgctggtcgttgaagcggatatttctggtaacgaaacgccattcagcaatctccccaaatgcccgccgttggtcgaacgtctcagcgccgggcagctaagcgcactggaaaaacgggtcagtgagttgggtatgccgctgatccattttgataatcaacctttatggcagatagctatggtgctacaggccacgcaggcgcaacggctgggattgcgcccggactatggcattgattatcagctattacaggctgcccgcgaaatgtcgctgccggtgcaagagctggaaggggcgaaacaccagctcgaactactctgcgatctgcccgatggcgggatggcgctgctcgacgacacgctgacgcactggcacaccaacgcacggcttttgcaggtgatgatcggctggtggcttgagcagccgccgaccagcgtcggcgcttcgctccccagaacgtttagccagccgctgtatgatgtactgatggtgaaacgcaatgaagcctggcgcgacgcgctgctggcactgccgccgggacgctacgtggtagccgtaggggcgctacatctgtacggcgaaggcaacctaccgcaaatattgaaataa

SEQ ID NO: 75 - protein, 264 aa, Salmonella typhimurium LT2
MELLNQLKRLWRALRGTPNSWPAIDLSLPGGRHLHLVGSIHMGTRDMAPLPAKLVKKLHQADALVVEADISGNETPFSNLPKCPPLVERLSAGQLSALEKRVSELGMPLIHFDNQPLWQIAMVLQATQAQRLGLRPDYGIDYQLLQAAREMSLPVQELEGAKHQLELLCDLPDGGMALLDDTLTHWHTNARLLQVMIGWWLEQPPTSVGASLPRTFSQPLYDVLMVKRNEAWRDALLALPPGRYVVAVGALHLYGEGNLPQILK

SEQ ID NO: 76 - DNA, 810 bp, Yersinia pestis KIM
  CDS (1)..(810): transl_table=11
atggacaaactcttacgccgtatcgcaaaattcttgggcattattacacccaccacctatgcttacccggctttggatatcacgctacctggcgagcgccacctacatttagttggcagcattcatatgggaacggcagggatgtttcccctcccccacacgctactgaataaattgaatcaggctgacgctctcattgttgaagcggatatcaccgacgcaacctcttcttttggccatagcacggttactgaacctttagtcgacagattatctgaggaatattatccgcaactccagcgacgctgtgaagaactggggagtgacccactggcgatgacctatctcccggcatggcaagtcgcgttaatgttgcaggcacatcaggctcaacgtttggggttgcgtggggaatatggcattgattatcaactactgaaagccgcaggggcgcaggagaaagagattattgaactggaaggggctgaaatgcagcttgatttactcaaaaccttaccggataacggcatctctttactgcacgacacccttctccattggcataccaatgcccgcctgctacaaaccatgattggctggtggctagagcaccagcctgaaaagtatcaggcaactctcgccccgactttcagccacgatatgtatgatgtactgatgcttcagcgcaataaacgttggcagcaacagctcgaacaactcgcccccggacgttatgtcgttgctgtaggtgcattacatttgtacggtgaagggaatcttccagagctgttacgagccgacaatcaataa

SEQ ID NO: 77 - protein, 269 aa, Yersinia pestis KIM
MDKLLRRIAKFLGIITPTTYAYPALDITLPGERHLHLVGSIHMGTAGMFPLPHTLLNKLNQADALIVEADITDATSSFGHSTVTEPLVDRLSEEYYPQLQRRCEELGSDPLAMTYLPAWQVALMLQAHQAQRLGLRGEYGIDYQLLKAAGAQEKEIIELEGAEMQLDLLKTLPDNGISLLHDTLLHWHTNARLLQTMIGWWLEHQPEKYQATLAPTFSHDMYDVLMLQRNKRWQQQLEQLAPGRYVVAVGALHLYGEGNLPELLRADNQ

SEQ ID NO: 78 - DNA, 813 bp, Photorhabdus luminescens subsp. laumondii TTO1
  CDS (1)..(813): transl_table=11
atgggacgactgattaaacaccttaccaatatattaggaatcaatgccctccaccgttatccctatcctgctcacgatattacactggcaggtgatagacatttgcatctggtaggcagtattcatatgggtacgaaaaatatgttcccactttcagaaatattgatagaacagcttaatcaatccgatacattaatcgtggaagcagatattactcaggcagactccccatttcatgatgagtttcaatcatatcaccgtatcgaacaacgtttatcttctgagatgtatcagaactttcaggactgttgcaatgaaatccaacagcaagaagaattcctcaatctattgccctcatggcaaatcgctttaattttacaagctggacaagcacaaaaccttggattacatccccaatacggtatcgattatcagctactaaatgcagccaaagctctaggaaaaacgattattgaactagaaggtactgaatcacaaattaatttacttaatcaaattcccaataacggcctgccactattagaagatacattaacccattggcacgcaaatgcccgtgctttacaaaccatgatcagttggtggatggactatcaacctaaacagcaagaacatgctctaccaacaactttcagtaaagagatataccaactattgatgactgaacgtaataaacaatggaataaacatttacggggattacctgccggtcgatacctcgttgctgttggcgttttgcatctgtatggtgaagggaatttgcccaagatgctggcagaaaaacagcattaa

SEQ ID NO: 79 - protein, 270 aa, Photorhabdus luminescens subsp. laumondii TTO1
MGRLIKHLTNILGINALHRYPYPAHDITLAGDRHLHLVGSIHMGTKNMFPLSEILIEQLNQSDTLIVEADITQADSPFHDEFQSYHRIEQRLSSEMYQNFQDCCNEIQQQEEFLNLLPSWQIALILQAGQAQNLGLHPQYGIDYQLLNAAKALGKTIIELEGTESQINLLNQIPNNGLPLLEDTLTHWHANARALQTMISWWMDYQPKQQEHALPTTFSKEIYQLLMTERNKQWNKHLRGLPAGRYLVAVGVLHLYGEGNLPKMLAEKQH

SEQ ID NO: 80 - DNA, 819 bp, Erwinia carotovora subsp. atroseptica SCRI1043
  CDS (1)..(819): transl_table=11
atggggcaactgctgcgtagaatcgcgacttttcttggttttatttcaccactggcttatgcctacccggcgatagatgttcagcttggcaatgaacgacaactgcatctggttggcagtatccatatgggtagcctggatatggcaccgctgcccgatacgctgctgcaacagctccagcaggcgactgcactcattgtagaagccgacatctctgattctcactctcccttcggacacagtgataccgagccaccgctcgtgcagcgcctcagcccggagaactaccgccagttgcaaaaaatctgcgcatcgctctctttcgatgagagcactatcaatacgcttccaggctggcaggccgcgctgatgctgcaagcgagacaggcacagctgctgggcttacgccccgactacggcattgattatcagttgattaatgccgcgaaatcccacggaattcagattatcgaactggaaggacagcagacgcaggttgacctgttacaacagttgcctcagggcggtctgctcttgctggaagacaccattaagcactggcacaccaacgcgcgtttgctgcaaacgatggtgggctggtggctagacaacaagcccggcacctataaaccggatatccccgcaacgttcagcaatgaaatgactgacctgctgatgggtcagcgtaaccgtcgttggcagcagcagcttcaggcgctgccgcccggaaactacgttgtagccgtcggtgcgctgcatctgtatggcgatgagaatttacctacgctgctcaacgacggtcattcagcaaaacagtga

SEQ ID NO: 81 - protein, 272 aa, Erwinia carotovora subsp. atroseptica SCRI1043
MGQLLRRIATFLGFISPLAYAYPAIDVQLGNERQLHLVGSIHMGSLDMAPLPDTLLQQLQQATALIVEADISDSHSPFGHSDTEPPLVQRLSPENYRQLQKICASLSFDESTINTLPGWQAALMLQARQAQLLGLRPDYGIDYQLINAAKSHGIQIIELEGQQTQVDLLQQLPQGGLLLLEDTIKHWHTNARLLQTMVGWWLDNKPGTYKPDIPATFSNEMTDLLMGQRNRRWQQQLQALPPGNYVVAVGALHLYGDENLPTLLNDGHSAKQ

SEQ ID NO: 82 - DNA, 24 bp, Artificial sequence
  primer
atggatctgttgtaccgggtaaaa

SEQ ID NO: 83 - DNA, 24 bp, Artificial sequence
  primer
ttagcgcaacatttgcggcaaatt

SEQ ID NO: 84 - protein, 262 aa, Artificial sequence
  consensus sequence
  Variant (3)..(19): Xaa in position 3 to 19 is any amino acid
  Variant (22)..(22): Xaa in position 22 is any amino acid
  Variant (24)..(25): Xaa in position 24 to 25 is any amino acid
  Variant (27)..(27): Xaa in position 27 is any amino acid
  Variant (29)..(29): Xaa in position 29 is any amino acid
  Variant (42)..(44): Xaa in position 42 to 44 is any amino acid
  Variant (46)..(46): Xaa in position 46 is any amino acid
  Variant (50)..(51): Xaa in position 50 to 51 is any amino acid
  Variant (53)..(55): Xaa in position 53 to 55 is any amino acid
  Variant (57)..(57): Xaa in position 57 is any amino acid
  Variant (63)..(63): Xaa in position 63 is any amino acid
  Variant (69)..(73): Xaa in position 69 to 73 is any amino acid
  Variant (76)..(83): Xaa in position 76 to 83 is any amino acid
  Variant (84)..(84): Xaa in position 84 is any or no amino acid
  Variant (86)..(87): Xaa in position 86 to 87 is any amino acid
  Variant (91)..(96): Xaa in position 91 to 96 is any amino acid
  Variant (98)..(102): Xaa in position 98 to 102 is any amino acid
  Variant (104)..(114): Xaa in position 104 to 114 is any amino acid
  Variant (116)..(116): Xaa in position 116 is any amino acid
  Variant (119)..(119): Xaa in position 119 is any amino acid
  Variant (121)..(122): Xaa in position 121 to 122 is any amino acid
  Variant (126)..(126): Xaa in position 126 is any amino acid
  Variant (130)..(130): Xaa in position 130 is any amino acid
  Variant (135)..(136): Xaa in position 135 to 136 is any amino acid
  Variant (145)..(145): Xaa in position 145 is any amino acid
  Variant (148)..(155): Xaa in position 148 to 155 is any amino acid
  Variant (160)..(162): Xaa in position 160 to 162 is any amino acid
  Variant (164)..(165): Xaa in position 164 to 165 is any amino acid
  Variant (168)..(169): Xaa in position 168 to 169 is any amino acid
  Variant (172)..(173): Xaa in position 172 to 173 is any amino acid
  Variant (175)..(176): Xaa in position 175 to 176 is any amino acid
  Variant (179)..(179): Xaa in position 179 is any amino acid
  Variant (183)..(183): Xaa in position 183 is any amino acid
  Variant (194)..(194): Xaa in position 194 is any amino acid
  Variant (196)..(197): Xaa in position 196 to 197 is any amino acid
  Variant (201)..(203): Xaa in position 201 to 203 is any amino acid
  Variant (205)..(210): Xaa in position 205 to 210 is any amino acid
  Variant (213)..(213): Xaa in position 213 is any amino acid
  Variant (217)..(219): Xaa in position 217 to 219 is any amino acid
  Variant (222)..(222): Xaa in position 222 is any amino acid
  Variant (225)..(226): Xaa in position 225 to 226 is any amino acid
  Variant (229)..(230): Xaa in position 229 to 230 is any amino acid
  Variant (232)..(234): Xaa in position 232 to 234 is any amino acid
  Variant (236)..(237): Xaa in position 236 to 237 is any amino acid
  Variant (260)..(261): Xaa in position 260 to 261 is any amino acid
LLXXXXXXXXXXXXXXXXXPAXDXXLXGXRHLHLVGSIHMGXXXMXPLPXXLXXXLXQADALXVEADIXXXXXPFXXXXXXXXXLXXRLSXXXXXXLXXXXXEXXXXXXXXXXXPXWQXAXXLQAXQAQXLGLRXXYGIDYQLLXAAXXXXXXXXELEGXXXQXXLLXXLPXXGXXLLXDTLXHWHTNARLLQXMXXWWLXXXPXXXXXXLPXTFSXXXYDXLMXXRNXXWXXXLXXLPPGRYVVAVGALHLYGEGNLPXXL

SEQ ID NO: 85 - protein, 58 aa, Artificial sequence
  protein pattern
  Variant (3)..(4): Xaa in position 3 to 4 is any or no amino acid
  Variant (6)..(6): Xaa in position 6 is Asp or Thr
  Variant (8)..(8): Xaa in position 8 is any amino acid
  Variant (9)..(10): Xaa in position 9 to 10 is any or no amino acid
  Variant (12)..(12): Xaa in position 12 is Asp, Glu, Gly or Asn
  Variant (15)..(15): Xaa in position 15 is Phe or Leu
  Variant (18)..(18): Xaa in position 18 is Ile or Val
  Variant (25)..(25): Xaa in position 25 is Ser or Thr
  Variant (26)..(26): Xaa in position 26 is any amino acid
  Variant (27)..(27): Xaa in position 27 is Asp, Gly or Asn
  Variant (28)..(28): Xaa in position 28 is Ile or Met
  Variant (29)..(29): Xaa in position 29 is any amino acid
  Variant (32)..(32): Xaa in position 32 is Pro or Ser
  Variant (33)..(34): Xaa in position 33 to 34 is any amino acid
  Variant (36)..(36): Xaa in position 36 is Ile, Leu or Val
  Variant (37)..(38): Xaa in position 37 to 38 is any amino acid
  Variant (40)..(40): Xaa in position 40 is any amino acid
  Variant (41)..(41): Xaa in position 41 is Asn or Gln
  Variant (42)..(42): Xaa in position 42 is Ala or Ser
  Variant (44)..(44): Xaa in position 44 is Ala or Thr
  Variant (46)..(46): Xaa in position 46 is Ile or Val
  Variant (51)..(51): Xaa in position 51 is Ile or Val
  Variant (52)..(52): Xaa in position 52 is Ser or Thr
  Variant (53)..(53): Xaa in position 53 is Asp, Gly, Gln or Thr
  Variant (54)..(54): Xaa in position 54 is Ala, Asn or Ser
  Variant (55)..(55): Xaa in position 55 is Asp, Glu or Thr
  Variant (56)..(56): Xaa in position 56 is Ser or Thr
  Variant (57)..(57): Xaa in position 57 is Pro or Ser
PAXXIXLXXXGXRHXHLXGSIHMGXXXXXPLXXXLXXXLXXXDXLXVEADXXXXXXXF

SEQ ID NO: 86 - protein, 56 aa, Artificial sequence
  protein pattern
  Variant (2)..(7): Xaa in position 2 to 7 is any amino acid
  Variant (8)..(8): Xaa in position 8 is any or no amino acid
  Variant (10)..(10): Xaa in position 10 is any or no amino acid
  Variant (12)..(12): Xaa in position 12 is any or no amino acid
  Variant (16)..(16): Xaa in position 16 is any amino acid
  Variant (17)..(17): Xaa in position 17 is Asp, Glu, Pro or Ser
  Variant (18)..(18): Xaa in position 18 is Ile, Leu or Met
  Variant (20)..(20): Xaa in position 20 is Asp or Gln
  Variant (21)..(21): Xaa in position 21 is Leu or Val
  Variant (24)..(25): Xaa in position 24 to 25 is any amino acid
  Variant (28)..(29): Xaa in position 28 to 29 is any amino acid
  Variant (31)..(31): Xaa in position 31 is Asn, Gln or Arg
  Variant (32)..(33): Xaa in position 32 to 33 is any amino acid
  Variant (35)..(35): Xaa in position 35 is any amino acid
  Variant (36)..(36): Xaa in position 36 is Ala, Gly or Gln
  Variant (37)..(37): Xaa in position 37 is Leu or Met
  Variant (38)..(39): Xaa in position 38 to 39 is Ala or Pro
  Variant (43)..(43): Xaa in position 43 is Leu or Val
  Variant (48)..(48): Xaa in position 48 is Ala or Val
PXXXXXXXLXPXTFSXXXYXXLMXXRNXXWXXXLXXXXXGRYXVAVGXLHLYGEGN

SEQ ID NO: 87 - protein, 58 aa, Artificial sequence
  protein pattern
  Variant (7)..(7): Xaa in position 7 is any amino acid
  Variant (10)..(10): Xaa in position 10 is any amino acid
  Variant (11)..(11): Xaa in position 11 is Ala, Glu or Gln
  Variant (12)..(14): Xaa in position 12 to 14 is any amino acid
  Variant (15)..(15): Xaa in position 15 is Glu, Pro or Thr
  Variant (16)..(16): Xaa in position 16 is Ile or Val
  Variant (17)..(17): Xaa in position 17 is any amino acid
  Variant (22)..(22): Xaa in position 22 is Ala or Thr
  Variant (23)..(23): Xaa in position 23 is Glu or Lys
  Variant (24)..(24): Xaa in position 24 is any amino acid
  Variant (26)..(26): Xaa in position 26 is Ile or Leu
  Variant (27)..(27): Xaa in position 27 is Ala, Asp, Glu or Asn
  Variant (28)..(28): Xaa in position 28 is Leu or Met
  Variant (30)..(30): Xaa in position 30 is any amino acid
  Variant (31)..(31): Xaa in position 31 is Asp, Gln or Thr
  Variant (32)..(32): Xaa in position 32 is Ile or Leu
  Variant (34)..(34): Xaa in position 34 is Asp or Asn
  Variant (35)..(35): Xaa in position 35 is any amino acid
  Variant (37)..(37): Xaa in position 37 is Ile, Leu or Met
  Variant (38)..(38): Xaa in position 38 is Ala, Pro or Ser
  Variant (41)..(41): Xaa in position 41 is Asp, Glu or His
  Variant (45)..(45): Xaa in position 45 is any amino acid
  Variant (49)..(49): Xaa in position 49 is Ala or Thr
  Variant (53)..(53): Xaa in position 53 is Ala or Leu
  Variant (56)..(56): Xaa in position 56 is any amino acid
  Variant (58)..(58): Xaa in position 58 is Ile or Met
IDYQLLXAAXXXXXXXXELEGXXXQXXXLXXXPXXGXXLLXDTLXHWHXNARXLQXMX

SEQ ID NO: 88 - protein, 53 aa, Artificial sequence
  protein pattern
  Variant (2)..(2): Xaa in position 2 is any amino acid
  Variant (3)..(3): Xaa in position 3 is any or no amino acid
  Variant (5)..(8): Xaa in position 5 to 8 is any or no amino acid
  Variant (10)..(10): Xaa in position 10 is any amino acid
  Variant (11)..(11): Xaa in position 11 is Glu or Gly
  Variant (12)..(14): Xaa in position 12 to 14 is any amino acid
  Variant (15)..(15): Xaa in position 15 is Ala, Asn, Gln or Thr
  Variant (17)..(17): Xaa in position 17 is Glu or Gln
  Variant (18)..(18): Xaa in position 18 is His, Lys or Arg
  Variant (19)..(19): Xaa in position 19 is any amino acid
  Variant (20)..(20): Xaa in position 20 is Cys, Ser or Val
  Variant (21)..(21): Xaa in position 21 is Ala, Glu, Gln or Ser
  Variant (22)..(22): Xaa in position 22 is Glu or Ser
  Variant (23)..(23): Xaa in position 23 is Leu or Met
  Variant (24)..(24): Xaa in position 24 is Gly or Ser
  Variant (25)..(25): Xaa in position 25 is any amino acid
  Variant (26)..(26): Xaa in position 26 is Asp, Pro or Ser
  Variant (27)..(29): Xaa in position 27 to 29 is any amino acid
  Variant (30)..(30): Xaa in position 30 is Phe, Ile or Met
  Variant (31)..(31): Xaa in position 31 is Asp, Asn, Ser or Thr
  Variant (32)..(33): Xaa in position 32 to 33 is any amino acid
  Variant (35)..(35): Xaa in position 35 is Ala, Gly or Leu
  Variant (38)..(38): Xaa in position 38 is Ala, Ile or Val
  Variant (40)..(40): Xaa in position 40 is Leu or Met
  Variant (41)..(41): Xaa in position 41 is Met or Val
  Variant (45)..(45): Xaa in position 45 is any amino acid
  Variant (49)..(49): Xaa in position 49 is any amino acid
EXXLXXXXSXXXXXXLXXXXXXXXXXXXXXXXXPXWQXAXXLQAXQAQXLGLR

SEQ ID NO: 89 - DNA, 429 bp, Escherichia coli K12
  CDS (1)..(429): transl_table=11
atgtataagacaatcattatgccagttgatgtatttgaaatggaattgagcgacaaagctgttcgccacgctgaattcctcgcccaggatgacggagttattcatctacttcacgtactacccgggtcagccagcctgagcctgcaccgttttgccgctgatgtgcgtcgttttgaagagcatctgcaacatgaagcacaagaacgtctgcaaacgatggtcagccacttcaccatcgatccttcccgcattaaacaacatgtccgttttggtagcgtgcgggatgaagtcaatgagttggcagaagaactgggggctgatgttgtagttattggttctcgcaacccatcgatttcgacccatctgttaggttctaacgcctcgagcgtgatccgccacgccaatctgccggtgctggttgtgcgttaa

SEQ ID NO: 90 - protein, 142 aa, Escherichia coli K12
MYKTIIMPVDVFEMELSDKAVRHAEFLAQDDGVIHLLHVLPGSASLSLHRFAADVRRFEEHLQHEAQERLQTMVSHFTIDPSRIKQHVRFGSVRDEVNELAEELGADVVVIGSRNPSISTHLLGSNASSVIRHANLPVLVVR

SEQ ID NO: 91 - DNA, 438 bp, Vibrio cholerae O1 biovar eltor str. N16961
  CDS (1)..(438): transl_table=11
atgtataaacatattcttgttccggttgatttgaatgaacaaggctttgccgacaaagcggtgcaacttgctgtctggcatgctaagcattccaatgccgaaattcacttgctgaacgtgttgcctggtattcacatgtccatggtggcgacttattttcctaaagacgcggccgcgcagatgaaaaatgatgtgcgagcacaactcaaagcctttgcggagaagcacatcgctgaagaggtggtgtacaaactccacatcgccgaaggcaaaccttacgccactatccttgattatgccgagcgcttaggggctgacttaattgttatgccaagccacaaacgctcacgcatcgataaagtgatgctcggctccgtggccagtaaagtggtagaaaattcgcctattaatgtcatggtcgtcaaaccacaaggttaa

SEQ ID NO: 92 - protein, 145 aa, Vibrio cholerae O1 biovar eltor str. N16961
MYKHILVPVDLNEQGFADKAVQLAVWHAKHSNAEIHLLNVLPGIHMSMVATYFPKDAAAQMKNDVRAQLKAFAEKHIAEEVVYKLHIAEGKPYATILDYAERLGADLIVMPSHKRSRIDKVMLGSVASKVVENSPINVMVVKPQG

SEQ ID NO: 93 - DNA, 432 bp, Methanothermobacter thermautotrophicus str. Delta H
  CDS (1)..(432): transl_table=11
atgtacagtaaaatcctgctcccgaccgacggctcaaaacaggccaataaggctgctgaacatgcaatatggattgccagggaaagcggagctgaaataattgctttaacagttatggagacgtcttcactggtgggtctaccagccgacgaccttataataagattgcgggagatgctcgaggaggaggcctcaaggtccctggaggctgttaaaaagctcgttgaggagtcaggggcggatataaagttaacagtgaggaccgatgagggttcacctgcagaggccatactcaggacagtggagaaggagggcgtggacctcgtggtaatgggtacctcaggcaaacacggtcttgacagattccttctgggaagcgtggccgagaaggttgtaagatccgcaggctgcccggtcctcgtggttcactga

SEQ ID NO: 94 - protein, 143 aa, Methanothermobacter thermautotrophicus str. Delta H
MYSKILLPTDGSKQANKAAEHAIWIARESGAEIIALTVMETSSLVGLPADDLIIRLREMLEEEASRSLEAVKKLVEESGADIKLTVRTDEGSPAEAILRTVEKEGVDLVVMGTSGKHGLDRFLLGSVAEKVVRSAGCPVLVVH

SEQ ID NO: 95 - DNA, 432 bp, Halobacterium sp. NRC-1
  CDS (1)..(432): transl_table=11
atgtacgaccggatcctgctcccggtggacgacagtgactcgatggaccgcgttgttgagcacgccgccgacgtggccggccgccgggacgccaccgttgacgtgctgtacgtcctcgacgatcgggcgttcctcacgctcgacgacggcatgcaggacgaagccacggcgcagctccgcacgcagggcgagcgcgccgtcgaacacgccgccgaccgcctctcggaggcgggggttgacaccgaaacgtacgtccgcgacggcgaccccgcggatgaaatcctcgcggtactcgccgaggacggcgcggacctcgtcgtgatggggacgcggcgcggcgacttcgagcagtccatgctcggcagcgtctcccgggatgtcgtcgagtcgaccgaaacacccgtgttgaccgtcccggtcaccgaggactga

SEQ ID NO: 96 - protein, 143 aa, Halobacterium sp. NRC-1
MYDRILLPVDDSDSMDRVVEHAADVAGRRDATVDVLYVLDDRAFLTLDDGMQDEATAQLRTQGERAVEHAADRLSEAGVDTETYVRDGDPADEILAVLAEDGADLVVMGTRRGDFEQSMLGSVSRDVVESTETPVLTVPVTED

SEQ ID NO: 97 - DNA, 507 bp, Escherichia coli O157:H7 EDL933
  CDS (1)..(507): transl_table=11
gtgaactccgtcattacacaaaaagtgtcatctggcgttacactttatgcggatactaaaacaggaggttttatgaacagaacgattcttgtccctatcgatatttccgattcagaattaactcaacgcgtgattagccacgttgaggcagaggcaaagattgatgatgcagaggttcatttcctgacggtaataccttcactgccctactatgcctctctgggtttagcgtattccgcagaattaccggcaatggatgacctgaaagcggaagccaaatcgcaactggaagagatcattaaaaaatttaaactgccaaccgacagagtgcatgtccatgttgaggaaggctcgcccaaagaccgcattctggaattggcgaagaagatccccgctcatatgatcatcattgcttcccatcgaccggatatcaccacttatctgctcggttccaacgccgcagctgtagtgcgtcacgcagagtgctccgtgctggttgtgcgctga

SEQ ID NO: 98 - protein, 168 aa, Escherichia coli O157:H7 EDL933
MNSVITQKVSSGVTLYADTKTGGFMNRTILVPIDISDSELTQRVISHVEAEAKIDDAEVHFLTVIPSLPYYASLGLAYSAELPAMDDLKAEAKSQLEEIIKKFKLPTDRVHVHVEEGSPKDRILELAKKIPAHMIIIASHRPDITTYLLGSNAAAVVRHAECSVLVVR

SEQ ID NO: 99 - DNA, 423 bp, Sinorhizobium meliloti 1021
  CDS (1)..(423): transl_table=11
atgtacaagaagatcatcgtgccgatcgccatggatcagctggagcacggcgagtccgtccttggcatcgccgagaaactgatcgatgaggggggagagattattctgctcaacgtcgtcgaggatctcaacgcctatgcacaaggttacatgatcgtcgattttccgctggagatgatcgaggaatcgcgcaagcacgcggtcaagaccctggaagcgctgaagaccaagcatggcatcaacgggcgcgtcgaaatccgcaccggcggagctgccggcagcatcaacgccctcgccaaggaagagaatgccgacctggtgatcatcgcgtcccaccgcccggggctgatcgattatttcatcgggtcgaccgccagccgtgtcgtcagccattgcccctgcgcggttctcgtcgaccggtaa

SEQ ID NO: 100 - protein, 140 aa, Sinorhizobium meliloti 1021
MYKKIIVPIAMDQLEHGESVLGIAEKLIDEGGEIILLNVVEDLNAYAQGYMIVDFPLEMIEESRKHAVKTLEALKTKHGINGRVEIRTGGAAGSINALAKEENADLVIIASHRPGLIDYFIGSTASRVVSHCPCAVLVDR

SEQ ID NO: 101 - DNA, 438 bp, Vibrio vulnificus CMCP6
  CDS (1)..(438): transl_table=11
atgtacaaacagattcttgttcccgtcgatctgaacgataaaggtttttcagatagagccgttgagctcgcggtgtggcacgcgcgccaagccaatgctcaattacatttgctcaacgtattgcccggcattcacatgtcgatggtggcgagctacttccctaaagatgcggcacagaaaatgaagcaagatgtggtgcaacaacttaagaactttgcggatcaacacattgccgatgaaattgtctacaaagtccatgttgccgaaggcaaaccttacgctactatcttagagtacgcagaaaagctgggggcggatttgattatcatgccaagccacaaacgttcaaaaatcgataaagtggtgctcggttctgttgccagtaaagtggttgagaactcacccattaacgtattggtggtcaaaccgcaagcttag

SEQ ID NO: 102 - protein, 145 aa, Vibrio vulnificus CMCP6
MYKQILVPVDLNDKGFSDRAVELAVWHARQANAQLHLLNVLPGIHMSMVASYFPKDAAQKMKQDVVQQLKNFADQHIADEIVYKVHVAEGKPYATILEYAEKLGADLIIMPSHKRSKIDKVVLGSVASKVVENSPINVLVVKPQA

SEQ ID NO: 103 - DNA, 426 bp, Bradyrhizobium japonicum USDA 110
  CDS (1)..(426): transl_table=11
atgttcaagtccatcctcgtgcccatcgacctcgccgacaccgatctcgccaagccggcgatcgcgaccgcggcaacgctgtcgcagacctggagcggcacggtgcgcctgctcaacgtgctgccgatgacgccggtgatgctggccgaatacgtgccggccgatttcgacgaacagcagcgccagacctcggaggaagcgctcgccatcgtcgcgcgcgagtccggcatcgaggcctcccacatctccagcgtggtccgccagggcggcatctaccacgagattctggaggaagccgtgcacatgaaggccgatctgatcgtgatgacctcgcataggccggcgatgcgcacctatttcctcggctccaatgccgggcacgtggtgcgctatgcgaagtgctcggtgctggtggtcaggcactga

SEQ ID NO: 104 - protein, 141 aa, Bradyrhizobium japonicum USDA 110
MFKSILVPIDLADTDLAKPAIATAATLSQTWSGTVRLLNVLPMTPVMLAEYVPADFDEQQRQTSEEALAIVARESGIEASHISSVVRQGGIYHEILEEAVHMKADLIVMTSHRPAMRTYFLGSNAGHVVRYAKCSVLVVRH

SEQ ID NO: 105 - DNA, 438 bp, Vibrio parahaemolyticus RIMD 2210633
  CDS (1)..(438): transl_table=11
atgtataaacaaattcttgttccggttgatctaaatgaccaaggcttctcagaccgagcggttgaactggcggtgtggcaagcaaaacaagcaaacgcagaaatccacctgctcactgttttgccaggtattcacatgtcgatggtcgccacttacttcccaaaagacgcagcggcgaaaatgaagcaagatgtgaagcagcagctaaaagcatttgccagcgagcacattgatgatgaagtgatttacaaagtgcacgttgccgaaggcaaagcttacgcaacaattcttgattacgccgaacgtttgggcgcagaccttattatcatgccaagtcacaagcgttcgaaaatcaacaaagtgatgcttggttcggttgcaagtaaagttgtggaatattctccaatcaacgtgatggtagtgaagccgcaaggttaa

SEQ ID NO: 106 - protein, 145 aa, Vibrio parahaemolyticus RIMD 2210633
MYKQILVPVDLNDQGFSDRAVELAVWQAKQANAEIHLLTVLPGIHMSMVATYFPKDAAAKMKQDVKQQLKAFASEHIDDEVIYKVHVAEGKAYATILDYAERLGADLIIMPSHKRSKINKVMLGSVASKVVEYSPINVMVVKPQG

SEQ ID NO: 107 - DNA, 429 bp, Photorhabdus luminescens subsp. laumondii TTO1
  CDS (1)..(429): transl_table=11
atgtacaaaactattttagtaccggtagatatttcagaagatgaactaacgagtaaagcggttaagcatgcactgtctttagcaaaagaaacgggtgcgaagctccatattcttcatgtactgccaatttcatccgcgattgttaacgcatattcgttgggatatgatgaaattaaggataaagcgacaattaaagccgaagatgatttaaaaacgctgattgatgccatcgattttcctgctgacaggttatcttattctattgcatttgggtcgccaagagatgaaataacagcagcagcgacagaaattaatgctgatcttatcgttattggctctagaaggcccaatattacaacgcacttattaggatctaatgcatcaggtgttgtcaaatattcgacaacatctgttttggttatcaggtaa

SEQ ID NO: 108 - protein, 142 aa, Photorhabdus luminescens subsp. laumondii TTO1
MYKTILVPVDISEDELTSKAVKHALSLAKETGAKLHILHVLPISSAIVNAYSLGYDEIKDKATIKAEDDLKTLIDAIDFPADRLSYSIAFGSPRDEITAAATEINADLIVIGSRRPNITTHLLGSNASGVVKYSTTSVLVIR

SEQ ID NO: 109 - DNA, 438 bp, Photorhabdus luminescens subsp. laumondii TTO1
  CDS (1)..(438): transl_table=11
atgtacaaaacgattttagtaccggtggatatttcagaagatgagttgaccgataaagcgattgcacatgcagagtatttggcgaagttgtctgatgctaatatacatcttttccatgccgttcctgatatatcaagattttcaattagttatagttaccattatgatttgctcaactcttttgccaagaaatctattgcaagatcagaagaggaattggcaaaagtggctgaaaaaatagatttgccaaaagagcgagtctctttctccgtagcctgtggatcaccgagggataaagtattatcgacagcagatgagattaaagcagatttaattgttgttggttcccggcggcctaatatttccacccatttattaggctcaaatgcttcaggaattgtcggatatgcaaatatttcagttttggtagtcagatga

SEQ ID NO: 110 - protein, 145 aa, Photorhabdus luminescens subsp. laumondii TTO1
MYKTILVPVDISEDELTDKAIAHAEYLAKLSDANIHLFHAVPDISRFSISYSYHYDLLNSFAKKSIARSEEELAKVAEKIDLPKERVSFSVACGSPRDKVLSTADEIKADLIVVGSRRPNISTHLLGSNASGIVGYANISVLVVR

SEQ ID NO: 111 - DNA, 432 bp, Rhodopseudomonas palustris CGA009
  CDS (1)..(432): transl_table=11
atgttcaagtccatcctcgtgccgatcgacctggtcgataccgcgctggcgcagcccgcgattgccaccgcagccaagctggccgacagttacgacggcaaggtgcggctgctgcacgtgctggcgatcacccccgtcatgcttgccgaatacgtcccggcggatttcgacgatcagcagcggcagtcggccgaagccgcgctggccgagattgcccgcacctccggcatttcggcgcagcggctgtcgagcagcgtacgccagggcggcatctaccacgagattctcgaagaggtcgcggcggtcggcgccgatctgatcgtgatgagctcgcaccggccggcgatgcgcagctacttcctcggatccaacgccggccacgtcgtccgctacgcaccgtgctcggtactggtggtgcgggactgcacatag

SEQ ID NO: 112 - protein, 143 aa, Rhodopseudomonas palustris CGA009
MFKSILVPIDLVDTALAQPAIATAAKLADSYDGKVRLLHVLAITPVMLAEYVPADFDDQQRQSAEAALAEIARTSGISAQRLSSSVRQGGIYHEILEEVAAVGADLIVMSSHRPAMRSYFLGSNAGHVVRYAPCSVLVVRDCT

SEQ ID NO: 113 - DNA, 429 bp, Erwinia carotovora subsp. atroseptica SCRI1043
  CDS (1)..(429): transl_table=11
atgtacacgagcattctggtgccagtagatatagaagaagatgaactcaccaaacacgcgcttacgcatgcagtcaggttggccaaaatgtcgggtgctgcaatacacctctttcattcccttcctgatgcatcggcatttttatctgcttattcttttggtatcaaagagtttgagaatgaagcagtggtgaaagcgaatgacaagcttaaatcactgatgaaaacaatcgatcttcctgtatcgcgtttgtcatgcagcgtcagcttcggatcggcaagagatgaggtgctatcgctggcggaggagattaatgcagatttgatcgtcatcggttcacgccgaccggatgtgaaaacctatctgcttggctcaaatgctgctgctatcgttcgccatgcgaaaatgtcagtcctcgttgtccgttag

SEQ ID NO: 114 - protein, 142 aa, Erwinia carotovora subsp. atroseptica SCRI1043
MYTSILVPVDIEEDELTKHALTHAVRLAKMSGAAIHLFHSLPDASAFLSAYSFGIKEFENEAVVKANDKLKSLMKTIDLPVSRLSCSVSFGSARDEVLSLAEEINADLIVIGSRRPDVKTYLLGSNAAAIVRHAKMSVLVVR

SEQ ID NO: 115 - DNA, 426 bp, Rhodobacter sphaeroides 2.4.1
  CDS (1)..(426): transl_table=11
atggccagaaccatcctgctgcccatcgatctgggcaatcccacggcccccgccgcggcgctgaacgaggcgctgaaactgctcgatcccgaagggacgctgcatgtcgtggcggttctgccggactatggctatgcacaggtctcgggcttcttccggcagggctacgagcaggaggcgctcaaggctctgggcaaggcgctgtcggcctgggtggccgataacgtgcccgagggggtggcggtccatccccatgtgctgcacggcacgatctatgacgagatcctgcgcgcggcgggcaagctcgaggtcgatctgatcgtgatcggcgcgcaccggcccgagttcagcgactatctcctcggcccgaatgccgcgcgcgtggtgcgtcacgcccgccaatccgtctatgtcgtaaggacctga

SEQ ID NO: 116 - protein, 141 aa, Rhodobacter sphaeroides 2.4.1
MARTILLPIDLGNPTAPAAALNEALKLLDPEGTLHVVAVLPDYGYAQVSGFFRQGYEQEALKALGKALSAWVADNVPEGVAVHPHVLHGTIYDEILRAAGKLEVDLIVIGAHRPEFSDYLLGPNAARVVRHARQSVYVVRT

SEQ ID NO: 117 - DNA, 426 bp, Desulfitobacterium hafniense Y51
  CDS (1)..(426): transl_table=11
atgcttaaaaagatattactagcttttgatggttccgaaaactctcttaaggcagcggattacgcattgatcatggctcaacataataatgctgaagtagaaattattcatgtaagggaatccgtgacttcttattcaacccgggtaatatacgatgccattgaaatggaaaaagagctggtgtccgaggctgaagagattatggcacaggccatcgaaaagtttaaagacacgggaattacctttacaacaagtatccggacgggggacccggcggaaattatttgtgaagaagcagaaaaaattggtgccacagaaatagtcatcggaagtcggggaatgaataccctatcccgattctttcttggcagcatcagtcttaaagtgttgactcacgctcattgcacaacgatagtcgtgcggtaa

SEQ ID NO: 118 - protein, 141 aa, Desulfitobacterium hafniense Y51
MLKKILLAFDGSENSLKAADYALIMAQHNNAEVEIIHVRESVTSYSTRVIYDAIEMEKELVSEAEEIMAQAIEKFKDTGITFTTSIRTGDPAEIICEEAEKIGATEIVIGSRGMNTLSRFFLGSISLKVLTHAHCTTIVVR

SEQ ID NO: 119 - DNA, 426 bp, Mesorhizobium sp. BNC1
  CDS (1)..(426): transl_table=11
atgtacaaggacatactcctctccatcgatctcggccatgcggaagacgagctgcgtgcggtcaataccgctgtggaatacgcccgctcattcggcagccgtctgcacgtgatgaccgtcgtccccgattacgggatgtctattgttggcggcttctttcccaaggagcatgagcagaaggcgatcgagcacgcgaacgaggcgctgcacgaattcaccaaagaaaacgtgccctctgagatcaagcaccgtcacatcgtaggccacggctcgatttatcgcgagatcctgcgctatgcggggatcgtgaaggcggatctgatcgtattgtcggccaagaggccgggaccggaagactacctgatcggccccaatgcagcgcgggtcgttcgccacgccatgatttcagtactggttgtacggtag

SEQ ID NO: 120 - protein, 141 aa, Mesorhizobium sp. BNC1
MYKDILLSIDLGHAEDELRAVNTAVEYARSFGSRLHVMTVVPDYGMSIVGGFFPKEHEQKAIEHANEALHEFTKENVPSEIKHRHIVGHGSIYREILRYAGIVKADLIVLSAKRPGPEDYLIGPNAARVVRHAMISVLVVR

SEQ ID NO: 121 - DNA, 438 bp, Vibrio sp. Ex25
  CDS (1)..(438)
atgtacaaacaaattcttgttccggttgatctaaatgaccaaggcttttcagaccgagcggttgaactagcggtttggcaggcaaagcaagcgaatgcgcaaatccaccttctaacagtactacctggtattcacatgtcgatggttgctacatacttcccaaaagatgcagcagccaaaatgaagcaagacgtgaagcagcaattaaaagcttttgccaataagcatattgctgaagatgtggtgtaccaagtacatgttgctgagggcaaagcctacgcgacgattcttgattatgcagagcgcttgggcgctgatctcatcattatgccaagtcacaagcgttctaaaatcaataaagtaatgcttggctctgtcgcaagtaaggtcgtggaatattctccaatcaatgtgatggtcgtgaaaccgcaaggttaa

SEQ ID NO: 122 - protein, 145 aa, Vibrio sp. Ex25
MYKQILVPVDLNDQGFSDRAVELAVWQAKQANAQIHLLTVLPGIHMSMVATYFPKDAAAKMKQDVKQQLKAFANKHIAEDVVYQVHVAEGKAYATILDYAERLGADLIIMPSHKRSKINKVMLGSVASKVVEYSPINVMVVKPQG

SEQ ID NO: 123 - DNA, 408 bp, Sulfitobacter sp. EE-36
  CDS (1)..(408): transl_table=11
atgtacaagaatatcctgatccccgttgttttcgagacccccgagatcacccagaccgcctttgatgcggcgcaggcgctggcggcaccggacgccagattgaccctgctgcatgtgatagaggcagtgccggtctatgtcgccgaatacatccccaccgacgtcgtgacctccacccgcgaggcggtacaggcgcggctggatgcgctggcgctaagcttgccgggggccgcgacagcgattgcggacgggcgcgccgggccacgggcgacacgctgggccgaggaaaacgggaccgactgtatcgtgatcgcgtcgcatcagcccgcgttgtctgacatcctgctggggtcggtcgggcaatatgtggtgcgtcacgccaaatgcgcggtgcatgtggtcagatag

SEQ ID NO: 124 - protein, 135 aa, Sulfitobacter sp. EE-36
MYKNILIPVVFETPEITQTAFDAAQALAAPDARLTLLHVIEAVPVYVAEYIPTDVVTSTREAVQARLDALALSLPGAATAIADGRAGPRATRWAEENGTDCIVIASHQPALSDILLGSVGQYVVRHAKCAVHVVR

SEQ ID NO: 125 - DNA, 426 bp, Oceanicola batsensis HTCC2597
  CDS (1)..(426): transl_table=11
atgttcaacaagatccttctcgccgtcgacatcaacgacgacgcgggcgcgcagcgtgccgccgatcacggcctggaactcgcccgcatgtgcggcgccgagcttcacgtgctgaacgtggttccggacatgggcttcaacctcgtcggatcggccttcggcccggaacatgcgaaacaggtccggaccgagaccgaaaccgccctccgcacctgggccgagggcgcgatgccgggggccgggatcgccgggcttcacgtctcgcaggggacggtctacgaccagatcatccgcaaggccgacaagctgggcgccgatgccatcgtcgtcggcgcgcaccggcccgaattgcgcgactacctcgtcggtcccaatgccgcccgcgtggtgcgccacgcgaaacaggcggtgctggtggtccgctag

SEQ ID NO: 126 - protein, 141 aa, Oceanicola batsensis HTCC2597
MFNKILLAVDINDDAGAQRAADHGLELARMCGAELHVLNVVPDMGFNLVGSAFGPEHAKQVRTETETALRTWAEGAMPGAGIAGLHVSQGTVYDQIIRKADKLGADAIVVGAHRPELRDYLVGPNAARVVRHAKQAVLVVR

SEQ ID NO: 127 - DNA, 429 bp, Enterobacter sakazakii
  CDS (1)..(429): transl_table=11
atgtacaacaccattctgatgcctgtagatgtgtttgaaatggagctgagcgacaaggcaatacgccacgcggagtttctggcgcaggaggagggaattattcatctgctgcatgtgttgccaggatctgccaacctgagcctgcaccgcttcgccgccgatatccgccgttttgaagaacatttagaggccgaggcgaaccagcgcctgcaaaccctgaagcagcatttcaccctgccggaatcgcgcctgcgcagccatgtgcgttttggcagcgtgcgtgatgaagttaacgcgatggccaaagagttacacgccgacgtggtggtgattggttcgcgcgatccgtcgatcaccacgcacctgctgggctcgaacgcatcaagcgtggtacgccacgcgcatgtgccggtgtttgtggtgcgttaa

SEQ ID NO: 128 - protein, 142 aa, Enterobacter sakazakii
MYNTILMPVDVFEMELSDKAIRHAEFLAQEEGIIHLLHVLPGSANLSLHRFAADIRRFEEHLEAEANQRLQTLKQHFTLPESRLRSHVRFGSVRDEVNAMAKELHADVVVIGSRDPSITTHLLGSNASSVVRHAHVPVFVVR

SEQ ID NO: 129 - DNA, 429 bp, Edwardsiella ictaluri
  CDS (1)..(429): transl_table=11
atgtacaaaaatattttggtacctgtcgatattgaagaggatgtactgacacagaatgcgttggagcatatgatttatatggcaaagctaacggatgccgcagtgcattttctgtatgtgctgccggatgcccaagcgtttgtcaccgcctactcatttggtattaaagagtttgaaaacaaggcagttgctaatgcggaggagaagctgctgacgttgatcgagagtatcgacctgccgcgcgagtgcatgtcatatactattcgctttggtacgccgcgtgatgaggcgttgcagcaggcagaggagatgggtgccgatctgattgtggttggctcgcatcgtcccagtgtgaagacctatctacttggctctaatgcagcggcgattgtgcgccatgccaagaccaatgtgctggtgatccgctga

SEQ ID NO: 130 - protein, 142 aa, Edwardsiella ictaluri
MYKNILVPVDIEEDVLTQNALEHMIYMAKLTDAAVHFLYVLPDAQAFVTAYSFGIKEFENKAVANAEEKLLTLIESIDLPRECMSYTIRFGTPRDEALQQAEEMGADLIVVGSHRPSVKTYLLGSNAAAIVRHAKTNVLVIR

SEQ ID NO: 131 - DNA, 435 bp, Escherichia coli O157
  CDS (1)..(435)
atgaacagaacgattcttgtccctatcgatatttccgattcagaattaactcaacgcgtgattagccacgttgaggcagaggcaaagattgatgatgcagaggttcatttcctgacggtaataccttcgctgccctactatgcctctctgggtttagcctattccgcagaattaccggcaatggatgatctgaaagcggaagccaaatcgcaactggaagagatcattaaaaaatttaaactgccaaccgacagagtgcatgtccatgttgaagaaggctcgcccaaagaccgcattctggaattggcgaagaagatccccgctcatatgatcatcattgcttcccatcgaccggatatcaccacttatctgctcggttctaacgccgcagctgtagtgcgtcacgcagagtgctccgtgctggttgtgcgctga

SEQ ID NO: 132 - protein, 144 aa, Escherichia coli O157
MNRTILVPIDISDSELTQRVISHVEAEAKIDDAEVHFLTVIPSLPYYASLGLAYSAELPAMDDLKAEAKSQLEEIIKKFKLPTDRVHVHVEEGSPKDRILELAKKIPAHMIIIASHRPDITTYLLGSNAAAVVRHAECSVLVVR

SEQ ID NO: 133 - DNA, 435 bp, Escherichia coli
  CDS (1)..(435): transl_table=11
atgaacagaacgattcttgtccctatcgatatttccgattcagaattaactcaacgcgtgattagccacgttgaggaagaggcaaagattgatgatgcagaggttcatttcctgacggtaataccttcactgccctactatgcctctctgggtttagcgtattccgcagaattaccggcaatggatgacctgaaagcggaagccaaatcgcaactggaagagatcattaaaaaatttaaactgccaaccgacagagtgcatgtccatgttgaggaaggctcgcccaaagaccgcattctggaattggcgaagaagatccccgctcatatgatcatcattgcttcccatcgaccggatatcaccacttatctgctcggttccaacgccgcagctgtagtgcgtcacgcagagtgctccgtgctggttgtgcgctga

SEQ ID NO: 134 - protein, 144 aa, Escherichia coli
MNRTILVPIDISDSELTQRVISHVEEEAKIDDAEVHFLTVIPSLPYYASLGLAYSAELPAMDDLKAEAKSQLEEIIKKFKLPTDRVHVHVEEGSPKDRILELAKKIPAHMIIIASHRPDITTYLLGSNAAAVVRHAECSVLVVR

SEQ ID NO: 135 - DNA, 435 bp, Salmonella typhi
  CDS (1)..(435): transl_table=11
atgaacagaacgattcttgtacccatcgatatttcagattcagaattaactcaacgcgtgatttcacatgttgaagccgaagcaaagattgacgacgctaaagtgcactttttgactgtaatcccgtctttgccctattacgcttcactgggactggcttattcagcagagctccccgcaatggacgatttgaaagccgaagccaaatctcaactggaagcgattatcaagaaattcaaccttcccgcggaccgcgtgcaggcgcacgtggcagaaggctctcctaaagataagattctggaaatggcaaaaaaattaccggccgatatggtgattatcgcctcgcatcgtccggatattactacctatctgttgggttccaacgccgcagccgttgtgcgtcatgcggaatgctccgtactggtggtgcgctaa

SEQ ID NO: 136 - protein, 144 aa, Salmonella typhi
MNRTILVPIDISDSELTQRVISHVEAEAKIDDAKVHFLTVIPSLPYYASLGLAYSAELPAMDDLKAEAKSQLEAIIKKFNLPADRVQAHVAEGSPKDKILEMAKKLPADMVIIASHRPDITTYLLGSNAAAVVRHAECSVLVVR

SEQ ID NO: 137 - DNA, 429 bp, Salmonella typhi
  CDS (1)..(429): transl_table=11
atgtataagacaatcattatgccggttgatgtttttgaaatggaacttagcgataaagccattcgccacgctgagtttctggcgcaacaggatggcgtcattcatctgttgcatgtactgcctgggtccgcgagcatgagtctgcaccgctttgccgccgacgtgcgtcgctttgaagaacatttacagcatgaggcggaaacgcgtctgcaaacgatggtgggacacttcagtatcgatccttcacgaattaaaacgcatgttcgctttggtagcgtgcgcgatgtcgtcaatgagatgggcgaagaactggatgcggatgtcgtggtaatcggttcgcgtaatccgtctatcacgacacacctgttggggtctaacgcctcaagcgtggtgcgccatgcgacgctgccagtattggttgtgcgttaa

SEQ ID NO: 138 - protein, 142 aa, Salmonella typhi
MYKTIIMPVDVFEMELSDKAIRHAEFLAQQDGVIHLLHVLPGSASMSLHRFAADVRRFEEHLQHEAETRLQTMVGHFSIDPSRIKTHVRFGSVRDVVNEMGEELDADVVVIGSRNPSITTHLLGSNASSVVRHATLPVLVVR

SEQ ID NO: 139 - DNA, 26 bp, Artificial sequence
  primer
atgtataagacaatcattatgccagt

SEQ ID NO: 140 - DNA, 22 bp, Artificial sequence
  primer
ttaacgcacaaccagcaccggc

SEQ ID NO: 141 - protein, 147 aa, Artificial sequence
  consensus sequence
  Variant (2)..(4): Xaa in position 2 to 4 is any amino acid
  Variant (7)..(7): Xaa in position 7 is any amino acid
  Variant (9)..(9): Xaa in position 9 is any amino acid
  Variant (11)..(25): Xaa in position 11 to 25 is any amino acid
  Variant (26)..(27): Xaa in position 26 to 27 is any or no amino acid
  Variant (29)..(36): Xaa in position 29 to 36 is any amino acid
  Variant (37)..(37): Xaa in position 37 is any or no amino acid
  Variant (39)..(39): Xaa in position 39 is any amino acid
  Variant (41)..(67): Xaa in position 41 to 67 is any amino acid
  Variant (68)..(72): Xaa in position 68 to 72 is any or no amino acid
  Variant (74)..(92): Xaa in position 74 to 92 is any amino acid
  Variant (93)..(95): Xaa in position 93 to 95 is any or no amino acid
  Variant (97)..(107): Xaa in position 97 to 107 is any amino acid
  Variant (108)..(110): Xaa in position 108 to 110 is any or no amino acid
  Variant (113)..(117): Xaa in position 113 to 117 is any amino acid
  Variant (119)..(127): Xaa in position 119 to 127 is any amino acid
  Variant (128)..(128): Xaa in position 128 is any or no amino acid
  Variant (132)..(132): Xaa in position 132 is any amino acid
  Variant (134)..(135): Xaa in position 134 to 135 is any amino acid
  Variant (138)..(143): Xaa in position 138 to 143 is any amino acid
  Variant (145)..(145): Xaa in position 145 is any amino acid
MXXXILXPXDXXXXXXXXXXXXXXXXXAXXXXXXXXXLXVXXXXXXXXXXXXXXXXXXXXXXXXXXXXXXXXLXXXXXXXXXXXXXXXXXXXXXXGXXXXXXXXXXXXXXADXXXXXSXXXXXXXXXXLGSXAXXVVXXXXXXVXVV

SEQ ID NO: 142 - protein, 29 aa, Artificial sequence
  protein pattern
  Variant (2)..(4): Xaa in position 2 to 4 is any amino acid
  Variant (5)..(8): Xaa in position 5 to 8 is any or no amino acid
  Variant (10)..(10): Xaa in position 10 is any or no amino acid
  Variant (12)..(12): Xaa in position 12 is Pro or Ser
  Variant (13)..(13): Xaa in position 13 is Asn or Val
  Variant (15)..(15): Xaa in position 15 is Ala, Gly or Ser
  Variant (16)..(16): Xaa in position 16 is any amino acid
  Variant (17)..(18): Xaa in position 17 to 18 is Ile or Val
  Variant (19)..(20): Xaa in position 19 to 20 is any amino acid
  Variant (21)..(21): Xaa in position 21 is Ala or Ser
  Variant (22)..(23): Xaa in position 22 to 23 is any amino acid
  Variant (24)..(24): Xaa in position 24 is Ala, Asn, Pro or Ser
  Variant (26)..(26): Xaa in position 26 is any amino acid
  Variant (28)..(28): Xaa in position 28 is Ile or Val
  Variant (29)..(29): Xaa in position 29 is Lys or Arg
RXXXXXXXLXGXXAXXXXXXXXXXVXVXX

SEQ ID NO: 143 - DNA, 954 bp, Escherichia coli K12
  CDS (1)..(954): transl_table=11
gtggatagtaataatcaaattgaaccctgtttaagcagaaagtcgtcagaaggtaaaccacaaatatttacaaccttacgaaatattgatcttaaccttctgactatttttgaagctgtatatgtacataaagggatcgttaatgcagcgaaagtgcttaatctgaccccctcggcaatcagtcagtctattcagaaactgcgcgttatattccctgacccattgtttattcgcaaaggccagggtgtcactcctaccgcatttgcgatgcatctacatgagtatatcagtcagggccttgagtccattcttggcgcgctggatatcgaaggaagctatgataagcaacgaacgataactattgcgaccactccctcggtcggagcactggtccttcctgtcatctatcgggcgattaaaactcactatccgcagcttttactgcgcaacccgcccatcagcgacgcggaaaaccaactcagtcagtttcaaaccgatctcatcatcgataacatgttttgcaccaatcgtacggtgcaacatcatgttctgttcaccgacaatatggtgttaatttgccgcgagggaaatccactactctctttagaagatgacagagagactatcgacaacgctgcgcatgtacttctgttaccggaagagcaaaatttcagcggtctgcggcagagagttcaagaaatgtttccggaccggcaaatcaatttcaccagctacaacattttgacaatcgctgcactggttgccaacagtgacatgttagcgattattcccagccgtttttataacctgtttagccgctgctggccgctggaaaaactgccttttccgtccttaaatgaggagcaaatagatttctctatccactacaacaaattcagcctgcgtgatcccatcctgcacggagtaatagatgttatccgtaatgcattttga

SEQ ID NO: 144 - protein, 317 aa, Escherichia coli K12
MDSNNQIEPCLSRKSSEGKPQIFTTLRNIDLNLLTIFEAVYVHKGIVNAAKVLNLTPSAISQSIQKLRVIFPDPLFIRKGQGVTPTAFAMHLHEYISQGLESILGALDIEGSYDKQRTITIATTPSVGALVLPVIYRAIKTHYPQLLLRNPPISDAENQLSQFQTDLIIDNMFCTNRTVQHHVLFTDNMVLICREGNPLLSLEDDRETIDNAAHVLLLPEEQNFSGLRQRVQEMFPDRQINFTSYNILTIAALVANSDMLAIIPSRFYNLFSRCWPLEKLPFPSLNEEQIDFSIHYNKFSLRDPILHGVIDVIRNAF

SEQ ID NO: 145 - DNA, 801 bp, Escherichia coli O157:H7 EDL933
  CDS (1)..(801): transl_table=11
gtgcttaatctgaccccctcggcaatcagtcagtctattcagaaactgcgcgttatattccctgacccattgtttattcgcaaaggccagggtgtcactcctaccgcatttgcgatgcatctacatgagtatatcagtcagggccttgagtccattcttggcgcgctggatatcgaaggaagctatgataagcaacgaacgataactattgcgaccaccccctcggtcggagctctggtccttcctgtcatttatcgggcgattaaaactcactatccgcagcttttactgcgcaacccgcccatcagcgacgcggaaaaccaactcagtcagtttcaaaccgatctcatcatagataacatgttttgcaccaatcgtacggtgcaacatcatgttctgttcaccgacaatatggtgttaatttgccgcgagggaaatccactactctctttagaagatgacagagagactatcgacaacgctgcacatgtactcctgttaccggaaggacaaaatttcagcggtctgcggcagagaattcaagagatgtttccggaccggcagatcagcttcaccagctacaacattttgacaatcgctgcactggttgccaacagtgacatgttagcgattattcccagccgtttttataacctgtttagccgttgctggccgctggaaaaactgccttttccgtccttaaatgaggagcaaatagatttctctatccactacaacaaattcagcctgcgtgatcccatcctgcacggagtaatagatgttatccgtaatgcattttga

SEQ ID NO: 146 - protein, 266 aa, Escherichia coli O157:H7 EDL933
MLNLTPSAISQSIQKLRVIFPDPLFIRKGQGVTPTAFAMHLHEYISQGLESILGALDIEGSYDKQRTITIATTPSVGALVLPVIYRAIKTHYPQLLLRNPPISDAENQLSQFQTDLIIDNMFCTNRTVQHHVLFTDNMVLICREGNPLLSLEDDRETIDNAAHVLLLPEGQNFSGLRQRIQEMFPDRQISFTSYNILTIAALVANSDMLAIIPSRFYNLFSRCWPLEKLPFPSLNEEQIDFSIHYNKFSLRDPILHGVIDVIRNAF

SEQ ID NO: 147 - DNA, 954 bp, Salmonella typhimurium LT2
  CDS (1)..(954): transl_table=11
gtgagtgataataatcaggcagaaagacaaccggccgatcaacacctacaggacaaaccgcaaattttcagaacactgagaaatattgacctcaatctgttgacgattttcgaggccgtatatgtccataaagggatcgtcaatgcagcgaaaattcttaacctgacgccgtcagccattagccagtccattcaaaaattacggactatatttcccgatccgctgtttattcgcaaaggccagggcgtaacgcccacgacgtatgctacgcatctgcacgaatacatcagccaggggctggaatctattcttggcgccctggatcttacgggcagctatgataagcaacgcaccattacaattggcacgacgccttcggtcggcgcgctagtgatgccgattatttaccaggccatcaggccgcgttatcctcagcttttgctgcgcaacattccggtagacgatgccgaaagccagcttagtcagtttcagaccgatctcattatcaatacccatagctataacaaccggagcatccagcatcacgtcctgtttagcgatacgcttgagattgtctgccgccagcatcacccgtgtctggcgaacgccattactgaagagagactgaacagcgcggatcacacctttctgatgctggagggacaacatctttccctgctgcgccagcgactgcaggagacatttcccgatcagcaaatcagttttagcagctacaatatttttaccattgcctcgctgatcgccagcagcgatctgctgggactgatgcccacccgcttctacgacttatttagccgctgctggccgcttgagcgccttccctacgcgccggtgaatagtgaacaggtcgagttctcgctgcattacaataaactgagtctgcgcgatccggtgctggagaacgtcattgatatcatccgtgaggcgttctga

SEQ ID NO: 148 - protein, 317 aa, Salmonella typhimurium LT2
MSDNNQAERQPADQHLQDKPQIFRTLRNIDLNLLTIFEAVYVHKGIVNAAKILNLTPSAISQSIQKLRTIFPDPLFIRKGQGVTPTTYATHLHEYISQGLESILGALDLTGSYDKQRTITIGTTPSVGALVMPIIYQAIRPRYPQLLLRNIPVDDAESQLSQFQTDLIINTHSYNNRSIQHHVLFSDTLEIVCRQHHPCLANAITEERLNSADHTFLMLEGQHLSLLRQRLQETFPDQQISFSSYNIFTIASLIASSDLLGLMPTRFYDLFSRCWPLERLPYAPVNSEQVEFSLHYNKLSLRDPVLENVIDIIREAF

SEQ ID NO: 149 - DNA, 801 bp, Shigella flexneri 2a str. 301
  CDS (1)..(801): transl_table=11
gtgcttaatctgaccccctcggcaatcagtcagtctattcagaaactgcgcgttatattccctgacccattgtttattcgcaaaggccagggtgtcactcctaccgcatttgcgatgcatctacatgagtatatcagtcagggccttgagtccattcttggcgcgctggatatcgaaggaagctatgataagcaacgaacgataactattgcgaccactccctcggtcggagccctggtccttcctgtcatctatcgggcgattaaaactcactatccgcagcttttactgcgcaacccgcccatcagcgacgcggaaaaccaactcagtcagtttcaaaccgatctcatcatcgataacatgttttgcaccaatcgtacggtgcaacatcatgttctgttcaccgacaatatggtgttaatttgccgcaagggaaatccactactctctttagaagatgacagagagactatcgacaacgctgcgcatgtacttctgttaccggaagggcaaaatttcagcggtctgcggcagagagttcaagagatgtttccggaccggcaaatcaatttcaccagctacaacattttgacaatcgctgcactggttgccaacagtgacatgttagcgattattcccagccgtttttataacctgtttagtcgttgctggccgctggaaaaactgccttttccgtccttaaatgaggagcaaatagatttctctatccactacaacaaattcatcctgcgtgatcccatcctgcacggagtaatagatgttatccgtaatgcattttga

SEQ ID NO: 150 - protein, 266 aa, Shigella flexneri 2a str. 301
MLNLTPSAISQSIQKLRVIFPDPLFIRKGQGVTPTAFAMHLHEYISQGLESILGALDIEGSYDKQRTITIATTPSVGALVLPVIYRAIKTHYPQLLLRNPPISDAENQLSQFQTDLIIDNMFCTNRTVQHHVLFTDNMVLICRKGNPLLSLEDDRETIDNAAHVLLLPEGQNFSGLRQRVQEMFPDRQINFTSYNILTIAALVANSDMLAIIPSRFYNLFSRCWPLEKLPFPSLNEEQIDFSIHYNKFILRDPILHGVIDVIRNAF

SEQ ID NO: 151 - DNA, 996 bp, Enterobacter sakazakii
  CDS (1)..(996): transl_table=11
gtggaattgaaccatccccctgaaaaaccttcagccaaacaggaagatgacagtagaccgcaaatattccagactctgcgaaatatcgatctaaatctactgacgattttcgaagccgtatacgtgcataaaggcattgtaaacgcggcaagagtactgaacctaacgccatcggctatcagccagtctattcagaaactgcgcctgatatttcccgatccgttgtttattcgcaaaggacaaggagtaacgccgactgcttatgcgactcatatgcatgaatatatcagtcagggactggaatctattctcggcgcgctggatttacagggcgagcacgaaaagcagcgcacgattaccatcgctacgtccgcctcgctgggcgccctggtgatcccgcagatttatcagcagattcgcgcagtaaacccgcacctgcaaattcgcaatgtccccctgcaggacaccgaaacccagctgagccagttccagaccgatctggtggtcgatagtggctcgtggtcctcacgaacccttagcactcacctgctctttaaagatcgcgtcgcggtcgtgtgtcgtcgcggacatccgtgctcacgtaccggcaagccggtcacgtctgacgatttgcaacaatgggagcacactttcattatgctgccgggcggaatggtgaacggcgtacgcaagcaaattaatacgctactgccagatcgaaacgtttcgtttagtagttacaatatggtgacgattgcgtctatcatcggcagcagcgatttaatcggctttatgcccgcacgaatattcacgttatttaaagacagctttggacttattgaagtggaaagcgatgtcgttataaaagaaaccatcgacatttcattacattacaataaattcagcctgcgtgatcctgtcgtgcaaaatgtgattgaagcgatagtggagggatttaatcaccacgccgtgtcggctggtgcgtcgccttcataa

SEQ ID NO: 152 - protein, 331 aa, Enterobacter sakazakii
MELNHPPEKPSAKQEDDSRPQIFQTLRNIDLNLLTIFEAVYVHKGIVNAARVLNLTPSAISQSIQKLRLIFPDPLFIRKGQGVTPTAYATHMHEYISQGLESILGALDLQGEHEKQRTITIATSASLGALVIPQIYQQIRAVNPHLQIRNVPLQDTETQLSQFQTDLVVDSGSWSSRTLSTHLLFKDRVAVVCRRGHPCSRTGKPVTSDDLQQWEHTFIMLPGGMVNGVRKQINTLLPDRNVSFSSYNMVTIASIIGSSDLIGFMPARIFTLFKDSFGLIEVESDVVIKETIDISLHYNKFSLRDPVVQNVIEAIVEGFNHHAVSAGASPS

SEQ ID NO: 153 - DNA, 23 bp, Artificial sequence
  primer
atgcttaatctgaccccctcggc

SEQ ID NO: 154 - DNA, 28 bp, Artificial sequence
  primer
ttaaaatgcattacggataacatctatt

SEQ ID NO: 155 - protein, 267 aa, Artificial sequence
  consensus sequence
  Variant (17)..(17): Xaa in position 17 is any amino acid
  Variant (36)..(36): Xaa in position 36 is any amino acid
  Variant (38)..(38): Xaa in position 38 is any amino acid
  Variant (57)..(58): Xaa in position 57 to 58 is any amino acid
  Variant (80)..(80): Xaa in position 80 is any amino acid
  Variant (82)..(82): Xaa in position 82 is any amino acid
  Variant (85)..(85): Xaa in position 85 is any amino acid
  Variant (88)..(90): Xaa in position 88 to 90 is any amino acid
  Variant (99)..(99): Xaa in position 99 is any amino acid
  Variant (101)..(102): Xaa in position 101 to 102 is any amino acid
  Variant (106)..(106): Xaa in position 106 is any amino acid
  Variant (119)..(123): Xaa in position 119 to 123 is any amino acid
  Variant (127)..(127): Xaa in position 127 is any amino acid
  Variant (134)..(134): Xaa in position 134 is any amino acid
  Variant (136)..(140): Xaa in position 136 to 140 is any amino acid
  Variant (143)..(143): Xaa in position 143 is any amino acid
  Variant (145)..(145): Xaa in position 145 is any amino acid
  Variant (147)..(147): Xaa in position 147 is any amino acid
  Variant (149)..(154): Xaa in position 149 to 154 is any amino acid
  Variant (155)..(156): Xaa in position 155 to 156 is any or no amino acid
  Variant (158)..(161): Xaa in position 158 to 161 is any amino acid
  Variant (163)..(163): Xaa in position 163 is any amino acid
  Variant (165)..(166): Xaa in position 165 to 166 is any amino acid
  Variant (168)..(169): Xaa in position 168 to 169 is any amino acid
  Variant (173)..(174): Xaa in position 173 to 174 is any amino acid
  Variant (181)..(181): Xaa in position 181 is any amino acid
  Variant (184)..(184): Xaa in position 184 is any amino acid
  Variant (191)..(191): Xaa in position 191 is any amino acid
  Variant (193)..(193): Xaa in position 193 is any amino acid
  Variant (198)..(198): Xaa in position 198 is any amino acid
  Variant (202)..(202): Xaa in position 202 is any amino acid
  Variant (204)..(204): Xaa in position 204 is any amino acid
  Variant (206)..(206): Xaa in position 206 is any amino acid
  Variant (209)..(209): Xaa in position 209 is any amino acid
  Variant (211)..(213): Xaa in position 211 to 213 is any amino acid
  Variant (215)..(215): Xaa in position 215 is any amino acid
  Variant (219)..(219): Xaa in position 219 is any amino acid
  Variant (229)..(229): Xaa in position 229 is any amino acid
  Variant (232)..(235): Xaa in position 232 to 235 is any amino acid
  Variant (237)..(237): Xaa in position 237 is any amino acid
  Variant (244)..(244): Xaa in position 244 is any amino acid
  Variant (255)..(255): Xaa in position 255 is any amino acid
  Variant (257)..(258): Xaa in position 257 to 258 is any amino acid
  Variant (262)..(262): Xaa in position 262 is any amino acid
  Variant (265)..(265): Xaa in position 265 is any amino acid
LNLTPSAISQSIQKLRXIFPDPLFIRKGQGVTPTAXAXHLHEYISQGLESILGALDXXGSYDKQRTITIATTPSVGALVXPXIYXAIXXXYPQLLLRNXPXXDAEXQLSQFQTDLIIDXXXXXNRTXQHHVLFXDXXXXXCRXGXPXLXXXXXXXXEXXXXAXHXXLXXEGQXXSGLRQRXQEXFPDRQIXFXSYNIXTIAXLXAXSDXLXXXPXRFYXLFSRCWPLEXLPXXXXNXEQIDFSXHYNKFSLRDPXLXXVIDXIRXAF

SEQ ID NO: 156 - protein, 62 aa, Artificial sequence
  protein pattern
  Variant (11)..(11): Xaa in position 11 is Leu or Val
  Variant (30)..(30): Xaa in position 30 is Phe or Tyr
  Variant (32)..(33): Xaa in position 32 to 33 is any or no amino acid
  Variant (36)..(37): Xaa in position 36 to 37 is any or no amino acid
  Variant (53)..(53): Xaa in position 53 is Ile or Leu
  Variant (54)..(54): Xaa in position 54 is Glu or Gln
  Variant (56)..(56): Xaa in position 56 is Glu or Ser
  Variant (57)..(57): Xaa in position 57 is His or Tyr
  Variant (58)..(58): Xaa in position 58 is Asp or Glu
AISQSIQKLRXIFPDPLFIRKGQGVTPTAXAXXMHXXEYISQGLESILGALDXXGXXXKQRT

SEQ ID NO: 157 - protein, 58 aa, Artificial sequence
  protein pattern
  Variant (2)..(2): Xaa in position 2 is any amino acid
  Variant (6)..(6): Xaa in position 6 is Ala or Ser
  Variant (8)..(8): Xaa in position 8 is Ile or Val
  Variant (10)..(10): Xaa in position 10 is Asn or Ser
  Variant (13)..(13): Xaa in position 13 is Leu or Met
  Variant (15)..(15): Xaa in position 15 is Ala or Gly
  Variant (16)..(16): Xaa in position 16 is Ile or Leu
  Variant (17)..(17): Xaa in position 17 is Ile or Met
  Variant (19)..(19): Xaa in position 19 is Ser or Thr
  Variant (23)..(23): Xaa in position 23 is Asp or Asn
  Variant (33)..(33): Xaa in position 33 is Lys or Arg
  Variant (36)..(36): Xaa in position 36 is Phe or Tyr
  Variant (37)..(37): Xaa in position 37 is Ala or Pro
  Variant (38)..(38): Xaa in position 38 is Pro or Ser
  Variant (39)..(39): Xaa in position 39 is Leu or Val
  Variant (41)..(41): Xaa in position 41 is Glu or Ser
  Variant (44)..(44): Xaa in position 44 is Ile or Val
  Variant (45)..(45): Xaa in position 45 is Asp or Glu
  Variant (48)..(48): Xaa in position 48 is Ile or Leu
  Variant (53)..(53): Xaa in position 53 is Phe or Leu
  Variant (54)..(54): Xaa in position 54 is any amino acid
IXTIAXLXAXSDXLXXXPXRFYXLFSRCWPLEXLPXXXXNXEQXXFSXHYNKXXLRDP

SEQ ID NO: 158 - protein, 58 aa, Artificial sequence
  protein pattern
  Variant (3)..(3): Xaa in position 3 is Leu or Met
  Variant (5)..(5): Xaa in position 5 is Ile or Val
  Variant (8)..(8): Xaa in position 8 is Gln or Arg
  Variant (11)..(11): Xaa in position 11 is Lys or Arg
  Variant (12)..(12): Xaa in position 12 is Pro or Thr
  Variant (13)..(13): Xaa in position 13 is His or Arg
  Variant (22)..(22): Xaa in position 22 is Ile or Pro
  Variant (24)..(24): Xaa in position 24 is Ile or Val
  Variant (25)..(25): Xaa in position 25 is Asp or Ser
  Variant (29)..(29): Xaa in position 29 is Asn or Ser
  Variant (41)..(41): Xaa in position 41 is Asp or Asn
  Variant (42)..(42): Xaa in position 42 is Asn or Thr
  Variant (43)..(45): Xaa in position 43 to 45 is any amino acid
  Variant (46)..(46): Xaa in position 46 is Asn or Thr
  Variant (49)..(49): Xaa in position 49 is Ser or Thr
  Variant (50)..(50): Xaa in position 50 is Ile or Val
  Variant (57)..(57): Xaa in position 57 is Ser or Thr
LVXPXIYXAIXXXYPQLLLRNXPXXDAEXQLSQFQTDLIIXXXXXXNRXXQHHVLFXD

SEQ ID NO: 159 - protein, 39 aa, Artificial sequence
  protein pattern
  Variant (2)..(2): Xaa in position 2 is any amino acid
  Variant (3)..(3): Xaa in position 3 is Ile or Leu
  Variant (4)..(4): Xaa in position 4 is Asp or Asn
  Variant (5)..(5): Xaa in position 5 is Asn or Ser
  Variant (7)..(7): Xaa in position 7 is Ala or Asp
  Variant (9)..(9): Xaa in position 9 is Thr or Val
  Variant (10)..(10): Xaa in position 10 is Phe or Leu
  Variant (12)..(12): Xaa in position 12 is any or no amino acid
  Variant (14)..(14): Xaa in position 14 is any or no amino acid
  Variant (16)..(16): Xaa in position 16 is Glu or Gly
  Variant (18)..(18): Xaa in position 18 is any amino acid
  Variant (19)..(19): Xaa in position 19 is Phe or Leu
  Variant (21)..(21): Xaa in position 21 is Gly or Leu
  Variant (26)..(26): Xaa in position 26 is Ile, Leu or Val
  Variant (29)..(29): Xaa in position 29 is any amino acid
  Variant (33)..(33): Xaa in position 33 is Gln or Arg
  Variant (36)..(36): Xaa in position 36 is Asn or Ser
  Variant (38)..(38): Xaa in position 38 is Ser or Thr
EXXXXAXHXXLXLXEXQXXSXLRQRXQEXFPDXQIXFXS

SEQ ID NO: 160 - protein, 9 aa, Artificial sequence
  protein pattern
  Variant (4)..(4): Xaa in position 4 is Ile or Val
  Variant (7)..(7): Xaa in position 7 is Glu or Asn
VIDXIRXAF

SEQ ID NO: 161 - protein, 8 aa, Artificial sequence
  protein pattern
  Variant (6)..(6): Xaa in position 6 is Ser or Thr
  Variant (7)..(7): Xaa in position 7 is Ala or Pro
ITIATXXS

SEQ ID NO: 162 - DNA, 264 bp, Escherichia coli K12
  CDS (1)..(264): transl_table=11
atgaaaaccaaacttaacgaactgcttgaattccctactccttttacttacaaagttatggggcaggcgttacctgagctggttgatcaggtggttgaagtggtacagcgccatgcgccaggtgactacaccccaacggtaaaaccaagcagcaaaggcaactaccactcggtatctatcactatcaacgccactcatatcgagcaggttgaaacactgtatgaagaactgggcaaaatcgatattgtccgcatggttctgtaa

SEQ ID NO: 163 - protein, 87 aa, Escherichia coli K12
MKTKLNELLEFPTPFTYKVMGQALPELVDQVVEVVQRHAPGDYTPTVKPSSKGNYHSVSITINATHIEQVETLYEELGKIDIVRMVL

SEQ ID NO: 164 - DNA, 297 bp, Pasteurella multocida subsp. multocida str. Pm70
  CDS (1)..(297): transl_table=11
atgacagaaaaaatcataaaactcaatgagatgccacaagcgaaattaaaagatctactggaattcccgtgcgcttttacctttaaagttgttggagcgaatcgtgcggatctgatagatgatgttgtggttgtggtacaaaaatatgcaaaaggggattacaatccgcgtcagcaattaagtagcaaaggtacctacaattcggtgtctattgatatcattgcagagcatattgaacaagtcgaagtgctttatgttgagcttgccaaaattgatggcgtcagaatggtgctataa

SEQ ID NO: 165 - protein, 98 aa, Pasteurella multocida subsp. multocida str. Pm70
MTEKIIKLNEMPQAKLKDLLEFPCAFTFKVVGANRADLIDDVVVVVQKYAKGDYNPRQQLSSKGTYNSVSIDIIAEHIEQVEVLYVELAKIDGVRMVL

SEQ ID NO: 166 - DNA, 264 bp, Erwinia carotovora subsp. atroseptica SCRI1043
  CDS (1)..(264): transl_table=11
atgaaaaccaaattaaacgaactgattgaattcccttgcgtttttacttacaaggtcatgggtgaggcaaaaccagagttagtcgatctggtcgttgaagtggtacagcgtcatgcgcctggcgactacaccccgcagatcaagcccagcagcaaagggaactatcactcggtttccatcaccatcacggcgactcacattgagcaggtggaaacgctgtacgaagaactaggcaacatcgacatcgtgcgtatggtgctgtaa

SEQ ID NO: 167 - protein, 87 aa, Erwinia carotovora subsp. atroseptica SCRI1043
MKTKLNELIEFPCVFTYKVMGEAKPELVDLVVEVVQRHAPGDYTPQIKPSSKGNYHSVSITITATHIEQVETLYEELGNIDIVRMVL

SEQ ID NO: 168 - DNA, 300 bp, Mannheimia succiniciproducens MBEL55E
  CDS (1)..(300): transl_table=11
atgagcgaaacaaaaacagtaaatttatcagaactaccgcaacaaaaattaaaagatttattagagtttccatgcagttttacctttaaagttgtaggcgccgcacgcccggatttaattgatgatgtggtgatgctggtacagcagcacgcaaaaggcgattataatccgcgtaatgccgtgagcagcaagggaacataccactcggtttctattgatattattgcggaagaaatcgaacaaatagaaagactgtatgaagaattggctaaaattgaaggcgtgagaatggttctttaa

SEQ ID NO: 169 - protein, 99 aa, Mannheimia succiniciproducens MBEL55E
MSETKTVNLSELPQQKLKDLLEFPCSFTFKVVGAARPDLIDDVVMLVQQHAKGDYNPRNAVSSKGTYHSVSIDIIAEEIEQIERLYEELAKIEGVRMVL

SEQ ID NO: 170 - DNA, 264 bp, Colwellia psychrerythraea 34H
  CDS (1)..(264): transl_table=11
atgaataccaagtttgacgaattattagaatttcctacagtattgaactttaaaatcatgggggttgcctgtgacgagttgcctgatttgatcatagctgaactacaaaagcatacacctggtgattacgtacctaaaataaaaccaagttcaaaaggcacctatcattctgtttctattgccgtaacagttaccagcaaagagcatattgaaactatttataaaacattaaccgctattgatcaggttcgatacgttttataa

SEQ ID NO: 171 - protein, 87 aa, Colwellia psychrerythraea 34H
MNTKFDELLEFPTVLNFKIMGVACDELPDLIIAELQKHTPGDYVPKIKPSSKGTYHSVSIAVTVTSKEHIETIYKTLTAIDQVRYVL

SEQ ID NO: 172 - DNA, 297 bp, Haemophilus somnus 129PT
  CDS (1)..(297)
atgactgacaaaacagtaaaacttaacgacattccacaaaaacaattaaaagatttgttggagtttccttgctcttttactttcaaagtcgttggtaaaaaccgagcagatttaattgatgatgtagttatggtaacgcaaaaatacgctaagggtgattataaccctcgtcaaaatatcagtagcaaaggaacttataattcaatttctgtagatatcattgcggaaaatattgaacaagtagaaattctctatactgaactagccaaaattgatggtgtacgcatggtactttaa

SEQ ID NO: 173 - protein, 98 aa, Haemophilus somnus 129PT
MTDKTVKLNDIPQKQLKDLLEFPCSFTFKVVGKNRADLIDDVVMVTQKYAKGDYNPRQNISSKGTYNSISVDIIAENIEQVEILYTELAKIDGVRMVL

SEQ ID NO: 174 - DNA, 300 bp, Actinobacillus pleuropneumoniae serovar 1 str. 4074
  CDS (1)..(300)
atgacccaatcaagaacagtaaacctacaagacttaccacaggcaaaattaaaagatttattagaatttccgtgttcattcacttttaaagtggtgggtacgcatcgtgaagatttagtggatgatgtggtggcaatcacgcaaattcatgcgaaaggcgattataacccgcgccaacaacgtagctcaaaaggcacttataattcggtttccatcgacattattgccgagcatatcgaccaagtcgaaacgctttatgtcgagcttgctaaaatttcaggcgtgagaatggtcttataa

SEQ ID NO: 175 - protein, 99 aa, Actinobacillus pleuropneumoniae serovar 1 str. 4074
MTQSRTVNLQDLPQAKLKDLLEFPCSFTFKVVGTHREDLVDDVVAITQIHAKGDYNPRQQRSSKGTYNSVSIDIIAEHIDQVETLYVELAKISGVRMVL

SEQ ID NO: 176 - DNA, 267 bp, Shewanella sp. ANA-3
  CDS (1)..(267): transl_table=11
atgttaaacacgaaatttgatgaactcatggagttcccctgcgccttccccttcaaagtggttggcgatgcccacgaagccctgaccgacagagtcgttgccgtagtgcaaagacacgccccaggtgattattcacctacggttaaggcctcaagcaaaggtagctactactctgtgaccatccgcgtcacagtgaccagcaaagatcatattgagactctgtacactgagcttgccggtatcgaaggcgtacgccgcgtactataa

SEQ ID NO: 177 - protein, 88 aa, Shewanella sp. ANA-3
MLNTKFDELMEFPCAFPFKVVGDAHEALTDRVVAVVQRHAPGDYSPTVKASSKGSYYSVTIRVTVTSKDHIETLYTELAGIEGVRRVL

SEQ ID NO: 178 - DNA, 279 bp, Pseudoalteromonas tunicata D2
  CDS (1)..(279): transl_table=11
gtggtaaaacttgttcaaaacaccaaatttgatgaatatctggaatttccttgccgttttagttttcgagtaatgggactggcaaataagcaacttacggaacaagttattgtggttatgcaacgtgtggcgcctggcgattacacgccgacagtcaaacctagtactaaaggtaactatgaatctgttcatttagttgcaaatgtgaccagcaaagagcacattgaacaaatttataacgaattaggtaaattagaagacgtacgccacgtcctttaa

SEQ ID NO: 179 - protein, 92 aa, Pseudoalteromonas tunicata D2
MVKLVQNTKFDEYLEFPCRFSFRVMGLANKQLTEQVIVVMQRVAPGDYTPTVKPSTKGNYESVHLVANVTSKEHIEQIYNELGKLEDVRHVL

SEQ ID NO: 180 - DNA, 276 bp, Photobacterium sp. SKA34
  CDS (1)..(276): transl_table=11
atgcaagaacaagagcaaccaaaactaaaagatctactggaattcccttgtatctttacttttaaagtaatgggtgaaaacaaaccagaattgccagatcgtgtagttgaagttattcagagtgttatccctggtgattacactccaacaacaaaacccagtagcaaaggaacatatactgctgtttctgttgctgtaaacgcgaccaatgttgaacaaattgaaaccttatacaaagagttaggtgcaattgatattgttcgcgtagtgttataa

SEQ ID NO: 181 - protein, 91 aa, Photobacterium sp. SKA34
MQEQEQPKLKDLLEFPCIFTFKVMGENKPELPDRVVEVIQSVIPGDYTPTTKPSSKGTYTAVSVAVNATNVEQIETLYKELGAIDIVRVVL

SEQ ID NO: 182 - DNA, 264 bp, Enterobacter sakazakii
  CDS (1)..(264): transl_table=11
atgaaaaccaaacttaacgaactgcttgagttcccgaccccctttacttacaaagtgatgggcctggcgaagcctgagttggttgatctggtcgtcgaggtagtgcagcgccacgctcctggcgactacacgccgcaggtcaaaccgagcagcaaaggtaattaccactccgtttctatcactatcaacgcgacgcatatcgagcaggtggaaacgctctatgaagaactcggtgatatcgacatcgtgcgtatggtactgtga

SEQ ID NO: 183 - protein, 87 aa, Enterobacter sakazakii
MKTKLNELLEFPTPFTYKVMGLAKPELVDLVVEVVQRHAPGDYTPQVKPSSKGNYHSVSITINATHIEQVETLYEELGDIDIVRMVL

SEQ ID NO: 184 - DNA, 279 bp, Haemophilus influenzae
  CDS (1)..(279): transl_table=11
atgacaatagaaaacgattatgcaaaactcaaggaattaatggaatttccagcaaaaatgacttttaaagttgcgggaattaatcgagaagggttagcacaagatcttatacaagtggtgcaaaaatatattaaaggcgattatattccaaaagaaaagcgcagtagtaaaggcacttataattcagtttcaattgatattattgctgaaaactttgatcaggtagaaacactctataaagaactggctaaagttgaaggcgtgaaaatggttatttag

SEQ ID NO: 185 - protein, 92 aa, Haemophilus influenzae
MTIENDYAKLKELMEFPAKMTFKVAGINREGLAQDLIQVVQKYIKGDYIPKEKRSSKGTYNSVSIDIIAENFDQVETLYKELAKVEGVKMVI

SEQ ID NO: 186 - DNA, 267 bp, Shewanella oneidensis
  CDS (1)..(267): transl_table=11
atgttaaacacgaaatttgatgaactgatggagttcccctgcgcctttcccttcaaagtggtaggggatgcccatgaaaccttaacggacagagtggttgcggtagtgcaaaaacacgcaccgggcgactattcaccaacagttaaagcctcaagcaaaggtagctactattcagtcacaatccgcgtcactgtgaccagcaaagatcatatcgaaaccctgtacacagagctcgccaacatcgaaggcgtgcgccgcgtactataa

SEQ ID NO: 187 - protein, 88 aa, Shewanella oneidensis
MLNTKFDELMEFPCAFPFKVVGDAHETLTDRVVAVVQKHAPGDYSPTVKASSKGSYYSVTIRVTVTSKDHIETLYTELANIEGVRRVL

SEQ ID NO: 188 - DNA, 264 bp, Photorhabdus luminescens subsp
  CDS (1)..(264): transl_table=11
atgaaaaccaaattaaatgaactgcttgagttcccttgttcattcacttacaaagtgatgggcttagcggagcctgagctagtcaatcaggtcgttgaagtggttcaacgtcatgcgccgggcgattactctccacaagtgaagccaagcagcaaaggtaactaccactcagtgtccattactatcaatgcgactcatattgaacaagtagaaacgctatatgaagagttaggtaaccttgaattggtacgggtagtcttgtaa

SEQ ID NO: 189 - protein, 87 aa, Photorhabdus luminescens subsp
MKTKLNELLEFPCSFTYKVMGLAEPELVNQVVEVVQRHAPGDYSPQVKPSSKGNYHSVSITINATHIEQVETLYEELGNLELVRVVL

SEQ ID NO: 190 - DNA, 267 bp, Pasteurella multocida
  CDS (1)..(267)
atgccacaagcgaaattaaaagatctactggaattcccgtgcgcttttacctttaaagttgttggagcgaatcgtgcggatctgatagatgatgttgtggttgtggtacaaaaatatgcaaaaggggattacaatccgcgtcagcaattaagtagcaaaggtacctacaattcggtgtctattgatatcattgcagagcatattgaacaagtcgaagtgctttatgttgagcttgccaaaattgatggcgtcagaatggtgctataa

SEQ ID NO: 191 - protein, 88 aa, Pasteurella multocida
MPQAKLKDLLEFPCAFTFKVVGANRADLIDDVVVVVQKYAKGDYNPRQQLSSKGTYNSVSIDIIAEHIEQVEVLYVELAKIDGVRMVL

SEQ ID NO: 192 - DNA, 294 bp, Haemophilus ducreyi
  CDS (1)..(294): transl_table=11
atgcctcaagcgattaatttgaaagatttaccacaagctaaactaaaagatttattagagtttccttgtgcatttacttttaaagttgttggtattcatcgagaagatttagtggaagatgtcgttgcgataacgcaagttcacgctaaaggggattgtaatccacgtcaacagcggagttcgaaagggacttataattctgtttcaattgatattattgcagagcatattgatcaaattgaaacactttatctagaattagctaaaattaccggggttaggatggtactttag

SEQ ID NO: 193 - protein, 97 aa, Haemophilus ducreyi
MPQAINLKDLPQAKLKDLLEFPCAFTFKVVGIHREDLVEDVVAITQVHAKGDCNPRQQRSSKGTYNSVSIDIIAEHIDQIETLYLELAKITGVRMVL

SEQ ID NO: 194 - DNA, 264 bp, Yersinia pestis
  CDS (1)..(264): transl_table=11
atgaaaacgaaactgaacgaactacttgagttcccttgctcttttacctacaaggtcatgggcatcgctgaacctcaactggttgaccaagtagttgaagtggtacagcgccatgctccgggtgaatataccccgcaggtaaaaccgagcagcaaaggcaactatcactccgtgtctatcaccatcacagccacccatattgatcaggtggaaacactgtatgaagaactgggcaatcttgaattggtcaagatggtgctctag

SEQ ID NO: 195 - protein, 87 aa, Yersinia pestis
MKTKLNELLEFPCSFTYKVMGIAEPQLVDQVVEVVQRHAPGEYTPQVKPSSKGNYHSVSITITATHIDQVETLYEELGNLELVKMVL

SEQ ID NO: 196 - DNA, 279 bp, Vibrio vulnificus
  CDS (1)..(279): transl_table=11
atgctcaccatcaactctgatgccaaactgaaagatcttcttgagttcccttgttcatttacatacaaggtaatgggttacgcaaaacctgaactgccagagaaagtgttggaagtgattcagcgccatgctcctggagattacagccctgcagtaaaacctagtgcaaaaggtaactatcactcggtttctatcaacatcactgccacctctatcgagcaggttgaaacgctgtacaaagagcttggcgaaatcgacattgtacgcatggttctataa

SEQ ID NO: 197 - protein, 92 aa, Vibrio vulnificus
MLTINSDAKLKDLLEFPCSFTYKVMGYAKPELPEKVLEVIQRHAPGDYSPAVKPSAKGNYHSVSINITATSIEQVETLYKELGEIDIVRMVL

SEQ ID NO: 198 - DNA, 267 bp, Buchnera aphidicola subsp
  CDS (1)..(267): transl_table=11
atgagaaaaaataaactagaaaaaatgttaaaatttccttgtttatttacatataaagtaattggattagcacaaccagaacttgttgataaaatagttaaaataattcaatgtaaattacctggagattatgttcctcaaataaaatctagcaataaaggaaattatttgtctatctccattactatatgtgctaatacctttgaagaaatagaaagtctctattatgaattaagtaatattaatatagttagaatggtcttataa

SEQ ID NO: 199 - protein, 88 aa, Buchnera aphidicola subsp
MRKNKLEKMLKFPCLFTYKVIGLAQPELVDKIVKIIQCKLPGDYVPQIKSSNKGNYLSISITICANTFEEIESLYYELSNINIVRMVL

SEQ ID NO: 200 - DNA, 264 bp, Buchnera aphidicola subsp
  CDS (1)..(264): transl_table=11
atgaagacaaaattacgagaaatgttaaaattcccttgtttttttacttataagatcattggtttagcacaacccgaacttgttgatcaaataataaaagtcattcaaattcagattcctggagattatacacctcaagtaaaatcaagtaacagaggtaattatctttctgtttccattacaatatgtgcaaaaaattttgaacagattgaaacattgtaccatgatattagtaaaataaatatggtgagaatggttctataa

SEQ ID NO: 201 - protein, 87 aa, Buchnera aphidicola subsp
MKTKLREMLKFPCFFTYKIIGLAQPELVDQIIKVIQIQIPGDYTPQVKSSNRGNYLSVSITICAKNFEQIETLYHDISKINMVRMVL

SEQ ID NO: 202 - DNA, 264 bp, Buchnera aphidicola subsp
  CDS (1)..(264): transl_table=11
atgaaaacaaaattgcgagaaatgttaagattcccttgtttttttacttataagattattggtttagcgcagcctgaactgatcgatcaaataattaaagttattcaaattcagattcctggagactacactcctcaagtaaaatcaagtaatagaggaaactatctttctgtttcaattacaatatgtgctaaaaattttgaacaaattgaatgtttatatcatgaaattagtaaaattaatatagtaagaatggttttataa

SEQ ID NO: 203 - protein, 87 aa, Buchnera aphidicola subsp
MKTKLREMLRFPCFFTYKIIGLAQPELIDQIIKVIQIQIPGDYTPQVKSSNRGNYLSVSITICAKNFEQIECLYHEISKINIVRMVL

SEQ ID NO: 204 - DNA, 279 bp, Vibrio parahaemolyticus
  CDS (1)..(279): transl_table=11
atgctaaccatcaactctgatgcaaaattaaaagacctgcttgagttcccttgttcttttacttacaaggtaatgggtcatgcaaagcctgagcttccagaactcgttcttgaagtaatccagcgccatgctccaggtgactacagcccaaaagtcaaaccaagcgctaaaggcaactaccactcagtgtctatcaacatcactgcaacgtctatcgagcaggttgaaaccctatacaaagaattgggcgaaatcgacatcgttcgtatggttctataa

SEQ ID NO: 205 - protein, 92 aa, Vibrio parahaemolyticus
MLTINSDAKLKDLLEFPCSFTYKVMGHAKPELPELVLEVIQRHAPGDYSPKVKPSAKGNYHSVSINITATSIEQVETLYKELGEIDIVRMVL

SEQ ID NO: 206 - DNA, 279 bp, Vibrio cholerae
  CDS (1)..(279): transl_table=11
atgctgaacatcaactctgatgcgaaattaaaagatctgctcgaattcccatgctcctttacctacaaagtgatgggacacgctaagcctgagctgccagaacgtgtgttggaagtgattcaacgtcatgctcctggtgactacagcccgcgcgttaaacccagcgctaagggtaactaccattcggtctcggtgactattcacgcgacctcaattgaacaagtagagatcctttataaagagctcggtgaaatcgatatcgtgcgtatggttctgtaa

SEQ ID NO: 207 - protein, 92 aa, Vibrio cholerae
MLNINSDAKLKDLLEFPCSFTYKVMGHAKPELPERVLEVIQRHAPGDYSPRVKPSAKGNYHSVSVTIHATSIEQVEILYKELGEIDIVRMVL

SEQ ID NO: 208 - DNA, 24 bp, Artificial sequence
  primer
atgaaaaccaaacttaacgaactg

SEQ ID NO: 209 - DNA, 23 bp, Artificial sequence
  primer
ttacagaaccatgcggacaatat

SEQ ID NO: 210 - protein, 84 aa, Artificial sequence
  consensus sequence
  Variant (3)..(4): Xaa in position 3 to 4 is any amino acid
  Variant (11)..(11): Xaa in position 11 is any amino acid
  Variant (14)..(14): Xaa in position 14 is any amino acid
  Variant (17)..(17): Xaa in position 17 is any amino acid
  Variant (19)..(23): Xaa in position 19 to 23 is any amino acid
  Variant (25)..(32): Xaa in position 25 to 32 is any amino acid
  Variant (34)..(37): Xaa in position 34 to 37 is any amino acid
  Variant (41)..(41): Xaa in position 41 is any amino acid
  Variant (43)..(46): Xaa in position 43 to 46 is any amino acid
  Variant (48)..(48): Xaa in position 48 is any amino acid
  Variant (51)..(51): Xaa in position 51 is any amino acid
  Variant (53)..(53): Xaa in position 53 is any amino acid
  Variant (58)..(60): Xaa in position 58 to 60 is any amino acid
  Variant (62)..(67): Xaa in position 62 to 67 is any amino acid
  Variant (69)..(69): Xaa in position 69 is any amino acid
  Variant (72)..(72): Xaa in position 72 is any amino acid
  Variant (75)..(76): Xaa in position 75 to 76 is any amino acid
  Variant (78)..(79): Xaa in position 78 to 79 is any amino acid
  Variant (82)..(82): Xaa in position 82 is any amino acid
KLXXLLEFPCXFTXKVXGXXXXXLXXXXXXXXQXXXXGDYXPXXXXSXKGXYXSVSIXXXAXXXXXXEXLYXELXXIXXVRXVL

SEQ ID NO: 211 - protein, 57 aa, Artificial sequence
  protein pattern
  Variant (2)..(3): Xaa in position 2 to 3 is any amino acid
  Variant (5)..(5): Xaa in position 5 is Pro or Thr
  Variant (6)..(6): Xaa in position 6 is Phe or Tyr
  Variant (8)..(8): Xaa in position 8 is Ile or Val
  Variant (9)..(9): Xaa in position 9 is Ile, Met or Val
  Variant (11)..(14): Xaa in position 11 to 14 is any amino acid
  Variant (15)..(15): Xaa in position 15 is Ala, Asp, Glu, Gln or Thr
  Variant (17)..(17): Xaa in position 17 is any amino acid
  Variant (18)..(18): Xaa in position 18 is Asp, Glu or Asn
  Variant (19)..(19): Xaa in position 19 is any amino acid
  Variant (20)..(20): Xaa in position 20 is Ile or Val
  Variant (21)..(21): Xaa in position 21 is Ile, Leu or Val
  Variant (22)..(22): Xaa in position 22 is any amino acid
  Variant (23)..(23): Xaa in position 23 is Ile, Leu or Val
  Variant (24)..(24): Xaa in position 24 is any amino acid
  Variant (26)..(27): Xaa in position 26 to 27 is any amino acid
  Variant (28)..(28): Xaa in position 28 is Ala, Ile or Leu
  Variant (29)..(29): Xaa in position 29 is any amino acid
  Variant (31)..(31): Xaa in position 31 is Asp or Glu
  Variant (33)..(33): Xaa in position 33 is Asn, Ser, Thr or Val
  Variant (35)..(38): Xaa in position 35 to 38 is any amino acid
  Variant (40)..(40): Xaa in position 40 is Ala, Asn or Ser
  Variant (41)..(41): Xaa in position 41 is Lys or Arg
  Variant (43)..(43): Xaa in position 43 is Asn, Ser or Thr
  Variant (45)..(45): Xaa in position 45 is any amino acid
  Variant (46)..(46): Xaa in position 46 is Ala or Ser
  Variant (47)..(47): Xaa in position 47 is Ile or Val
  Variant (48)..(48): Xaa in position 48 is Ser or Thr
  Variant (49)..(49): Xaa in position 49 is Ile or Val
  Variant (50)..(50): Xaa in position 50 is any amino acid
  Variant (51)..(51): Xaa in position 51 is Ile or Val
  Variant (52)..(52): Xaa in position 52 is any amino acid
  Variant (53)..(53): Xaa in position 53 is Ala or Val
  Variant (54)..(56): Xaa in position 54 to 56 is any amino acid
  Variant (57)..(57): Xaa in position 57 is Asp or Glu
PXXFXXKXXGXXXXXLXXXXXXXXQXXXXGXYXPXXXXSXXGXYXXXXXXXXXXXXX

SEQ ID NO: 212 - protein, 15 aa, Artificial sequence
  protein pattern
  Variant (3)..(3): Xaa in position 3 is any amino acid
  Variant (6)..(6): Xaa in position 6 is Ala, Gly or Ser
  Variant (7)..(7): Xaa in position 7 is any amino acid
  Variant (8)..(8): Xaa in position 8 is Ile, Leu or Val
  Variant (9)..(9): Xaa in position 9 is Asp, Glu, Asn, Ser or Thr
  Variant (10)..(10): Xaa in position 10 is Gly, Ile or Leu
  Variant (12)..(12): Xaa in position 12 is Lys or Arg
  Variant (13)..(13): Xaa in position 13 is any amino acid
  Variant (15)..(15): Xaa in position 15 is Ile or Leu
LYXELXXXXXVXXVX

SEQ ID NO: 213 - DNA, 2049 bp, Escherichia coli K12
  CDS (1)..(2049): transl_table=11
atgagtcgtaaacaactggcgctattcgaaccaacacttgtcgttcaggcgctgaaagaagcggtgaaaaaattaaacccgcaggcgcaatggcgcaatccggtgatgtttatcgtctggatcggcagtctgctgaccacctgtattagcatcgcgatggcaagcggtgcgatgcccggcaatgcgctgtttagcgcggccattagcggttggctgtggatcaccgtactgttcgctaatttcgccgaggcgctggcagaaggccgcagtaaagcgcaggccaacagtctgaaaggggtgaaaaaaactgcctttgcccgcaagctgcgtgagccgaaatatggcgctgcggcggacaaagttcctgccgaccaacttcgtaaaggcgatatcgtactggtagaagctggcgatattatcccctgcgatggtgaagttattgaagggggtgcatcggtcgatgaaagcgccatcaccggggaatcggcaccggtgatccgtgaatccggcggcgattttgcctccgtcaccggcggcacgcgtattctttctgactggctggtgattgagtgtagcgttaaccccggcgagacatttctggatcggatgatcgcgatggtggaaggcgcacagcgacgcaaaacgccgaacgaaattgccctgaccattctgctgattgccctgactatcgtctttttactggcaaccgccacgctgtggccgttttccgcgtggggcggtaatgcagtcagcgtaacggtactggtggcgctgctggtctgtctgatcccaaccactattggcggcctgttgtcagcgatcggcgtcgccgggatgagccggatgctaggcgcgaatgtgattgccaccagcggacgtgcagttgaagcggcaggtgacgttgacgttctgctactggataaaaccggcaccatcacactcggtaaccgtcaggcgtcggagtttatccccgcgcagggcgtggatgaaaaaacgctggctgacgccgcacaactggcttcgctggctgatgaaacgccggaaggccgcagtattgtgatcctcgccaagcagcgttttaacctgcgcgagcgcgatgtgcagtcgctccatgccacctttgtaccgtttactgcgcaaagccggatgagcgggatcaacatcgacaaccgcatgatccgtaaaggttctgtcgatgccattcgtcgccatgttgaggctaacggtggtcacttccctaccgatgttgatcaaaaagtcgatcaggttgcgcgtcagggagccacgccgctggtggtggtggaaggttctcgtgtgctgggcgttattgcgctgaaagatatcgtcaaaggcggtattaaagagcgcttcgcccagctgcgcaaaatgggcattaaaacggtgatgattaccggcgataaccgtctgactgccgccgcgattgctgcggaagcgggtgtcgatgattttctcgccgaagcgacaccggaggccaagctggcattgatccgtcagtatcaggcggaaggtcgtttggtagcgatgaccggcgacggcaccaacgatgctccggcgctggcgcaggcagatgtcgcggtggcgatgaactccggcacccaggcggcgaaagaggcgggcaatatggtcgatctcgactctaacccgaccaagttgatcgaggtggtgcacattggcaaacagatgctgatgacccgtggctcgctgaccaccttcagcattgccaacgatgtggcgaaatacttcgccattattccggcggcattcgcggcaacgtatccgcagttaaatgcgctgaacatcatgtgcctgcattcgcccgactccgcaatcctcagtgcggtgattttcaacgccttgattatcgtctttttgattcccctggcgttaaaaggcgtgagttataaaccgcttaccgcttctgccatgttgcgccgtaacttatggatttacggtctgggtgggctgctggtgccgtttatcggtatcaaagtcattgatttactgctgaccgtttgcggtctggtgtga

SEQ ID NO: 214 - protein, 682 aa, Escherichia coli K12
MSRKQLALFEPTLVVQALKEAVKKLNPQAQWRNPVMFIVWIGSLLTTCISIAMASGAMPGNALFSAAISGWLWITVLFANFAEALAEGRSKAQANSLKGVKKTAFARKLREPKYGAAADKVPADQLRKGDIVLVEAGDIIPCDGEVIEGGASVDESAITGESAPVIRESGGDFASVTGGTRILSDWLVIECSVNPGETFLDRMIAMVEGAQRRKTPNEIALTILLIALTIVFLLATATLWPFSAWGGNAVSVTVLVALLVCLIPTTIGGLLSAIGVAGMSRMLGANVIATSGRAVEAAGDVDVLLLDKTGTITLGNRQASEFIPAQGVDEKTLADAAQLASLADETPEGRSIVILAKQRFNLRERDVQSLHATFVPFTAQSRMSGINIDNRMIRKGSVDAIRRHVEANGGHFPTDVDQKVDQVARQGATPLVVVEGSRVLGVIALKDIVKGGIKERFAQLRKMGIKTVMITGDNRLTAAAIAAEAGVDDFLAEATPEAKLALIRQYQAEGRLVAMTGDGTNDAPALAQADVAVAMNSGTQAAKEAGNMVDLDSNPTKLIEVVHIGKQMLMTRGSLTTFSIANDVAKYFAIIPAAFAATYPQLNALNIMCLHSPDSAILSAVIFNALIIVFLIPLALKGVSYKPLTASAMLRRNLWIYGLGGLLVPFIGIKVIDLLLTVCGLV

SEQ ID NO: 215 - DNA, 2157 bp, Agrobacterium tumefaciens str. C58
  CDS (1)..(2157): transl_table=11
ttgtcgctctcgaagttctcacgggctgatcgacctcatcggtcgccctgtttcaaacgctggagcctcttcatgagccagtccaaacaagcgagcatactcgattctcgcattctcgtgccggccattgccgacgcattcaaaaagctcaatccgcgcacgcttgcgcgcaatcccgtcatgttcgtcgttgcgacggtgtcggtgctgacaacggtgctgttcatccgcgatctcatcaccggcggcgccaatctcgccttttccttccagatcaatctctggctctggttcaccgtgctgtttgccaatttcgcggaagccgtcgccgaagggcgcggcaaggcgcaggcggattcgctgcgcaagacccgcacggaaacccaggcgaaacttctgaacagcgatgatcgcagccagtataaaatggttgcgggcgacagcctgaaggtgaacgatgtcgttcttgtcgaggcaggcgatatcatcccctccgacggtgaagtcatcgagggtgtcgcctccgtcaacgaggcggcgatcacgggtgaatccgcccccgtcatccgcgaatccggcggcgaccgctcggcggttaccggcggcacgcaggttctgtcggactggatccgcgttcgcatcaccgccgctgccggctccaccttccttgatcggatgatttcgctggtcgaaggtgccgagcgccagaagacaccgaatgagatcgcgctcaacatcctgctggccggtatgacgctgatcttcgttctcgccacagcgaccattccaagtttcgcggcctatgccggcggttccatcccgatcatcgtgctggtggcgctgttcgtcacgcttatcccgaccaccatcggcgcgcttctgtccgccatcggcattgccggcatggaccgtctggtgcgtttcaacgttctcgccatgtccggccgcgccgtcgaggcggcgggtgacgtggatacgcttctgctcgacaagaccggcacgatcacgcttggcaaccggcaggcgaccgatctccgccccattcccggcgtctccgagcaggaacttgccgatgccgcccaactcgcctcgctcgccgacgaaaccccggaaggccgctccatcgtggttctggccaaggaaaaatacggaatccgtgcccgggatatgcagaagctgcacgctacttttgtgcccttcaccgcccagacccgcatgagcggtgtcgattttgaaggtgcctccatccgcaagggcgcggttgatgcggttcttgcctatgtcgatggcggcgctctgcaacatggcaatgcggcgcttgccctcaaaactgaaacggatgccacgcgggctatccgcgcaatagcggaagacatcgccaaggccggcggcacaccgcttgcggtggtgcgcgatggcaagctgctcggcgtggtgcaactgaaggatatcgtcaagggcggtattcgggagcgtttcgccgagcttcggcgcatgggcatccgcaccgtgatgattactggtgacaatccgatgaccgccgccgccatcgcagcggaggcaggcgtcgatgatttccttgcccaggcaacgccggaaaacaagctggaacttatccgcgaggagcaggccaagggcaagcttgtcgccatgtgcggcgacggcaccaacgacgcgccggcgctggcgcaggccgatgtcggcgtcgccatgaacaccgggacggtcgcagcccgcgaagccggcaacatggtcgatctcgacagcgatccgaccaagctcatcgagatcgtcgaaatcggcaagcagttgctgatgacccgcggtgcgctgacgaccttctccatcgccaacgatatcgccaaatatttcgccatcatcccggcaatgttcctggcgctgtatccgcagcttggcgtcttgaatgtgatggggctttcaacgccgcagagcgccattttgtcggcgatcatcttcaacgcactcatcatcatcgcgctcatcccgttgtcgctgaagggcgtcaaataccgtccgattggcgctggcgcgctcctgtcgcgcaatctggtcatttatggcctcggcggcatcatcgttcccttcatcggcatcaagctcatcgacctcgccgtcacggcgctcggtctcgcctga

SEQ ID NO: 216 - protein, 718 aa, Agrobacterium tumefaciens str. C58
MSLSKFSRADRPHRSPCFKRWSLFMSQSKQASILDSRILVPAIADAFKKLNPRTLARNPVMFVVATVSVLTTVLFIRDLITGGANLAFSFQINLWLWFTVLFANFAEAVAEGRGKAQADSLRKTRTETQAKLLNSDDRSQYKMVAGDSLKVNDVVLVEAGDIIPSDGEVIEGVASVNEAAITGESAPVIRESGGDRSAVTGGTQVLSDWIRVRITAAAGSTFLDRMISLVEGAERQKTPNEIALNILLAGMTLIFVLATATIPSFAAYAGGSIPIIVLVALFVTLIPTTIGALLSAIGIAGMDRLVRFNVLAMSGRAVEAAGDVDTLLLDKTGTITLGNRQATDLRPIPGVSEQELADAAQLASLADETPEGRSIVVLAKEKYGIRARDMQKLHATFVPFTAQTRMSGVDFEGASIRKGAVDAVLAYVDGGALQHGNAALALKTETDATRAIRAIAEDIAKAGGTPLAVVRDGKLLGVVQLKDIVKGGIRERFAELRRMGIRTVMITGDNPMTAAAIAAEAGVDDFLAQATPENKLELIREEQAKGKLVAMCGDGTNDAPALAQADVGVAMNTGTVAAREAGNMVDLDSDPTKLIEIVEIGKQLLMTRGALTTFSIANDIAKYFAIIPAMFLALYPQLGVLNVMGLSTPQSAILSAIIFNALIIIALIPLSLKGVKYRPIGAGALLSRNLVIYGLGGIIVPFIGIKLIDLAVTALGLA

SEQ ID NO: 217 - DNA, 2121 bp, Bradyrhizobium japonicum USDA 110
  CDS (1)..(2121): transl_table=11
gtgacctccatggatacgatgaaactgcaaaaacgtgctgccgtatcggcgatgctcgatcccaggatcgtagtgcccgcgatccgcgcctccttcaccaagctcgacccgcgactgatggtgaagaatcccgtgatgttcgtggtcgagatcgtggccgcgctcaccaccgtgatcttcctgcgcgatctcgtcaccagcggcgcgaatctcggcttcacgttccagatcatcctctggctctggttcaccgtgctgtttgcgaacttcgccgaggcggtcgccgaaggccgcggcaaggcgcaggctgaatcgctgcgcaagacccgcaccgagagccaggccaagctgctcaccggcaccggccaggcaaagctggttccgggcacgagcctgaaggtcggcgacatcgtgctggtcgaagcgggggacaccattccctccgacggcgaggtgatcgagggcgtcgcctccgtcaacgaggccgccatcaccggcgaatccgcgcccgtcatccgcgagtcaggtggcgaccgctcggcggtgacgggcggcacgcaggtgctgtcggactggatccgcgtccgcatcaccgccgcgcagggctcgaccttcatcgatcgcatgatcaagctggtcgagggcgccgagcgtcagaagacgccgaacgagatcgcgctcaacatcctgctcgccggcctcaccatcatcttcgtgttcgccaccgtcacgattccgagctatgcggcctatgccggcggctcgatctcggtagtcgtgctggtcgcgctgttcgtgacgctgatcccgactacgatcggtgcgctgctgtcggcgatcggcattgccggcatggaccgcctggtgcgcttcaacgtgctggcgatgtcgggccgcgccgtcgaggcggccggcgacgtcgacacgctgctgctcgacaagaccggaacgatcacgctcggcaatcgtcaggcgaccgcgttccgccccgttcgcggcgtcaccgagcaggagctggcggacgcggctcagctcgcctcgctcgccgacgagacgccggaaggccgctccatcgtcgtgctggcgaaggagaagtatggcatccgcggccgcgacatggccgagctcggggcaaccttcatcccgttcacggcgcagacccgcatgagcggcgtcgatgccggcggctcgtcggtgcgcaagggcgcggtcgatgccatgctcaactatgtcggcggcggcgcgcctctggccgttgcctccggcaacaccgcccgcgcgatccagcctgcggagctctcggaggtcggccgcgagatccagatcatcgccgacgagatctcgaaagccggcggcacgccgctggccgtcgcgaaggacggcaagctgctcggcgtcatccagctcaaggatatcgtcaagggcggcatccgcgagcgctttgccgagctgcgccgcatgggcatccgcaccatcatgatcaccggcgacaacccgatgacggccgccgcgatcgcggcggaagccggcgtcgacgatttcctggcgcaggcaacccccgaggacaagctcaagctgatccgcgacgagcaggccaagggcaagctggtggcgatgtgcggcgacggcaccaatgacgcgccggcgctcgcccaggccgatgtcggcgtcgccatgaacaccggcacgcaggcggcccgcgaggccggcaacatggtcgatctcgattccaacccgaccaagctgatcgaagtggtcgagatcggcaaacagctgctgatgacgcgcggcgcgctgacgaccttctcgatcgccaacgacgtcgcaaaatactttgcgatcatcccggcgatgttcttggcgttctacccgcagctcaacgtgctcaacgtcatgaacctgtcgagcccgcagagcgccatcctgtcggcgatcatcttcaacgcgcttgtcatcatcgcgctgattccgctcgcgctgaagggcgtcgcctaccgcgccgtcggggccggcgcactgttgcgacgtaacctgctgatctacgggcttggcggcatcgtcattcccttcatcggaatcaaggcgatcgacctcgtcgtcgtcgccttgcacctggcctga

SEQ ID NO: 218 - protein, 706 aa, Bradyrhizobium japonicum USDA 110
MTSMDTMKLQKRAAVSAMLDPRIVVPAIRASFTKLDPRLMVKNPVMFVVEIVAALTTVIFLRDLVTSGANLGFTFQIILWLWFTVLFANFAEAVAEGRGKAQAESLRKTRTESQAKLLTGTGQAKLVPGTSLKVGDIVLVEAGDTIPSDGEVIEGVASVNEAAITGESAPVIRESGGDRSAVTGGTQVLSDWIRVRITAAQGSTFIDRMIKLVEGAERQKTPNEIALNILLAGLTIIFVFATVTIPSYAAYAGGSISVVVLVALFVTLIPTTIGALLSAIGIAGMDRLVRFNVLAMSGRAVEAAGDVDTLLLDKTGTITLGNRQATAFRPVRGVTEQELADAAQLASLADETPEGRSIVVLAKEKYGIRGRDMAELGATFIPFTAQTRMSGVDAGGSSVRKGAVDAMLNYVGGGAPLAVASGNTARAIQPAELSEVGREIQIIADEISKAGGTPLAVAKDGKLLGVIQLKDIVKGGIRERFAELRRMGIRTIMITGDNPMTAAAIAAEAGVDDFLAQATPEDKLKLIRDEQAKGKLVAMCGDGTNDAPALAQADVGVAMNTGTQAAREAGNMVDLDSNPTKLIEVVEIGKQLLMTRGALTTFSIANDVAKYFAIIPAMFLAFYPQLNVLNVMNLSSPQSAILSAIIFNALVIIALIPLALKGVAYRAVGAGALLRRNLLIYGLGGIVIPFIGIKAIDLVVVALHLA

SEQ ID NO: 219 - DNA, 2085 bp, Streptomyces avermitilis MA-4680
  CDS (1)..(2085): transl_table=11
atgtccacagccactccgacccgggcaccgcacagcgatgtgccgaccggccacaaggacgaaggacgtgtcggcgcggggctcttcgaccccaagcaactgctcaagtcgctgccggacgccttccgcaagctcgacccgcgggtgatggtcaagtcacccgtgatgttcgtggtgttggtcggttcggtcctgacgacggtgttctccttcaaggacccgggcgactggttcggctgggcgatcagcgcctggctgtggctgaccgtgatcttcgccaacctggcggaggcggtcgccgagggccgaggcaaggcgcaggcggacaccctgcgcagggcgaagacggacaccgtggcgcgcagggccgacgggaccgtggtccccggcaccgagctgcgcgtcggtgacctggtcgtgtgcgaggcgggcgacatcatccccggcgacggtgacgtcgtcgagggcgtggcgtccgtggacgagtcggcgatcaccggcgagtcggccccggtgatccgcgagtccggcggcgaccgctcggccgtcaccggcggtacgaaggtcctctccgaccgcatcgtcatcaagatcacgacaaagcccggcgagacattcatcgaccggatgatcgccctggtcgagggcgccgcacggcagaagacgcccaacgagatcgctctgaacatccttctcgcgtccctcacgatcgtcttcctgctcgcggtggccacgctgcccccgttcgccgactacgcgggtacgcacctcacgatggtcgtgctggtggccctgctggtctgcctgatcccgacgacgatcggcgccctgctctccgcgatcggtatcgcgggcatggaccggctggtgcagcgcaacgtcctggccatgtccggcagggcggtcgaggcggcgggcgacgtgtcgaccctgctcctcgacaagaccggaaccatcaccctcggcaaccgccaggcctccgagttcgtaccggtgaccggcaccaccgaggccgaggtcgcggacgccgcccagctctcctcgctggccgacgagacgcccgagggccgctccatcgtcgtactggcgaaggagacgtacgggctgcgcgagcgccaccagggcgagctctccggcgccgagtggatcgccttcaccgcccagacccggatgtcgggtgtggacatcgacgggcgcaagatccgcaagggcgcggccgggtcggtcatcgcctgggtgcgggaacagggcggggaggtgtccgaggacgccgacacgctggccaaccggatctccgaggcgggcggtacgccgctgctcgtggccgtcgaggacgccgacggtgcgcggatcctcggcgtcatccacctcaaggacgtggtcaaggagggcatgcgcgagcggttcgacgagctgcgccgcatgggcatcaagaccgtcatgatcacgggtgacaacccgctgacggccaaggcgatcgctgaggaggccggcgtcgacgacttcctcgcggaggcgactcccgaggacaagatggcgctcatcaaacgggagcagtcgggcggcaagctcgtcgcgatgaccggcgacggcacgaacgacgcgccggcgctggcccaggccgacgtgggtgtggccatgaacaccggtacctcggccgccaaggaggccgggaacatggtggacctggactccaaccccaccaagctcatcgagatcgtggagatcggcaagcagttgctgatcacccgtggcgcgctgacgacgttctcgatcgccaatgacgtggcgaagtacttcgcgatcatcccggcgctattcgcggtggtctatccgggcctggacaagctgaacatcatgcagctgtcctcgccggactccgcgatcctgtccgcggtcatcttcaacgcgctgatcatcatcgcactggtgccgctcgcgctgcggggtgtgcggtaccggccggtgagcgcggacaggatgctccgccgcaacctcgggatctacggtctcggcggcctcgtcgcgcccttcatcggcatcaagatcatcgacctgctcatctccctcatccccgggctgtaa

SEQ ID NO: 220 - protein, 694 aa, Streptomyces avermitilis MA-4680
MSTATPTRAPHSDVPTGHKDEGRVGAGLFDPKQLLKSLPDAFRKLDPRVMVKSPVMFVVLVGSVLTTVFSFKDPGDWFGWAISAWLWLTVIFANLAEAVAEGRGKAQADTLRRAKTDTVARRADGTVVPGTELRVGDLVVCEAGDIIPGDGDVVEGVASVDESAITGESAPVIRESGGDRSAVTGGTKVLSDRIVIKITTKPGETFIDRMIALVEGAARQKTPNEIALNILLASLTIVFLLAVATLPPFADYAGTHLTMVVLVALLVCLIPTTIGALLSAIGIAGMDRLVQRNVLAMSGRAVEAAGDVSTLLLDKTGTITLGNRQASEFVPVTGTTEAEVADAAQLSSLADETPEGRSIVVLAKETYGLRERHQGELSGAEWIAFTAQTRMSGVDIDGRKIRKGAAGSVIAWVREQGGEVSEDADTLANRISEAGGTPLLVAVEDADGARILGVIHLKDVVKEGMRERFDELRRMGIKTVMITGDNPLTAKAIAEEAGVDDFLAEATPEDKMALIKREQSGGKLVAMTGDGTNDAPALAQADVGVAMNTGTSAAKEAGNMVDLDSNPTKLIEIVEIGKQLLITRGALTTFSIANDVAKYFAIIPALFAVVYPGLDKLNIMQLSSPDSAILSAVIFNALIIIALVPLALRGVRYRPVSADRMLRRNLGIYGLGGLVAPFIGIKIIDLLISLIPGL

SEQ ID NO: 221 - DNA, 2166 bp, Bordetella pertussis Tohama I
  CDS (1)..(2166): transl_table=11
atggccaactcccctacccccctgtccgcccaggccggcctgccggctgcaagcccctccctgccggcggccacgccgcatcgcgcgttcggcctgtggtcgcgcgcgctggccggccccgccctgcgcgacaccctgcgcaaactgtcgccggccgcccagttgcgcaaccccgtcatgttcgtcgtctacgccggcagcatcctgaccaccctgttgtggctgctggccctggccggcctggccgaggcccccgcgggcttcatcctcgccgtcgcggccggcctctggttcaccgtgctgttcgccaacttcgccgaggcattggccgaggggcgcggcaggcagcaggccgccgccctgcgcggcttgcgcaccaccatcgaggcgcgggtgctgacaggctttcgcgatagcgacgccgccgcagcactgccgccgtactggcgctcgcgcgccacctcgcgcccctcgggcgcgctgcgcagggacgacgtggtcctgatcgaagcgggcgaaaccgtgccgggcgacgggcaggtgatcgccggcatcgcctcggtcgacaaaagcgccatcaccggcgaatcggcgccggtgatccgcgcggccggcagcgatttctgctcggtcaccggcggcacgcgcgtcctgtccgactggatcttcgtgcgcatcgcggccgaccctggcgacagcttcctcgaccgcatgatcgccatggtggaaagcgcccgccgccagaaaacccccaatgagctggcgctgaccatcctgctggtgggcctgacgctggtgttcctgctggtcgtggccagtctgctgccgttctcgatgtacgcggtgtccgcctcgggcgcggggcaggctgtgtcgatcaccgtgctggtggccctgctggtctgcctgatccccaccaccatcggcggcctgctgtcggccatcggcgtggcgggcatgagccgcatgatgcgggccaacgtcatcgccacctcggggcgcgcgatcgaggcggccggcgatgtcagcgtcctgctgctggacaagaccggcacgatcacgtttggtaatcgccaggccgcggccttcgtccccgcgccgggcgtatccccggcggtgctggccgaggccgcgcggctggcgtcgctggccgacgaaacgcccgagggccgcagcatcgtcgccctggccgagcgcatcctggacacccgcagcgaggcgcccgccggcgcgcgcttcgtgccgttctccgcccagtcgcgcatgagcggcgtggacctcgacggccgccttatccgcaagggagcggccgacgccctggcacgctggctgggcgaaggacagggcggcctgcccgccgccgtggcgcgcgacgtggacgacgtggcgcgccgcggcagcacgcccctggtggtcgccgaaggcgggcaggcgctgggcgtgatcgagctcaaggacatcgtcaagcccgggatccagccgcgctttgccgcgttgcgccgcatgggcatcaagacggtcatgatcaccggcgacaacgccctgaccgcggccgccatcgccgccgaggccggcgtggacgacttcctggccgaagccaccccgcaagccaagctggaactgatccgcgcctgccaggccgacggccatctggtggccatgacgggcgacggcaccaacgatgcgccggcgctggcccaggccgacgtggcggtcgccatgaactccggcacgcaggccgccaaggaggccggcaacatggtggacctggactccaaccccaccaagctgatcgaaatcgtcgaaatcggcaagcagatgctgatgacgcgcggcgcgctcaccaccttcagcgtcgccaacgacgtcgccaagtatttcgccattattcccgcggcattcatggcggtgtacccgcagctggcgcaactcaatgtgatgggcctggccacccccgcctcggccattctttcggccgtcattttcaacgccctgatcatcgtggccctgattccgctggcgctcaagggcgtgcgctaccgcccgctcggcgcggcggtgctgctgcgccgcaacctgctggtctatggactgggcgggctgctggcgccctttgccggcatcaaactgatcgacatggcgctggccgccctgggctggacctga

SEQ ID NO: 222 - protein, 721 aa, Bordetella pertussis Tohama I
MANSPTPLSAQAGLPAASPSLPAATPHRAFGLWSRALAGPALRDTLRKLSPAAQLRNPVMFVVYAGSILTTLLWLLALAGLAEAPAGFILAVAAGLWFTVLFANFAEALAEGRGRQQAAALRGLRTTIEARVLTGFRDSDAAAALPPYWRSRATSRPSGALRRDDVVLIEAGETVPGDGQVIAGIASVDKSAITGESAPVIRAAGSDFCSVTGGTRVLSDWIFVRIAADPGDSFLDRMIAMVESARRQKTPNELALTILLVGLTLVFLLVVASLLPFSMYAVSASGAGQAVSITVLVALLVCLIPTTIGGLLSAIGVAGMSRMMRANVIATSGRAIEAAGDVSVLLLDKTGTITFGNRQAAAFVPAPGVSPAVLAEAARLASLADETPEGRSIVALAERILDTRSEAPAGARFVPFSAQSRMSGVDLDGRLIRKGAADALARWLGEGQGGLPAAVARDVDDVARRGSTPLVVAEGGQALGVIELKDIVKPGIQPRFAALRRMGIKTVMITGDNALTAAAIAAEAGVDDFLAEATPQAKLELIRACQADGHLVAMTGDGTNDAPALAQADVAVAMNSGTQAAKEAGNMVDLDSNPTKLIEIVEIGKQMLMTRGALTTFSVANDVAKYFAIIPAAFMAVYPQLAQLNVMGLATPASAILSAVIFNALIIVALIPLALKGVRYRPLGAAVLLRRNLLVYGLGGLLAPFAGIKLIDMALAALGWT

SEQ ID NO: 223 - DNA, 2166 bp, Bordetella parapertussis 12822
  CDS (1)..(2166): transl_table=11
atggccaactcccctacccccctgtccgcccaggccggcctgccggctgcaagcccctccctgccggcggccacgccgcatcgcgcgttcggcctgtggtcgcgcgcgctggccggccccgccctgcgcgacaccctgcgcaaactgtcgccggccgcccagttgcgcaaccccgtcatgttcgtcgtctacgccggcagcatcctgaccaccctgttgtggctgctggccctggccggcctggccgaggcccccgcgggcttcatcctcgccgtcgcagccggcctctggttcaccgtgctgttcgccaacttcgccgaggcattggccgaggggcgcagcaggcagcaggccgccgccctgcgcggcttgcgcaccaccatcgaggcgcgggtgctgacaggctttcgcgatagcgacgccgccgcagcactgccgccgtactggcgctcgcgcgccacctcgcgcccctcgggcgcgctgcgcagggacgacgtggtcctgatcgaagcgggcgaaaccgtgccgggcgacgggcaggtgatcgccggcatcgcctcggtcgacgaaagcgccatcaccggcgaatcggcgccggtgatccgcgcggccggcagcgatttctgctcggtcaccggcggcacgcgcgtcctgtccgactggatcttcgtgcgcatcgcggccgaccctggcgacagcttcctcgaccgcatgatcgccatggtggaaagcgcccgccgccagaaaacccccaatgagctggcgctgaccatcctgctggtgggcctgacgctggtgttcctgctggtcgtggccagtctgctgccgttctcgatgtacgcggtgtccgcctcgggcgcggggcaggctgtgtcgatcaccgtgctggtggccctgctggtctgcctgatccccaccaccatcggcggcctgctgtcggccatcggcgtggcgggcatgagccgcatgatgcgggccaacgtcatcgccacctcggggcgcgcgatcgaggcggccggcgatgtcagcgtcctgctgctggacaagaccggcacgatcacgttcggcaatcgccaggccgcggccttcgtccccgcgccagggatatccccggcgatgctggccgaggccgcgcggctggcgtcgctggccgacgaaacgcccgagggccgcagcatcgtcgccctggccgagcgcatcctggacacccgcagcgaggcgcccgccggcgcgcgcttcgtgccgttctccgcccagtcgcgcatgagcggcgtggacctcgacggccgcctcatccgcaagggggcggccgacgccctggcacgctggctgggcgaaggacagggcggcctgcccgccgccgtggcgcgcgacgtggacgacgtggcgcgccgcggcagcacgcccctggtggtcgccgaaggcgggcaggcgctgggcgtgatcgagctcaaggacatcgtcaagcccgggatccagccgcgctttgccgcgttgcgccgcatgggcatcaagacggtcatgatcaccggcgacaacgccctgaccgcggccgccatcgccgccgaggccggcgtggacgacttcctggccgaagccaccccgcaagccaagctggaactgatccgcgcctgccaggccgacggccacctggtggccatgacgggcgacggcaccaacgatgcgccggcgctggcccaggccgacgtggcggtcgccatgaactccggcacgcaggccgccaaggaggccggcaacatggtggacctggactccaaccccaccaagctgatcgaaatcgtcgaaatcggcaagcagatgctgatgacgcgcggcgcgctcaccaccttcagcgtcgccaacgacgtcgccaagtacttcgccatcattcccgcggcattcatggcggtgtacccgcagctggcgcaactcaatgtgatgggcctggccacgcccgcctcggccattctttcggccgtcattttcaacgccctgatcatcgtggccctgattccgctggcgctcaagggcgtgcgctaccgcccgctcggcgcggcggtgctgctgcgccgcaacctgctggtctatgggctgggcgggctgctggcgccctttgccggcatcaaactgatcgacatggcgctggccgccctgggctggacctga

SEQ ID NO: 224 - protein, 721 aa, Bordetella parapertussis 12822
MANSPTPLSAQAGLPAASPSLPAATPHRAFGLWSRALAGPALRDTLRKLSPAAQLRNPVMFVVYAGSILTTLLWLLALAGLAEAPAGFILAVAAGLWFTVLFANFAEALAEGRSRQQAAALRGLRTTIEARVLTGFRDSDAAAALPPYWRSRATSRPSGALRRDDVVLIEAGETVPGDGQVIAGIASVDESAITGESAPVIRAAGSDFCSVTGGTRVLSDWIFVRIAADPGDSFLDRMIAMVESARRQKTPNELALTILLVGLTLVFLLVVASLLPFSMYAVSASGAGQAVSITVLVALLVCLIPTTIGGLLSAIGVAGMSRMMRANVIATSGRAIEAAGDVSVLLLDKTGTITFGNRQAAAFVPAPGISPAMLAEAARLASLADETPEGRSIVALAERILDTRSEAPAGARFVPFSAQSRMSGVDLDGRLIRKGAADALARWLGEGQGGLPAAVARDVDDVARRGSTPLVVAEGGQALGVIELKDIVKPGIQPRFAALRRMGIKTVMITGDNALTAAAIAAEAGVDDFLAEATPQAKLELIRACQADGHLVAMTGDGTNDAPALAQADVAVAMNSGTQAAKEAGNMVDLDSNPTKLIEIVEIGKQMLMTRGALTTFSVANDVAKYFAIIPAAFMAVYPQLAQLNVMGLATPASAILSAVIFNALIIVALIPLALKGVRYRPLGAAVLLRRNLLVYGLGGLLAPFAGIKLIDMALAALGWT

SEQ ID NO: 225 - DNA, 2166 bp, Bordetella bronchiseptica RB50
  CDS (1)..(2166): transl_table=11
atggccaactcccctacccccctgtccgcccaggccggcctgccggctgcaagcccctccctgccggcggccacgccgcatcgcgcgttcggcctgtggtcgcgcgcgctggccggccccgccctgcgcgacaccctgcgcaaactgtcgccggccgcccagttgcgcaaccccgtcatgttcgtcgtctacgccggcagcatcctgaccaccctgttgtggctgctggccctggccggcctggccgaggcccccgcgggcttcatcctcgccgtcgcggccggcctctggttcaccgtgctgttcgccaacttcgccgaggcattggccgaggggcgcggcaggcagcaggccgccgccctgcgcggcttgcgcaccaccatcgaggcgcgggtgctgacaggctttcgcgatagcgacgccgccgcagcgctgccgccgtactggcgctcgcgcgccacctcgcgcccctcgggcgcgctgcgcagggacgacgtggtcctgatcgaagcgggcgaaaccgtgccgggcgacgggcaggtgatcgccggcatcgcctcggtcgacgaaagcgccatcaccggcgaatcggcgccggtgatccgcgcggccggcagcgatttctgctcggtcaccggcggcacgcgcgtcctgtccgactggatcttcgtgcgcatcgcggccgaccctggcgacagcttcctcgaccgcatgatcgccatggtggaaagcgcccgccgccagaaaacccccaatgagctggcgctgaccatcctgctggtgggcctgacgctggtgttcctgctggtcgtggccagtctgctgccgttctcgatgtacgcggtgtccgcctcgggcgcggggcaggctgtgtcgatcaccgtgctggtggccctgctggtctgcctgatccccaccaccatcggcggcctgctgtcggccatcggcgtggcgggcatgagccgcatgatgcgggccaacgtcatcgccacctcggggcgcgcgatcgaggcggccggcgatgtcagcgtcctgctgctggacaagaccggcacgatcacgttcggcaatcgccaggccgcggccttcgtccccgcgccgggggtatccccggcggtgctggccgaggccgcgcggctggcgtcgctggccgacgaaacgcccgagggccgcagcatcgtcgccctggccgagcgcatcctggacacccgcagcgaggcgcccgccggcgcgcgcttcgtgccgttctccgcccagtcgcgcatgagcggcgtggacctcgacggccgccttatccgcaagggagcggccgacgccctggcacgctggctgggcgaaggacagggcggcctgcccgccgccgtggcgcgcgacgtggacgacgtggcgcgccgcggcagcacgcccctggtggtcgccgaaggcgggcaggcgctgggcgtgatcgagctcaaggacatcgtcaagcccgggatccagccgcgctttgccgcgttgcgccgcatgggcatcaagacggtcatgatcaccggcgacaacgccctgaccgcggccgccatcgccgccgaggccggcgtggacgacttcctggccgaagccaccccgcaagccaagctggaactgatccgcgcctgccaggccgacggccatctggtggccatgacgggcgacggcaccaacgatgcgccggcgctggcccaggccgacgtggcggtcgccatgaactccggcacgcaggccgccaaggaggccggcaacatggtggacctggactccaaccccaccaagctgatcgaaatcgtcgaaatcggcaagcagatgctgatgacgcgcggcgcgctcaccaccttcagcgtcgccaacgacgtcgccaagtacttcgccatcattcccgcggcattcatggcggtgtacccgcagctggcgcaactcaatgtgatgggcctggccacccccgcctcggccattctttcggccgtcattttcaacgccctgatcatcgtggccctgattccgctggcgctcaagggcgtgcgctaccgcccgctcggcgcggcggtgctgctgcgccgcaacctgctggtctatggactgggcgggctgctggcgccctttgccggcatcaaactgatcgacatggcgctggccgccctgggctggacctga

SEQ ID NO: 226 - protein, 721 aa, Bordetella bronchiseptica RB50
MANSPTPLSAQAGLPAASPSLPAATPHRAFGLWSRALAGPALRDTLRKLSPAAQLRNPVMFVVYAGSILTTLLWLLALAGLAEAPAGFILAVAAGLWFTVLFANFAEALAEGRGRQQAAALRGLRTTIEARVLTGFRDSDAAAALPPYWRSRATSRPSGALRRDDVVLIEAGETVPGDGQVIAGIASVDESAITGESAPVIRAAGSDFCSVTGGTRVLSDWIFVRIAADPGDSFLDRMIAMVESARRQKTPNELALTILLVGLTLVFLLVVASLLPFSMYAVSASGAGQAVSITVLVALLVCLIPTTIGGLLSAIGVAGMSRMMRANVIATSGRAIEAAGDVSVLLLDKTGTITFGNRQAAAFVPAPGVSPAVLAEAARLASLADETPEGRSIVALAERILDTRSEAPAGARFVPFSAQSRMSGVDLDGRLIRKGAADALARWLGEGQGGLPAAVARDVDDVARRGSTPLVVAEGGQALGVIELKDIVKPGIQPRFAALRRMGIKTVMITGDNALTAAAIAAEAGVDDFLAEATPQAKLELIRACQADGHLVAMTGDGTNDAPALAQADVAVAMNSGTQAAKEAGNMVDLDSNPTKLIEIVEIGKQMLMTRGALTTFSVANDVAKYFAIIPAAFMAVYPQLAQLNVMGLATPASAILSAVIFNALIIVALIPLALKGVRYRPLGAAVLLRRNLLVYGLGGLLAPFAGIKLIDMALAALGWT

SEQ ID NO: 227 - DNA, 2118 bp, Chromobacterium violaceum ATCC 12472
  CDS (1)..(2118): transl_table=11
atgaacgacaacaatcattccaaaccgctggcggcggcccccgacgccggccacaagagcgcgagcaagtcgctgctcgatccggcgctgatgaagcccgccatcgtcgactcgttcaggaagctgtcgccgcgcacccagtggcgcaatccggtgatgttcgtggtgtacgcaggcagcatcctgaccaccgcgctgtggatccagtcgctgggcggccacggagaggccccgtccggcttcatcctggccgtggcgctgtggctgtggttcaccgtgctgttcgccaacttcgccgaggcgctggccgagggccgcagcaaggcccaggccgccagcctgcgctccgccaagaagaacgtggtggccaagaagctggccggcggcaatcacggcgccgccaagagcatcgtcgacggcgccaccttgcgcaaaggggacttcgtgctggtggaggccggcgacgtgatcccggtggacggcgacgtggtggaaggcgtggcctcggtcgacgaatccgcgatcaccggcgaatccgcgccggtgatccgcgagtccggcggcgacttctcctccgtcaccggcggcacccgcgtgctgtccgactggatcgtggtcaagatcaccgccaacccgggcgaaaccttcctcgaccgcatgatcgcgatggtggaaggcgccaagcgccagaagacgccgaacgagatcgcgctgaccatcctcttggtggcgctgaccatcgtgttcctgatcgtcaccgtgaccctgctgccgttttcgctgttcagcgtggacgcggccaaagccggcacgccgatcagcatcaccaccctggtggcgctgctggtctgcctgattccgaccaccatcggcggcctcttgtccgccatcggcgtggccggcatgagccggatgatgggcgccaacgtgatcgccacctccggccgcgcggtggaagccgccggagacgtcgacgtgctgctgctggacaagaccggcaccatcacgctgggcaaccgccaggcatcggctttcatcccggccccgggcgtatcggagaaagacctggccgacgccgcccagctggcgtccttggccgacgaaacgccggaaggccgcagcgtggtggtgctggccaagcagaaattcaacctgcgcgaacgccagctggccagccacgaggccgtgttcatcccgttcaccgcgcagacccggatgtccggcatcgactacgacggccgccagatccgcaagggcgccatcgacgccatccgccgccacatcgcggaacaaggcggccagttcccggacgcgctggcgaaaagcgccgaggacgtggcgcgccgcggctccaccccgctgctggtggccgaaggcgaccgcgcgctgggcgtgatcgagctgaaggacatcgtcaagggcggcatcaaggaacgtttcgccgagctgcgccagatgggcatcaagacggtgatgatcaccggcgacaacccgctcaccgccgccgccatcgccgccgaggccggcgtggacgactacctggccgaagccacgccggaagccaagctcaagctgatccgcagccaccaggccgaaggcaagctggtggcgatgaccggcgacggcaccaacgacgcgccggcgctggcccaggccgacgtggcggtggcgatgaacaccggcacccaggcggccaaggaagccggcaatatggtggatctagactccaatcccaccaagctgatcgagatcgtcgaaatcggcaagcagatgctgatgacgcggggctcgctgaccaccttctccatcgccaacgatgtggccaagtacttcgccatcatcccggcggcgttcgccagcacctatccgcagctgaacgcgctgaacgtgatgggcctgaacagcccggcctcggccatcatgtcggcggtgatcttcaacgccgtcatcatcgtggcgctgattccgctggcgctgaaaggcgtgaaataccatgccagaagcgcggccgagctgctgcgcggcaacctgctggtctacggcctgggcggcctgttggtgcccttcgccggcatcaagctgatcgacatgctgctgggcgcgatgggcctggtgtaa

SEQ ID NO: 228 - protein, 705 aa, Chromobacterium violaceum ATCC 12472
MNDNNHSKPLAAAPDAGHKSASKSLLDPALMKPAIVDSFRKLSPRTQWRNPVMFVVYAGSILTTALWIQSLGGHGEAPSGFILAVALWLWFTVLFANFAEALAEGRSKAQAASLRSAKKNVVAKKLAGGNHGAAKSIVDGATLRKGDFVLVEAGDVIPVDGDVVEGVASVDESAITGESAPVIRESGGDFSSVTGGTRVLSDWIVVKITANPGETFLDRMIAMVEGAKRQKTPNEIALTILLVALTIVFLIVTVTLLPFSLFSVDAAKAGTPISITTLVALLVCLIPTTIGGLLSAIGVAGMSRMMGANVIATSGRAVEAAGDVDVLLLDKTGTITLGNRQASAFIPAPGVSEKDLADAAQLASLADETPEGRSVVVLAKQKFNLRERQLASHEAVFIPFTAQTRMSGIDYDGRQIRKGAIDAIRRHIAEQGGQFPDALAKSAEDVARRGSTPLLVAEGDRALGVIELKDIVKGGIKERFAELRQMGIKTVMITGDNPLTAAAIAAEAGVDDYLAEATPEAKLKLIRSHQAEGKLVAMTGDGTNDAPALAQADVAVAMNTGTQAAKEAGNMVDLDSNPTKLIEIVEIGKQMLMTRGSLTTFSIANDVAKYFAIIPAAFASTYPQLNALNVMGLNSPASAIMSAVIFNAVIIVALIPLALKGVKYHARSAAELLRGNLLVYGLGGLLVPFAGIKLIDMLLGAMGLV

SEQ ID NO: 229 - DNA, 2085 bp, Gloeobacter violaceus PCC 7421
  CDS (1)..(2085): transl_table=11
atgcaactcaaaaacaaacctgtccgcgataccgccgccgcctcgccggatctgcgccgccgcaaaatcgacaattcgggcatcttccagcgggccgtcgtcgagtcgtttgtcaagctcaacccgctcaccctctacaagaacccggtgatgttcgtggtgctggtgggcacgctggtcaccctggccctcaccttcgagccaagtctgttcggcgagcagccggagggtacccgcgtgctcaacgggctgatcaccgccatcttgtttgtgacggtgctctttgggaactttgccgaggcggtcgccgagggacggggcagggcgcaggccgccgccctgcgcagcactaagcaggccacccgcgcccggcgcgtgctggcggacggccgtaccgaggaggtggacgctgcgcaactgcgcaaaggcgacatcgtccaggtggtggcgggcgacttgatccccgccgacggcgaggtggtcgaaggggtggcctcggtggacgaatcggcgatcacaggcgaatcggccccggtgatcaaagaacccggctcggatgtggcgagcaccgtcaccggcggcacccgcatcctctcggattcgctggtgctgcgcatcggctcgaaccccggcgagggcttcatcgaccggatgattgccctgatcgaaggtgcaaagcggcagaaaactcccaacgaaatcgccctcacagtattgctggccgtcctcaccctcatctttttgattgtcgtggccacactgcctccgattgccgccttcgtcggcgcgccggtgagcattgcacttttggtctcgctcctggtcgccttgatccccaccaccatcggcggtctgctctcggccatcggcatcgccgggatggaccgggtggcacagttcaacgtgatcgccaccagcggcaaggccgtggaggcggccggggatgtcggcacgcttattctcgacaagaccggtaccatcaccctgggcaaccgcctggccgacgaatttatcccggtgggcggctatagcgttcgggaagtggctaccgccgcctgggccgcctcggtattcgacaccaccccggagggcaagtcggtggtgaagctggccgcgagccagggagcggcggccggttacgatccggagggggcgacgggcatcgaatttacggcccagacgcgcatgagcggcaccgattttgccgacggccgcgccgtgcgcaagggggccgtcgatgccatcaagcgctacgtacaggcggacggcggccagattcccgcagatctcgacgcggccaccgagcgcatttcccggctggggggcacgccgctcgccgtctgcgcgggcaacatcgtctacggagtcatctacctcaaggacatcgtcaagcccggcatgcgcgagcgcttcgagcaactgcgccgcatgggcatcaagaccgtcatgctcaccggcgacaaccggatcaccgcctcggtaatcgccgccgaggccggggtggacgattttatcgccgaggcgacccccgaggacaaaatccgggtgatccgcgagaatcaggcgcagggcaaactcgtcgccatgaccggcgacggcaccaacgacgcaccggccctcgcccaggcggacgtgggcgtcgccatgaactcgggcacccaggccgccaaggaagcggcgaacatggtggaccttgactcggaccccaccaagctcatcgacgtggtgaccatcggcaagcagctgttgattacccgcggggcgctcacgaccttcagcatcgccaacgacgtcgccaagtacttcgcaatcatcccggcgatgttcagcgcggcgggcatcggcgttctcaacgtcatggccctcaccagcccgacctcggccatcctctcggcactcgtcttcaacgctctgatcattccggcgctcattcccctggcccttcggggcgtccagtttcaaccgctcagcgccgatcagctgctcacccgcaatatgctcatctacggcctgggcgggctggtggtgccctttatcggcatcaagctcatcgacgtcgtcatcaccgccgtcgggctcgcttaa

SEQ ID NO: 230 - protein, 694 aa, Gloeobacter violaceus PCC 7421
MQLKNKPVRDTAAASPDLRRRKIDNSGIFQRAVVESFVKLNPLTLYKNPVMFVVLVGTLVTLALTFEPSLFGEQPEGTRVLNGLITAILFVTVLFGNFAEAVAEGRGRAQAAALRSTKQATRARRVLADGRTEEVDAAQLRKGDIVQVVAGDLIPADGEVVEGVASVDESAITGESAPVIKEPGSDVASTVTGGTRILSDSLVLRIGSNPGEGFIDRMIALIEGAKRQKTPNEIALTVLLAVLTLIFLIVVATLPPIAAFVGAPVSIALLVSLLVALIPTTIGGLLSAIGIAGMDRVAQFNVIATSGKAVEAAGDVGTLILDKTGTITLGNRLADEFIPVGGYSVREVATAAWAASVFDTTPEGKSVVKLAASQGAAAGYDPEGATGIEFTAQTRMSGTDFADGRAVRKGAVDAIKRYVQADGGQIPADLDAATERISRLGGTPLAVCAGNIVYGVIYLKDIVKPGMRERFEQLRRMGIKTVMLTGDNRITASVIAAEAGVDDFIAEATPEDKIRVIRENQAQGKLVAMTGDGTNDAPALAQADVGVAMNSGTQAAKEAANMVDLDSDPTKLIDVVTIGKQLLITRGALTTFSIANDVAKYFAIIPAMFSAAGIGVLNVMALTSPTSAILSALVFNALIIPALIPLALRGVQFQPLSADQLLTRNMLIYGLGGLVVPFIGIKLIDVVITAVGLA

SEQ ID NO: 231 - DNA, 2067 bp, Photorhabdus luminescens subsp. laumondii TTO1
  CDS (1)..(2067): transl_table=11
atgaccaacaaacaacaaacattattcgaacccgttttgattcgtaatgccctgatggattcagtcaaaaaatgtcatcctgctgcacaatggcgcaacccagtgatgtttgtcgtctatctaggcagtggattaactaccattttatggattgccatgttagcgggtcaatttaagggaaatgctttgttcaccggtaacattgccttatggctatggtttaccgtgctattcgctaactttgccgaagcgctggcagaaggcagaagcaaagctcaggcggccagccttaaaggggtaagaaaaaccagttgggcaactaaactacactcagccaatcgtaatggttccagagagaaagccccttctgacagcctacgcaaaggggatatcgtcattattgaagccggtgaaaccatcccttgcgatggtgaagttatcgaaggtggcgcttctgttgacgaaagtgccatcaccggagaatctgcccccgttattcgcgaatctggcggtgatttttcctctgtgaccggcggcacccatgtactatctgactggctggtggtcgaatgttcagttaatcccggtgaaacgtttcttgaccgcatgatttcaatggtggaaggggctaaacgtcgtaaaaccccaaacgagatcgcactgactatcctgttgacagcgctgacaattatctttctattggtgtgtgtcactctgctgccattttcaatattcagcgtggagattaaccattctggccaacctatcactgtcacggtattgatagcgttattagtctgtcttattcctaccactattggcggtttactttctgccattggtgtcgcaggcatgagccgcatgctaagtgcgaatgttattgccaccagcggacgcgccgttgaagccgcgggtgatgtggatgtgctgctactggataaaaccggcaccatcactttgggaaatcgccaagcctctcagtttctgcccgtgcctggcataacagaacagcggctggcagatgccgcccaactctcttctttagccgatgaaacaccagaaggccgcagcattgtcattctggcaaaacagcgattcaatctgcgtgaacgtgatctgcgctcactgaacgcaacttttgtgcctttctctgccatgactcgaatgagtggtgttaatgtggaaaaccgcatgatccgcaaaggcgctgtcgatgcaatccgccgccatattgaagccaatcacggaaaattccctgaagccgtggaaattttggtacagaccgtggcgcggaaaggcggtactccgctggttgtcgcagaaaatcaacaggtactgggcgttgtcgcgctaaaagatatcgtcaaaggcggcattaaagagcgattcagtgaaatgcgccgtatgggaatcaaaaccgttatgattaccggcgataatcgtctaaccgcggctgcgattgccgcagaagctggagttgatgactttctggcggaagctacccccgaagccaaactagccctgatccgccaatatcaatccgaaggccgtctggttgccatgacaggtgatggcactaatgatgcccctgctcttgctcaagccgatgttgccgttgctatgaattcaggcactcaagcagccaaagaagccggcaatatggtggatctggattccaacccaaccaaactgattgaagttgtccatattggtaaacagatgttgatgacacgcggctctctgaccacattcagtatcgccaatgatatcgcaaaatattttgccattatccccgcggcatttgccgtcacttacccacaattaaatatcttgaatatcatgcacctgcactcgcctacttcggcggttttatcgaccgttatctttaatgcactgattattgttttcttgatcccgctagcgctaaaaggcgtgagctaccgcccaatgaatgcatcagcgcttttacgccgcaacctgtggatttatggtctgggtggtctgatagcgcctttcatcggcatcaaactgatagatctgttgctgactttgctgatacttaaataa

SEQ ID NO: 232 - protein, 688 aa, Photorhabdus luminescens subsp. laumondii TTO1
MTNKQQTLFEPVLIRNALMDSVKKCHPAAQWRNPVMFVVYLGSGLTTILWIAMLAGQFKGNALFTGNIALWLWFTVLFANFAEALAEGRSKAQAASLKGVRKTSWATKLHSANRNGSREKAPSDSLRKGDIVIIEAGETIPCDGEVIEGGASVDESAITGESAPVIRESGGDFSSVTGGTHVLSDWLVVECSVNPGETFLDRMISMVEGAKRRKTPNEIALTILLTALTIIFLLVCVTLLPFSIFSVEINHSGQPITVTVLIALLVCLIPTTIGGLLSAIGVAGMSRMLSANVIATSGRAVEAAGDVDVLLLDKTGTITLGNRQASQFLPVPGITEQRLADAAQLSSLADETPEGRSIVILAKQRFNLRERDLRSLNATFVPFSAMTRMSGVNVENRMIRKGAVDAIRRHIEANHGKFPEAVEILVQTVARKGGTPLVVAENQQVLGVVALKDIVKGGIKERFSEMRRMGIKTVMITGDNRLTAAAIAAEAGVDDFLAEATPEAKLALIRQYQSEGRLVAMTGDGTNDAPALAQADVAVAMNSGTQAAKEAGNMVDLDSNPTKLIEVVHIGKQMLMTRGSLTTFSIANDIAKYFAIIPAAFAVTYPQLNILNIMHLHSPTSAVLSTVIFNALIIVFLIPLALKGVSYRPMNASALLRRNLWIYGLGGLIAPFIGIKLIDLLLTLLILK

SEQ ID NO: 233 - DNA, 2130 bp, Rhodopseudomonas palustris CGA009
  CDS (1)..(2130): transl_table=11
gtgactgcgatggatgcggttcaaatcaagacacgcggcaagtcgtcgaccttgctcgatccgaagatcgtgttgccggcgatcggcacgtcgttcgccaagctcgatcctcgggtgatgatcaaaaacccggtgatgttcgtggtggaagtggtcgctgcgctgaccacggtactgttcgtgcgcgacctcgtcaccggcagcgcggatctgtggttcaccgggcagatcatcctgtggctgtggttcacggtactgttcgccaacttcgcggaggcggtcgccgaagggcgcggcaaggcgcaggccaatacgctacgcgagacccgcgtcggcactgtcgccaagcggctgctgatgccgggcaacaccgagctgtatgaaggcgtcgcggccgagcacctttctgtcggcgatctggtcctggtcgaagccggagacgtgatccctggcgacggcgaggtggtggaaggcgtggcctcggtcaacgaggcggccatcaccggcgagtccgcgccggtgatccgcgagtccggcggcgaccgatcggcggtgaccggcggcaccacggtgatttccgatcgcattgtggtgcggatcaccgcggaagtcggccattcgttcctcgaccgcatgatcaagctggtcgaaggcgcggaacggcagaagaccccgaatgagatcgcgctgaacattctgctcgccggcctcaccatcatcttcgtgttcgccaccgtgacgatcccgagctttgctgcttatgcgggcgggcagatctccgtggtgatcctggtggcgctgttcgtcacgctgatcccgaccacgatcggtgcgttgctgtcggcgatcggcatcgccggcatggaccggctggtacgcttcaacgtgctggcgatgtcgggccgtgccgtcgaggccgccggtgacgtcgacacgctgctgctcgacaaaaccggcaccatcacgctcggcaatcgccaggcgaccgcgttccgtccggtgcggggcgtcagcgagcgcgatcttgccgatgctgcgcagatggcgtctcttgccgacgaaacgccggaaggccggtcgatcgtggtgctggctaaggagaagcacggcatccgcggtcgtgatctggccgagctcggcgctcacttcattccgttcaccgcgcagacccggatgagcggcgtcgacatcggcggatcgtcgatccgcaagggcgcggtcgactcgatcctggcctctgtctcggccgtccccggcgtagcttcgatccagggcaacgtcgcgcgcgcgatcgagggggccgcgaacgtggagggcgctcgcgaactggtggcgatcgccgacgagattgccaaggcgggtggtacgccgcttgcggtggcccgcgatggcaagctgctcggcgtgatccagctcaaggacatcgtcaagggcggcatccgcgagcgcttcgccgaactgcgacggatgggcatccgcacggtgatgatcaccggcgacaatccgatgaccgcggcggcgatcgctgctgaagccggcgtcgacgatttcctcgctcaggcgacaccggaagacaagctcaggctgatccgcgacgagcaggcgaagggcaagcttgtggcgatgtgcggcgacggcaccaacgacgccccggcgctggcacaggctgatgttggtgtggcgatgaattccggcacccaggcagcgcgcgaggccggcaacatggtcgacctcgactccaatccgaccaagctgatcgaggttgtcgagatcggcaaacagctgctgatgacgcgcggcgcgctgaccacattctcgatcgccaacgacgtcgccaagtatttcgccattatcccggcgatgttcctggcgttctatccgcagctcggcgtgttgaacgtcatgcacctcgccagcccgcagagcgcgatcctgtcggcgatcatcttcaacgcgctgatcatcatcgcgctgatcccgctggcgctgaagggcgtctcgtatcggccggtcggagccgcggcgctgctgcggcggaatctgctggtctacggcctcggcggcatcctggtgcccttcatcggcatcaaggtgatcgaccttgctgtctcggccctgcatttggtgtga

SEQ ID NO: 234 - protein, 709 aa, Rhodopseudomonas palustris CGA009
MTAMDAVQIKTRGKSSTLLDPKIVLPAIGTSFAKLDPRVMIKNPVMFVVEVVAALTTVLFVRDLVTGSADLWFTGQIILWLWFTVLFANFAEAVAEGRGKAQANTLRETRVGTVAKRLLMPGNTELYEGVAAEHLSVGDLVLVEAGDVIPGDGEVVEGVASVNEAAITGESAPVIRESGGDRSAVTGGTTVISDRIVVRITAEVGHSFLDRMIKLVEGAERQKTPNEIALNILLAGLTIIFVFATVTIPSFAAYAGGQISVVILVALFVTLIPTTIGALLSAIGIAGMDRLVRFNVLAMSGRAVEAAGDVDTLLLDKTGTITLGNRQATAFRPVRGVSERDLADAAQMASLADETPEGRSIVVLAKEKHGIRGRDLAELGAHFIPFTAQTRMSGVDIGGSSIRKGAVDSILASVSAVPGVASIQGNVARAIEGAANVEGARELVAIADEIAKAGGTPLAVARDGKLLGVIQLKDIVKGGIRERFAELRRMGIRTVMITGDNPMTAAAIAAEAGVDDFLAQATPEDKLRLIRDEQAKGKLVAMCGDGTNDAPALAQADVGVAMNSGTQAAREAGNMVDLDSNPTKLIEVVEIGKQLLMTRGALTTFSIANDVAKYFAIIPAMFLAFYPQLGVLNVMHLASPQSAILSAIIFNALIIIALIPLALKGVSYRPVGAAALLRRNLLVYGLGGILVPFIGIKVIDLAVSALHLV

SEQ ID NO: 235 - DNA, 2037 bp, Desulfovibrio vulgaris subsp. vulgaris str. Hildenborough
  CDS (1)..(2037): transl_table=11
atgcacaccgcaaacaacacttcgacaccttctgccctctaccggcgcgcatgcatcgacgccatcggcaagctacgcccgaatcatatggtacgtaatccggtcatgttcaccgttgccgtcggcgccctgctaaccactgtcgccttcgtccgcgacatgatggccggttccggcgtcctgttcagcgcgcagattacgttatggctatgggctaccgtcctgttcgccaacttcgccgaggcactggcagaagggcgaggcaaggcacaggcagacagcctgcgccatgcccgccgtgacaccccggcgcatcaggtgcaacccgacggcacggtgcaggtggtatctgcctcgaccctgcaacgcggcgatgaggtcgtcgtcgcagcgggcatggtcattcccgccgacggcaccgtgatcgccggggctgccgccgtggacgagtcggccgtcaccggagagtcggcacctgtcatccgtgagtcgggcggcgacagaagcgccgtcaccggcggtacgacggtcatctccgacaccctgcgcatcaaggtcacacaggaaccgggaaagtcgttcctcgaccggatgatagcccttgtcgaaggggccgagcgtaagaagacgcccaacgagatagccctgaacatccttcttgcgggtctcacgctcatcttcatcctcgccacggtgaccctcaagcccatggccctgttccacggtgcgcgggtggacgtggtggttctcgccgccttgctggtgtgtctcatccccaccaccatcggagggctgctggcggcgatcggcatcgccggcatggacaggctgctgcgtcgcaacgtgctggcgatgtccggtcgtgccgtcgaggccgcaggagacgtggacgtgctgttgctggacaagacggggacgataaccctcggcaaccgcatggccaccgcattcatccccatgccgggcatctctcccgaacacctgtgcaaggccgccctgcttgcatcccacggtgacgagactcctgaaggtcgttccatcgtcacccttgcccggactgaactcggcacgggtctccccgcgatgcccgacaacgccacgttcatccccttccgggcggagacccgcatgagcggcagcgactacaccgggacgtccatccgcaagggcgcagccgatgccgtgaaagcgtggttgcggggactggggaggcacatggacgagacgacactcgacaccgtggtgctggatatcgcggcacaaggcgggacgccgctcgtcgtcgcatccgacaccgagggggtgctgggggtcatccacctgaaggacatggtcaagccgggcataagcgacaggttcgaacgcatccgcgccatgggcatccgcaccgtcatggtcaccggcgacaacaggctcaccgcccgctccatcgcggctgaagccggtgtggacgactttctcgcggaggcgaaaccggaggacaagctcgacctcatcgtgcgcctgcaaaaggaaggaagactggtcgccatgtcgggtgacggaacgaacgacgccccggcactggcacagtcggacgtggggttggtcatgaacaccggcactcaggctgcgcgtgaggccgggaacatgatcgacctcgattccgaccccaccaagctcatcgagatcgtcgaaatcggcaagcagctgctcatcacgcggggggcgctcacgaccttcagcgtcgccaacgacatcgcgaagtacttcgccatcatcccggccatcttcgtggcttcgctgccacagcttgcggccctgaatgtcatgggactctccagcccccggagtgccgtcctctctgcggtcatcttcaatgcgctgatcatcgtcgcgctcatccccctcgccttgcgtggcgcgcactaccgcccgcgttccacgggcgccaccctgcggcgcaatctgctcgtgtacgggctgggcgggcttgtcgccccgttcgtgggcatcaaggccatcgacatccttcttaccgccctcggcctcgcatag

SEQ ID NO: 236 - protein, 678 aa, Desulfovibrio vulgaris subsp. vulgaris str. Hildenborough
MHTANNTSTPSALYRRACIDAIGKLRPNHMVRNPVMFTVAVGALLTTVAFVRDMMAGSGVLFSAQITLWLWATVLFANFAEALAEGRGKAQADSLRHARRDTPAHQVQPDGTVQVVSASTLQRGDEVVVAAGMVIPADGTVIAGAAAVDESAVTGESAPVIRESGGDRSAVTGGTTVISDTLRIKVTQEPGKSFLDRMIALVEGAERKKTPNEIALNILLAGLTLIFILATVTLKPMALFHGARVDVVVLAALLVCLIPTTIGGLLAAIGIAGMDRLLRRNVLAMSGRAVEAAGDVDVLLLDKTGTITLGNRMATAFIPMPGISPEHLCKAALLASHGDETPEGRSIVTLARTELGTGLPAMPDNATFIPFRAETRMSGSDYTGTSIRKGAADAVKAWLRGLGRHMDETTLDTVVLDIAAQGGTPLVVASDTEGVLGVIHLKDMVKPGISDRFERIRAMGIRTVMVTGDNRLTARSIAAEAGVDDFLAEAKPEDKLDLIVRLQKEGRLVAMSGDGTNDAPALAQSDVGLVMNTGTQAAREAGNMIDLDSDPTKLIEIVEIGKQLLITRGALTTFSVANDIAKYFAIIPAIFVASLPQLAALNVMGLSSPRSAVLSAVIFNALIIVALIPLALRGAHYRPRSTGATLRRNLLVYGLGGLVAPFVGIKAIDILLTALGLA

SEQ ID NO: 237 - DNA, 2145 bp, Erwinia carotovora subsp. atroseptica SCRI1043
  CDS (1)..(2145): transl_table=11
atgactcgtcacacgatggatcatcaggccacacaggaaccgacctcatctcaacagggtgaggcctcccgccacgttggcaaacataaacagcaaacgctgtttgacagaacgttaatccgctcagcgctgaaagatgcgctgaagaaactcgacccgcgcgtgcagtggcgcaacccagtcatgtttgtggtgtacctcggcagtatgctgaccactctcgtttggctggctattctggttggtaaaacagaaggcaacgccatgtttactgggctggtatcactctggttatggtttaccgtgctgtttgccaacatggccgaagcgctggcagaaggtcgcagcaaagcgcaggcaaatgcgttgaaaggcgtaaagaaaaccagttgggcgaacaaactctcggcaccgaatcacgatgccagttcggaatcggttccggccgacagcctgcgtaaaggcgatatcgtactggtgagcgcgggtgaaaccatcccgtgcgacggcgaagtgctggaaggcggcgcatctgtcgatgaaagcgccattaccggggaatccgcacctgtaatccgtgagtccggtggtgatttcgcttccgtcactggcggcacacgcgtgctgtccgactggctggtgattcagtgcagcgtcaaccccggcgaaaccttcctcgatcgaatgatcgccatggttgaaggggcgcagcgtcgtaaaacgccaaacgaaatcgcactaaccatcctgttgatcgagttaacgctcatcttcctattagtgacggccacgctctacccgttttcatggtttggtgtacaggcgaataacagcggcgatgtcgtcggcgtgacggtacttgtcgccctgcttgtctgtctgattccgaccactatcggtggcctgctatcggcaatcggcgtggcggggatgagtcggatgttgggagctaatgtcattgccaccagcggtcgcgcggtcgaagcggcaggcgatatcgatgttctgctgctggataaaactggcaccattacgttgggtaaccgtcaggcttcggctttcctgcctgcgccgggcgtcaccgagcaggcgctggctgacgccgcgcgtctcgcgtctttagccgatgaaacgcccgaaggccgcagtatcgtggtgctggcaaagcagcgctttaacctagcggaacaggacttacgttcgctggacgcgacctttgttccctttaccgcccagacgcgtatgagcggtgtcaatttcggccaacgtaccattcgtaaaggcgctgttgatgccctgcgtcgctacattgaagcgaacaatggcgattttccgcatcaggtcgaggaagcggtatccaacgttgcacgcagcggaggaacgccgctggtcgttgcagaaggcaaacgcgtgcttggcgtagtggaactgaaagatatcgtgaaaagcggtatcaaagcacgcttcgccgaactgcgcagcatggggatcaaaaccgtgatgatcaccggcgacaacccgctcacggcagcagccattgccgcagaagcgggcgtcgatgattttctggcagaagccacaccggaaaccaagctggcgttgattcgccagtatcaggccgaaggtcggctggtggcaatgactggcgacggcaccaatgatgctcccgcactggcgcaggccgacgtggcggttgccatgaactccggtacgcaagcagcgaaagaagcgggcaacatggtcgatctggattccaacccgaccaagctgattgaagtggtgcatatcggcaaacagatgctgatgacgcgcggctcgctgacgacgttcagtatcgccaacgacgtggcgaaatacttcgccattatcccagccgcctttgctgccacctatccgcagctcaatgcgctaaacgtgatgcagttgcactcccccacgtcggccatgctgtcggcggtgatcttcaatgcgttgattatcgtgtttctgatcccgctggcgcttaaagggattagctatcgacccatgagtgcggcggcacagctaagccgcaatctgtggatttatggtcttggcgggctgctggtgccgttcctcggtatcaagctcattgatatgttactgaccgggctgaatctggcttaa

SEQ ID NO: 238 - protein, 714 aa, Erwinia carotovora subsp. atroseptica SCRI1043
MTRHTMDHQATQEPTSSQQGEASRHVGKHKQQTLFDRTLIRSALKDALKKLDPRVQWRNPVMFVVYLGSMLTTLVWLAILVGKTEGNAMFTGLVSLWLWFTVLFANMAEALAEGRSKAQANALKGVKKTSWANKLSAPNHDASSESVPADSLRKGDIVLVSAGETIPCDGEVLEGGASVDESAITGESAPVIRESGGDFASVTGGTRVLSDWLVIQCSVNPGETFLDRMIAMVEGAQRRKTPNEIALTILLIELTLIFLLVTATLYPFSWFGVQANNSGDVVGVTVLVALLVCLIPTTIGGLLSAIGVAGMSRMLGANVIATSGRAVEAAGDIDVLLLDKTGTITLGNRQASAFLPAPGVTEQALADAARLASLADETPEGRSIVVLAKQRFNLAEQDLRSLDATFVPFTAQTRMSGVNFGQRTIRKGAVDALRRYIEANNGDFPHQVEEAVSNVARSGGTPLVVAEGKRVLGVVELKDIVKSGIKARFAELRSMGIKTVMITGDNPLTAAAIAAEAGVDDFLAEATPETKLALIRQYQAEGRLVAMTGDGTNDAPALAQADVAVAMNSGTQAAKEAGNMVDLDSNPTKLIEVVHIGKQMLMTRGSLTTFSIANDVAKYFAIIPAAFAATYPQLNALNVMQLHSPTSAMLSAVIFNALIIVFLIPLALKGISYRPMSAAAQLSRNLWIYGLGGLLVPFLGIKLIDMLLTGLNLA

SEQ ID NO: 239 - DNA, 2115 bp, Propionibacterium acnes KPA171202
  CDS (1)..(2115): transl_table=11
atgaccgtcatcccttcgaattcgcgttcccgcggtctcaccgggactcaggcgcgtcaggccctgcccggagcccttcgtaagcttgatccgcgttttcagtggcgcaacccggttatgtttttggtgtggattggcgcagtcctgacaaccatcatcgctggcctggaactgctcactggtgtcaccgacggcggtgtttccgtcggtttttccatggccattgcggtgtggctgtggctgaccgtcatcttcgccaaccttgccgagtcgatcgctgagggtcgcggcaaggcccaggccgagtcattgcgcaagacccgcaccgccaccagcgcgattcgcgtcgacgggtgggacgagcggaacgatccgtccgccgagcacaccacgacaaccgaggtcgtctcctcggagctcaggtatggcgacgtcgtcgtcgtggcggcgggccagacgatccctggtgacggcgacatcgtctggggcatcgcttcggtcgacgaatcggccatcaccggtgagtcagcccccgtggtacgggagtccggcggcgaccgttctgccgtcaccggtggtacgacagtgctttcggaccgtatcgtcgtcaaaatcacctcgaagcccgggcaaagtttcgtcgaccgcatgatcgccctggttgaggggtccggacgtcagaagaccctcaacgagattgccctcaatattttgctggcgagcctctcgattgtctttgtcctcgtcaccctgaccctcaacccgattgcgtccctggccgccaggccggtgagcgtcacggtattggtggcgctgctggtctgcctcgtcccgacgacgatcggtgctctgctgtcggccatcggcatcgcgggtatggaccgcctggtgcagcacaacgtgttggcaatgtccggacgcgcggtggaggccgctggcgacgttacgactcttctgctcgacaagactggcaccatcacctacggaaaccgtcgtgccagcgaattcataccgatgccgggtgtgagcgacaaagagattcgcgacgcggccgcccggtcttcgctggccgaccccactcccgagggcacctccatcgtcgacctggcccgcgagcagggcttcgtccccgatgcctgcggcgaacaggggaaagtcgtcccctttaccgctcagaccagaatgtcgggcatcgaccttcccgacggcaccaaaatccgtaagggtgccggatctgctgtacgcgcctggctgacggagtcccacatcaatatggacatcgacacgctggcgcacatggatcgccgggtcgactcggtgtcccagtccggtggtactccgctcgtcgtggcggtacgcacccccgaccactcgggcaaggtgctcggcgtcgttcacctcaaggacatcgtcaaggagggtctaaccgaccggtttgctgagctgcgtcgaatgggcatccgcactgtcatggtgaccggagacaacccgctgaccgcagccgccattgccaaggaggctggcgtggacgatttcctcgccgaggccaccccggaggacaagctcgcctacatccgcaaggagcaggagggtggccggatggtcgcgatgaccggtgacggcaccaacgatgccccggctctggcccaggcggacgtcggcgtcgcgatgaacaccggcacctcggctgctaaggaggccggcaacatggtggaccttgactccgacccgacgaagctcatcagcattgtcggaatcggcaagcaactactcatcacgcgcggtgccctgacgaccttctcgatcgccaacgatattgccaagtatttcgcgatcatcccagcgatcttcatggcgacctacccgggtctgtcggccctcaatattatgggtttgcattccccagcgtcggcggtgctctcggcgatcatctttaacgccatcatcatcgttattttggttccgctggccctcaaaggcgtggcatacaagcccgccggggcgtcgaaaatcctcgcacggaacctgcgcatctacgggttgggcggtgttgttgcgccgttcatcggcatctggcttatcgacctgattatccgtctcattcccggcttctga

SEQ ID NO: 240 - protein, 704 aa, Propionibacterium acnes KPA171202
MTVIPSNSRSRGLTGTQARQALPGALRKLDPRFQWRNPVMFLVWIGAVLTTIIAGLELLTGVTDGGVSVGFSMAIAVWLWLTVIFANLAESIAEGRGKAQAESLRKTRTATSAIRVDGWDERNDPSAEHTTTTEVVSSELRYGDVVVVAAGQTIPGDGDIVWGIASVDESAITGESAPVVRESGGDRSAVTGGTTVLSDRIVVKITSKPGQSFVDRMIALVEGSGRQKTLNEIALNILLASLSIVFVLVTLTLNPIASLAARPVSVTVLVALLVCLVPTTIGALLSAIGIAGMDRLVQHNVLAMSGRAVEAAGDVTTLLLDKTGTITYGNRRASEFIPMPGVSDKEIRDAAARSSLADPTPEGTSIVDLAREQGFVPDACGEQGKVVPFTAQTRMSGIDLPDGTKIRKGAGSAVRAWLTESHINMDIDTLAHMDRRVDSVSQSGGTPLVVAVRTPDHSGKVLGVVHLKDIVKEGLTDRFAELRRMGIRTVMVTGDNPLTAAAIAKEAGVDDFLAEATPEDKLAYIRKEQEGGRMVAMTGDGTNDAPALAQADVGVAMNTGTSAAKEAGNMVDLDSDPTKLISIVGIGKQLLITRGALTTFSIANDIAKYFAIIPAIFMATYPGLSALNIMGLHSPASAVLSAIIFNAIIIVILVPLALKGVAYKPAGASKILARNLRIYGLGGVVAPFIGIWLIDLIIRLIPGF

SEQ ID NO: 241 - DNA, 2067 bp, Yersinia pseudotuberculosis IP 32953
  CDS (1)..(2067): transl_table=11
atgactcacaaacaacgcgcgatttttgagcctgcactggttcgcactgcgcttctcgatgcagtgaaaaagttggatccgcgcgtccagtggcgcaatcccgtcatgttcgtggtgtatttgggcagttggctgaccaccctgatctggctggccatattaagtgggcacaccacgggcagcgccatgtttaccggcagtatcgctttatggctatggtttaccgtgctgtttgccaacatggccgaagccttggccgaggggcgtagcaaagcgcaggccgccagtctacgcggggtgaaaaaaaccagttgggctaaaaaactgtccgaggcccgtgttgatgcaccacaagaaaaagtctctgccgacagtttgcgcaaaggcgacctggtgttgatcgaagccggtgacacggtgccgtgtgacggcgaagtgctggaaggcggtgcgtcggtcgatgaaagtgccattactggcgaatctgcgcccgttatccgtgaatccggtggcgacttctcgtcagttaccggcggtaccagagtattgtccgattggctggtggttgaatgtcgcgttaaccccggcgagaccttccttgatcggatgattgccatggtcgagggcgcaaaacggcgcaaaactcccaacgaagtggcgctgaccatattgttggtggcactgactatcgtctttttactggcaacagcaaccctgtatccgttctctgttttcagcgtggaggccagccaagccggtagcccggtgaccatcaccgtgctagtcgctttattggtttgcctgatcccaaccacaatcggcgggttgttgtcagccatcggggtggccgggatgagccgcatgttgggggctaacgtgatcgccacgagtggccgggcggtggaagctgccggtgatgtcgatgtgctgctgctggataaaaccggcaccattaccctcggtaaccgccaggcctccgagtttttacccgctcccggtgtcaccgagcaacaactggcggatgccgctcagctttcctcgctggcagatgaaacgccagaagggcgcagtatcgtcgtgctggctaaacaacgttttaatttacgtgaacgtgatctgcatagcctgaatgccacctttattcccttctcagcacaaacgcggatgagcggtgtcaatgtacaggagcggatgatccgcaaaggcgcggtagacgctatccgccgccatgtggaatccaatcagggccacttcccacccgccgtggatgatttggtcgccagtgtcgcccggaccggcggtaccccattggtggttgccgagggatcacgcgtactgggcgtggtggcgttaaaagatatcgtgaaagggggcattaaagaacggtttgccgaactgcgcaaaatgggcattaaaactgtgatgatcaccggtgacaatcgtctaaccgcagcggcaattgccgctgaagctggcgtagatgattttctggccgaagcgacacccgaggccaagctggcactgattcgccaatatcaagccgaagggcggctggtggcgatgaccggcgatggcaccaacgatgcccccgcactggcacaggctgatgtcgcggtagcgatgaactccggcacacaggcggccaaagaggccggtaacatggtggatctagactcgaacccaaccaagttgatcgaagtggtgcatatcggtaagcaaatgctgatgacccgtggttccctgaccaccttcagtatcgccaacgacgtggcaaaatatttcgccatcattccggctgcctttgccgccacgtatccgcaactcaatgcgttgaacatcatgcagttgcattcaccgtcttccgctattttgtcggcggtcatttttaatgcattggtcatcgtgtttctgatcccgctggccctaaaaggtgtcagttataaagcgatgagtgcggccgccctcttacgccgtaatctgtggatttacggtttgggtggcttactggtgccgtttgtcggtatcaagttgatcgacctgctgttaaccgccctgaatatgggctag

SEQ ID NO: 242 - protein, 688 aa, Yersinia pseudotuberculosis IP 32953
MTHKQRAIFEPALVRTALLDAVKKLDPRVQWRNPVMFVVYLGSWLTTLIWLAILSGHTTGSAMFTGSIALWLWFTVLFANMAEALAEGRSKAQAASLRGVKKTSWAKKLSEARVDAPQEKVSADSLRKGDLVLIEAGDTVPCDGEVLEGGASVDESAITGESAPVIRESGGDFSSVTGGTRVLSDWLVVECRVNPGETFLDRMIAMVEGAKRRKTPNEVALTILLVALTIVFLLATATLYPFSVFSVEASQAGSPVTITVLVALLVCLIPTTIGGLLSAIGVAGMSRMLGANVIATSGRAVEAAGDVDVLLLDKTGTITLGNRQASEFLPAPGVTEQQLADAAQLSSLADETPEGRSIVVLAKQRFNLRERDLHSLNATFIPFSAQTRMSGVNVQERMIRKGAVDAIRRHVESNQGHFPPAVDDLVASVARTGGTPLVVAEGSRVLGVVALKDIVKGGIKERFAELRKMGIKTVMITGDNRLTAAAIAAEAGVDDFLAEATPEAKLALIRQYQAEGRLVAMTGDGTNDAPALAQADVAVAMNSGTQAAKEAGNMVDLDSNPTKLIEVVHIGKQMLMTRGSLTTFSIANDVAKYFAIIPAAFAATYPQLNALNIMQLHSPSSAILSAVIFNALVIVFLIPLALKGVSYKAMSAAALLRRNLWIYGLGGLLVPFVGIKLIDLLLTALNMG

SEQ ID NO: 243 - DNA, 2088 bp, Burkholderia mallei ATCC 23344
  CDS (1)..(2088): transl_table=11
atgactcaacattccgctacgcgatcgatgttcgacccggcgctcgtgcgcccggcgatcgtcgattcgttcaagaaactcacgccgcgcacgcagttgcgcaacccggtgatgttctgcgtgtacgtcggcagcatcctggcgacgatcctttggatcgccgcgctgacggggcaggccgaggcgcgcgcgggcttcattctcgcggtcgcgctgtggctgtggttcacggtgctgttcgcgaacttcgccgaggcgatcgccgaggggcgctcgaaggcgcaggccgcgtcgcttcgcagcgcgaagaaggacgtgatggccaagaagctcaacgagccgcatccgaagtcgcccgtgcgcatcatgacggcgtccgatctgcgccgcggcgacgtcgtgctcgtcgaggcgggcgatacgattccggccgacggcgaggtgatcgagggcgtcgcgtcggtcgacgaatcggcgatcaccggcgaatccgcgccggtgatccgcgaatcgggcggcgatttttcgtcggtgacgggcggcacgcgcgtgctgtcggactggatcgtcgtcaaggtgacggcgaaccccggcgaggcgttcctcgaccggatgatcgcgatggtcgaaggcgcgaagcgcaagaagacgcccaacgagatcgcgctcacgatcctgctcgtcgcgctgacgatcgtgatgctgctcgccaccgcgacgctgctgccgttctcgatgttctcggtcgacgcgatgcactcgggccacgtcgtgacgatcaccgcgctcgtcgcgctgctcgtgtgcctgatcccgacgacgatcggcggcctgctgtccgcgatcggcgtggccggcatgagccggatgatgcaggcgaacgtgatcgcgacatcgggccgcgcggtggaggccgcgggcgacgtcgacgtgctgctgctcgacaagacgggcacgatcacgctcggcaaccggcaggcgtcggcgttcctgcccgcgcccgaggtgaccgaggcgacgctcgccgacgccgcgcaactgtcgtcgctcgccgacgaaacgccggggggccgcagcatcgtcgtgctcgcgaaggagcgcttcaacattcgccagcgcgacatgggcgcgctgcacgcggtgttcctgtcgttctccgcgcacacgcgcatgagcggcgtcgacctctcgcccgagcgcgagatcagaaagggcgcggccgacgcggtgaagaagtacgtcgagagccacggcggacgctttccggccgaggtgacgaacgcggtgacggacgtcgcgcggcgcggcagcacgccgctcgtggtcgccgagaagcggggggcgctcgcgcgcgtgctcggcgtgatcgagctgaaggacatcgtgaagggcggcatcaaggagcgtttcgcggagctgcgcaagatgggcatcaagaccgtgatggtgacgggcgacaaccggctcacggccgcggcgatcgcggcggaagcgggcgtcgacgatttcctcgcggaagcgacgcccgagacgaagctctcgacgattcgcgagcaccaggcggcgggccggctcgtcgcgatgacgggcgacggcaccaacgacgcgccggcgctcgcgcaggcggatgtggccgtcgcgatgaacaccggcacgcaggccgcgaaggaggcgggcaacatggtcgacctcgattcgaatccgaccaagctgatcgagatcgtcgagatcggcaagcagatgctgatgacgcgcggctcgctcacgacgttctcgatcgcgaacgacatcgcgaagtacttcgcgatcattccggccgcgttcgcgaccacctatccgcagctgaacgcgctgaacgtgatgcatctggccacgcccgcctccgcgatcatgtcggccgtgatcttcaatgcgctcatcatcgtgctgctgattccgctcgcgctcaagggcgtgaagtatcgtccgctcggcgccgcgacgctgctgcgccgcaatctgctcgtctacggcctgggcggcattctcgtgccgttcgtcggcatcaagctgatcgacgtcgtgctcgccgcgctcggctgggtttaa

SEQ ID NO: 244 - protein, 695 aa, Burkholderia mallei ATCC 23344
MTQHSATRSMFDPALVRPAIVDSFKKLTPRTQLRNPVMFCVYVGSILATILWIAALTGQAEARAGFILAVALWLWFTVLFANFAEAIAEGRSKAQAASLRSAKKDVMAKKLNEPHPKSPVRIMTASDLRRGDVVLVEAGDTIPADGEVIEGVASVDESAITGESAPVIRESGGDFSSVTGGTRVLSDWIVVKVTANPGEAFLDRMIAMVEGAKRKKTPNEIALTILLVALTIVMLLATATLLPFSMFSVDAMHSGHVVTITALVALLVCLIPTTIGGLLSAIGVAGMSRMMQANVIATSGRAVEAAGDVDVLLLDKTGTITLGNRQASAFLPAPEVTEATLADAAQLSSLADETPGGRSIVVLAKERFNIRQRDMGALHAVFLSFSAHTRMSGVDLSPEREIRKGAADAVKKYVESHGGRFPAEVTNAVTDVARRGSTPLVVAEKRGALARVLGVIELKDIVKGGIKERFAELRKMGIKTVMVTGDNRLTAAAIAAEAGVDDFLAEATPETKLSTIREHQAAGRLVAMTGDGTNDAPALAQADVAVAMNTGTQAAKEAGNMVDLDSNPTKLIEIVEIGKQMLMTRGSLTTFSIANDIAKYFAIIPAAFATTYPQLNALNVMHLATPASAIMSAVIFNALIIVLLIPLALKGVKYRPLGAATLLRRNLLVYGLGGILVPFVGIKLIDVVLAALGWV

SEQ ID NO: 245 - DNA, 2061 bp, Burkholderia pseudomallei K96243
  CDS (1)..(2061): transl_table=11
atgttcgacccggcgctcgtgcgcccggcgatcgtcgattcgttcaagaaactcacgccgcgcacgcagttgcgcaacccggtgatgttctgcgtgtacgtcggcagcatcctggcgacgatcctttggatcgccgcgctgacggggcaggccgaggcgcccgcgggcttcattctcgcggtcgcgctgtggctgtggttcacggtgctgttcgcgaacttcgccgaggcgatcgccgaggggcgctcgaaggcgcaggccgcgtcgcttcgcagcgcgaagaaggacgtgatggccaagaagctcaacgagccgcatccgaagtcgcccgtgcgcatcatgacggcgtccgatctgcgccgcggcgacgtcgtgctcgtcgaggcgggcgatacgattccggccgacggcgaggtgatcgagggcgtcgcgtcggtcgacgaatcggcgatcaccggcgaatccgcgccggtgatccgcgaatcgggcggcgatttttcgtcggtgacgggcggcacgcgcgtgctgtcggactggatcgtcgtcaaggtgacggcgaaccccggcgaggcgttcctcgaccggatgatcgcgatggtcgaaggcgcgaagcgcaagaagacgcccaacgagatcgcgctcacgatcctgctcgtcgcgctgacgatcgtgatgctgctcgccaccgcgacgctgctgccgttctcgatgttctcggtcgacgcgatgcactcgggccacgtcgtgacgatcaccgcgctcgtcgcgctgctcgtgtgcctgatcccgacgacgatcggcggcctgctgtccgcgatcggcgtggccggcatgagccggatgatgcaggcgaacgtgatcgcgacatcgggccgcgcggtggaggccgcgggcgacgtcgacgtgctgctgctcgacaagacgggcacgatcacgctcggcaaccggcaggcgtcggcgttcctgcccgcgcccgaggtgaccgaggcgacgctcgccgacgccgcgcaactgtcgtcgctcgccgacgaaacgccggagggccgcagcatcgtcgtgctcgcgaaggagcgcttcaacattcgccagcgcgacatgggcgcgctgcacgcggtgttcctgtcgttctccgcgcacacgcgcatgagcggcgtcgacctctcgcccgagcgcgagatcagaaagggcgcggccgacgcggtgaagaagtacgtcgagagccacggcggacgctttccggccgaggtgacgaacgcggtgacggacgtcgcgcggcgcggcagcacgccgctcgtggtcgccgagaagcggggggcgctcgcgcgcgtgctcggcgtgatcgagctgaaggacatcgtgaagggcggcatcaaggagcgtttcgcggagctgcgcaagatgggcatcaagaccgtgatggtgacgggcgacaaccggctcacggccgcggcgatcgcggcggaagcgggcgtcgacgatttcctcgcggaagcgacgcccgagacgaagctctcgacgattcgcgagcaccaggcggcgggccggctcgtcgcgatgacgggcgacggcaccaacgacgcgccggcgctcgcgcaggcggatgtggccgtcgcgatgaacaccggcacgcaggccgcgaaggaggcgggcaacatggtcgacctcgattcgaatccgaccaagctgatcgagatcgtcgagatcggcaagcagatgctgatgacgcgcggctcgctcacgacgttctcgatcgcgaacgacatcgcgaagtacttcgcgatcattccggccgcgttcgcgaccacctatccgcagctgaacgcgctgaacgtgatgcatctggccacgcccgcgtccgcgatcatgtcggccgtgatcttcaatgcgctcatcatcgtgctgctgattccgctcgcgctcaagggcgtgaagtatcgtccgctcggcgccgcgacgctgctgcgccgcaatctgctcgtctacggcctgggcggcattctcgtgccgttcgtcggcatcaagctgatcgacgtcgtgctcgccgcgctcggctgggtttaa

SEQ ID NO: 246 - protein, 686 aa, Burkholderia pseudomallei K96243
MFDPALVRPAIVDSFKKLTPRTQLRNPVMFCVYVGSILATILWIAALTGQAEAPAGFILAVALWLWFTVLFANFAEAIAEGRSKAQAASLRSAKKDVMAKKLNEPHPKSPVRIMTASDLRRGDVVLVEAGDTIPADGEVIEGVASVDESAITGESAPVIRESGGDFSSVTGGTRVLSDWIVVKVTANPGEAFLDRMIAMVEGAKRKKTPNEIALTILLVALTIVMLLATATLLPFSMFSVDAMHSGHVVTITALVALLVCLIPTTIGGLLSAIGVAGMSRMMQANVIATSGRAVEAAGDVDVLLLDKTGTITLGNRQASAFLPAPEVTEATLADAAQLSSLADETPEGRSIVVLAKERFNIRQRDMGALHAVFLSFSAHTRMSGVDLSPEREIRKGAADAVKKYVESHGGRFPAEVTNAVTDVARRGSTPLVVAEKRGALARVLGVIELKDIVKGGIKERFAELRKMGIKTVMVTGDNRLTAAAIAAEAGVDDFLAEATPETKLSTIREHQAAGRLVAMTGDGTNDAPALAQADVAVAMNTGTQAAKEAGNMVDLDSNPTKLIEIVEIGKQMLMTRGSLTTFSIANDIAKYFAIIPAAFATTYPQLNALNVMHLATPASAIMSAVIFNALIIVLLIPLALKGVKYRPLGAATLLRRNLLVYGLGGILVPFVGIKLIDVVLAALGWV

SEQ ID NO: 247 - DNA, 2073 bp, Methylococcus capsulatus str. Bath
  CDS (1)..(2073): transl_table=11
atgattcatcaaaccgcgaaacaaggcctgttcgaccgcgagatcctcgcggaggctttgctggactcgttccgcaagctggcgccgcggacacagttgaagaacccggtgatgttcgtcgtctacgtcggcagcctgctgacgacggtgttgtatgttcagtccctggtcggtcagggggaggcgtcttcgggattcatcctggcgatcacgctctggctctggttcaccgtgctgttcgccaatttcgccgaggcgctggccgaaggccgggccaagacccaggctgcatccctgcgcagcaccaggcgcgacgtcatggcgaagaagctggacgaaccgcgctatggcgccaactacagcaaggtcccggggtcgagcctgcgccgcggagacgtggtgctgatcgaggccggcgatttcgtccctgccgacggcgaggtgatcgaaggggtggcttcggtcaacgaaagcgccattacgggtgagagtgcgccggtgatccgcgaatccggcggggacttcagcgcggtcaccggaggcacgcgggtactgtcggactggctggtggtgcggatcacggtcaatccgggcgaggccttcctcgaccgcatgatcgccatggtcgaaggcgccaagcgtcagaagaccccgaacgagatcgccctgaccattttgctggtggcgctcaccctgattttcctgatggcgaccgcgaccctgctgccgttttcggtctacagcgcggaaacggccggcgagggccagccgatcatggtcaccgtcctggtcgcgctcttggtgtgcctgattcccaccacgatcggcggcctgctctcggccatcggcgtggccggcatcggccggatgatgcgcaagaatgtgatcgccacctcgggccgggcggtggaggcggcgggggacgtggacgtgctgctgctcgacaagaccggcaccatcacgctcggcaaccgccaggcatcggccttcctgccgctgcaggggatcggccggcaggaattggccgacgccgcgcagctggcgtcgctggcggacgagacgccggaaggccgcagcgtggtggtgctggccaagcagatgtacggcttgagggaacgggacgtgcgtaccctgggcgccaccttcgtgcatttcagcgcccagacccgcatgagcggcgtgaacctcgaaggtcgccagatccgcaagggggcggccgatgcgatccgcgtctacgtggaggagcaggacggcagtttccccgaggaagtacagaagctggtccatgatgtggcgcggcgcggcagcacgccgctggtggtcgccgaaaatgggcgggtgctgggcgtgatcgagctgaaggacatcgtcaagggcggcatcaaggagcgcttcgtcgaactgcgccggatggggatcaagacggtcatgatcaccggcgacaatccgctgaccgcggccgccatcgccgccgaggccggggtggacgatttcctggcggaggcgacgcccgaggccaagctcaagctgatccgcagctaccaggcggaaggccggttggtggcgatgaccggtgatggtaccaacgacgccccggccctggcccaggccgacgtggccgtggcgatgaacacgggcacacaggctgccaaggaggccggcaacatggtggacctggattccaatcccaccaaactcatcgagatcgtggagacaggcaaacagatgctgatgacccgtggcgcgctgaccaccttcagcatcgccaacgacgtggcgaagtatttcgccatcatcccggcggcgttcgcgagcacgtatccggcgctgaatgcgctcaatgtcatggggctcgcaacgcccgccagcgccatcctctcggcggtgatctataacgccctcatcatcgtcgcgctcattccgctggcgctgaggggagtgagctacaagccggtgggcgcttcggcgctgctgcgcaacaacttgctgatctatggcgtcggcggcctggtcgtacccttcatcggcatcaagctgatcgacctgctgctcgtcgccctggatctggtttag

SEQ ID NO: 248 - protein, 690 aa, Methylococcus capsulatus str. Bath
MIHQTAKQGLFDREILAEALLDSFRKLAPRTQLKNPVMFVVYVGSLLTTVLYVQSLVGQGEASSGFILAITLWLWFTVLFANFAEALAEGRAKTQAASLRSTRRDVMAKKLDEPRYGANYSKVPGSSLRRGDVVLIEAGDFVPADGEVIEGVASVNESAITGESAPVIRESGGDFSAVTGGTRVLSDWLVVRITVNPGEAFLDRMIAMVEGAKRQKTPNEIALTILLVALTLIFLMATATLLPFSVYSAETAGEGQPIMVTVLVALLVCLIPTTIGGLLSAIGVAGIGRMMRKNVIATSGRAVEAAGDVDVLLLDKTGTITLGNRQASAFLPLQGIGRQELADAAQLASLADETPEGRSVVVLAKQMYGLRERDVRTLGATFVHFSAQTRMSGVNLEGRQIRKGAADAIRVYVEEQDGSFPEEVQKLVHDVARRGSTPLVVAENGRVLGVIELKDIVKGGIKERFVELRRMGIKTVMITGDNPLTAAAIAAEAGVDDFLAEATPEAKLKLIRSYQAEGRLVAMTGDGTNDAPALAQADVAVAMNTGTQAAKEAGNMVDLDSNPTKLIEIVETGKQMLMTRGALTTFSIANDVAKYFAIIPAAFASTYPALNALNVMGLATPASAILSAVIYNALIIVALIPLALRGVSYKPVGASALLRNNLLIYGVGGLVVPFIGIKLIDLLLVALDLV

SEQ ID NO: 249 - DNA, 2085 bp, Pseudomonas fluorescens Pf-5
  CDS (1)..(2085): transl_table=11
atgaatatgcatgttcctgcctcgaacaaagccgccgatgcgctcgccaagagccagccggccaaggccgaagtggcgagtaccgcaatctctgccctgtggcgcccggcgctgatccaggctttcgtcaagcttgacccgcgccagttgcagcgctcgccagtgatgctggtggtggaactgacagcgatcctgaccaccgtgctgtgtttcattccggacaccgcagtgccgaccttcgtcgccgcccagattgctctctggctgtggttcacggtgctctttgccaacttcgccgaggccctggcggaaggccgcggcaaggctcgcgccgacagcctcaaggccggtagcgagggcttgagcgcccgccgccgggccggcgacggcagctatcagctggtgccggcggtcaatctgcgcaaaggcgacgtggtgcgggtcgaagccggcgaaatgattcccggcgatggcgaggtgatcgaaggtatcgccgcggtcaacgaagcggcaatcaccggtgaatcggctccggtgatccgggaatccggcggtgaccgttcggcggtgaccggcaatacccggctggtctccgactggctgctggtgcgcattaccagcaaccccggcgagtcgaccctggaccgcatgatcgctctggtggaaggtgccaagcggcagaagacaccgaacgaagtggccctggatatcctgctgatcggcctgaccctgatcttcctgctggtggtggtgaccctgcagcccttcgcccactttgccaatggcagcctgccgctggtgttcctggtggcgctgctggtgaccctgatccccaccaccatcggcggcctgctctcggccatcgggatcgccgggatggaccgcctggtgcgcttgaacgtgatcgccaagtccgggcgtgcggtggaggcggcgggtgacgtgcacgtgttgctgctggacaagaccggcaccatcactttcggtaaccgccgttgcagcgccatctacccggcgccgggcgtcagtgcccaggtactggccgaagcggccttgatggcctccctggcggacgacaccgctgaaggcaagtccatcgtcgagtacctgcgggagctttatccacagcccgagccgggcagcgatctgctgacggcagtgcctttcagcgctgaaacccgactgtccggggtcgattaccagggccgggtctatcgcaagggtgcagtggattcggtgttgagtttcgtcggcctcaaacgcagcgagctggcaccggccctgtcccgggagatcgacaagatcgcccagagcggcggcactccgctgctggtctgtgccgagggccggatgctcggcgccattcacctcaaggacgtggtcaagcccggcattcgcgagcgtttcgccgagttgcgcaagctgggtatccgtaccgtgatggtgaccggcgacaacccgctgaccgctgcggccattgccgccgaagccggagtcgacgatgtgctggccgaggccacgccggagaagaagctggcgcgcattcgccacgagcaaaacgacgggcgtctggtggccatgtgcggtgacggcgccaacgacgcaccggcattggcccaggccgatgtcggcatggccatgaacgacggcacccaggcggcgcgcgaggcggccaacatggtcgacctggacagcgacccgaccaagctgctggatgtggtgcagatcggcaaggagctgctggtgacccggggtgccctgaccaccttctccatcgccaacgacgtggccaagtacttcgccatcctgccggcactgttcgcggcgatttatccacagctgggggtgctcaacatcatggggctggccagcccgcagagcgcaatcctttcggccatcgtgttcaacgccctgatcatcgtggtgctgatccccctggcattgcgtggggtgcgggtacaggcggccagtgccgcgcacctgctgcggcgcaacctgttgatctacggcgtgggtggcatcgtcgtgccctttgtcgggatcaagctgatcgacatgctgttgactgcgctgcacctggtgtaa

SEQ ID NO: 250 - protein, 694 aa, Pseudomonas fluorescens Pf-5
MNMHVPASNKAADALAKSQPAKAEVASTAISALWRPALIQAFVKLDPRQLQRSPVMLVVELTAILTTVLCFIPDTAVPTFVAAQIALWLWFTVLFANFAEALAEGRGKARADSLKAGSEGLSARRRAGDGSYQLVPAVNLRKGDVVRVEAGEMIPGDGEVIEGIAAVNEAAITGESAPVIRESGGDRSAVTGNTRLVSDWLLVRITSNPGESTLDRMIALVEGAKRQKTPNEVALDILLIGLTLIFLLVVVTLQPFAHFANGSLPLVFLVALLVTLIPTTIGGLLSAIGIAGMDRLVRLNVIAKSGRAVEAAGDVHVLLLDKTGTITFGNRRCSAIYPAPGVSAQVLAEAALMASLADDTAEGKSIVEYLRELYPQPEPGSDLLTAVPFSAETRLSGVDYQGRVYRKGAVDSVLSFVGLKRSELAPALSREIDKIAQSGGTPLLVCAEGRMLGAIHLKDVVKPGIRERFAELRKLGIRTVMVTGDNPLTAAAIAAEAGVDDVLAEATPEKKLARIRHEQNDGRLVAMCGDGANDAPALAQADVGMAMNDGTQAAREAANMVDLDSDPTKLLDVVQIGKELLVTRGALTTFSIANDVAKYFAILPALFAAIYPQLGVLNIMGLASPQSAILSAIVFNALIIVVLIPLALRGVRVQAASAAHLLRRNLLIYGVGGIVVPFVGIKLIDMLLTALHLV

SEQ ID NO: 251 - DNA, 2073 bp, Pseudomonas fluorescens Pf-5
  CDS (1)..(2073): transl_table=11
atgagtagcaaccctcgtatagcgttgttcgaccgtgggctagtgctcaccgcgtgcctggatgccgtgaagaaactgctgccccaggcgcagtggaagaacccggtgatgttcgtggtctacctgggcagccttctcaccaccctgctgtggttccagtccctgggcggcgagggtgaggcccccagcggctttatcctcagcatcaccctgtggctgtggttcaccgtgctgtttgccaactttgccgaagccctggccgagggccgcagccgggcccaggcggcgagcctcaagggcatgaagcgccagaccctggccaagctgctgcaacagccccggcatggcgccgcctggttgcccatggccgccagcgaactgcgcaaggacatggtggtgctgatcgaggccggcgacctggtgcccctggacggcgaggtcatcgaaggcgtggccacggtggacgaaagcgccatcaccggtgaatcggcgccggtgatccgtgaggccgggggcgatttctcctcggtcaccggcggcacccgggtgctgtcggactggctggtggtgcgcatcagcgtcaaccccggcgagtcgttcctggaccgcatgatctccatggtggagtcggccaagcgccagaagactcccaacgaggtggccctgaccattctcctggtgggcctgaccctgctgttcctgctggtgatcgtgaccctgagcccgtattcgatcttcgccgtggccatgagcggcaccggcagtgtgatcagcgccacggtgatggtggcgctgctggtgtgcctgatccccaccaccatcggtggcctgctctcggccatcggtgtggcgggcatgagccggatgatgtcggccaatgtcattgccacctccggccgcgccgtggaagcggcgggggacgtggacgtgctgctgctggacaagaccggcaccatcaccctgggcaaccgccaggccagcgccttcctgccggcgccggggatcaaggacagcgaactggcgcaagccgcgcaactggcttccctggcggacgaaaccccggaaggccggagcatagtggtgctggccaagcaactgttcgacatccgtgggcgcgaccttcacgccctgggcgccagcttcgtgcagttcaccgcccagacccgcatgagcggggtcgacctgcccgagggccggagcatccgcaagggcgcggccgatgccatccgccggcatatcgaggcccagggcggcagcttcccgccggccttgcaggccaaggtcgatgaagtctcgcgccgtggcagtacgccgctggtggtcagtgaaggcgcccaggccctgggcgtggtggagctcaaggacgtggtcaagggcgggatcaaggagcgcttcgccgagctgcggcgcatgggcatcaagaccgtgatgatcaccggcgacaaccgcctgaccgcggcggccatcgccgtggaagccggggtcgacgatttcctcgccgaagcgcggcccgaggacaagctgcaactgatccgcgactaccaggccaagggcaagctggtggccatgaccggcgacggtaccaacgacgccccggccctggcccaggccgacgtggcggtggccatgaacagcggcacccaggcggccaaggaagccggcaacatggtggacctggacagcaacccgaccaagctgatcgaagtggtggaagtgggcaagcagatgctcatgacccgcggtgccctgaccaccttcagcgtggccaacgacgtggccaagtattttgctatcgtaccggccgccttcgtcgccacttacccgcaactggcggcgctgaacgtgatgcacctgaacagcccgaactcggcgattctcagtgcggtgatcttcaacgcgctgatcatcgtgttcctcatccccctggcgctcaagggggtgaagtaccgggccattggcgccgcggcgctgctcaaccgcaacctgctgatctacggcctgggcggggtgctggtacccttcgccgggatcaagctgatcgacatgctgctggccggcctcggcctggtctga

SEQ ID NO: 252 - protein, 690 aa, Pseudomonas fluorescens Pf-5
MSSNPRIALFDRGLVLTACLDAVKKLLPQAQWKNPVMFVVYLGSLLTTLLWFQSLGGEGEAPSGFILSITLWLWFTVLFANFAEALAEGRSRAQAASLKGMKRQTLAKLLQQPRHGAAWLPMAASELRKDMVVLIEAGDLVPLDGEVIEGVATVDESAITGESAPVIREAGGDFSSVTGGTRVLSDWLVVRISVNPGESFLDRMISMVESAKRQKTPNEVALTILLVGLTLLFLLVIVTLSPYSIFAVAMSGTGSVISATVMVALLVCLIPTTIGGLLSAIGVAGMSRMMSANVIATSGRAVEAAGDVDVLLLDKTGTITLGNRQASAFLPAPGIKDSELAQAAQLASLADETPEGRSIVVLAKQLFDIRGRDLHALGASFVQFTAQTRMSGVDLPEGRSIRKGAADAIRRHIEAQGGSFPPALQAKVDEVSRRGSTPLVVSEGAQALGVVELKDVVKGGIKERFAELRRMGIKTVMITGDNRLTAAAIAVEAGVDDFLAEARPEDKLQLIRDYQAKGKLVAMTGDGTNDAPALAQADVAVAMNSGTQAAKEAGNMVDLDSNPTKLIEVVEVGKQMLMTRGALTTFSVANDVAKYFAIVPAAFVATYPQLAALNVMHLNSPNSAILSAVIFNALIIVFLIPLALKGVKYRAIGAAALLNRNLLIYGLGGVLVPFAGIKLIDMLLAGLGLV

SEQ ID NO: 253 - DNA, 2067 bp, Dechloromonas aromatica RCB
  CDS (1)..(2067): transl_table=11
atgacacgcaagacttttaccctgttcgatccgacgctggccctgccggcgatcgccgatgctttccggaaactgaatccggccgtgcaatggcgcaatccggtgatgttcgtcgtctacgtcggcagcatcctgaccaccatcctgtgggtgcaagcccttggcggccagggcgaggcgccggccggtttcatcctggccatcaccatctggctgtggttcacggtgctcttcgccaattttgccgaagcgctggccgaggggcgcagcaaggcgcaagccgcgtcgctgcgcggcctgaagaaggaaacctgggccaagaagttggctgaaccgcgtttcggcgctcaatggcagatgaccccggccgccgacctgcgcaagggcgacgtcatcgtcgtccaggctcaggaaaccatcccggccgacggcgaagtcatcgaaggtgtcgcctcggtggacgaatcggcgatcaccggcgaatcggccccggtcatccgcgaatccggtggcgacttctcggccgttaccggcggcacccgcgtgctgtccgactggatcgtcgtccgcgtcaccgtcaatccgggtgaaaccttcgtcgaccgcatgattgccatggtcgagaatgccaagcgtcagaagacgccgaacgaaatcgccctgaccatcctgctggtcgcgctgaccatcgtcttcctcggtgtcatcgtcaccctgctgcccttctcgatgttcagcgtcgaagtggccggcgccggcacgccgatcagcatcaccgtgctgatcgcgctgctcgtctgcctgatcccgacgaccatcgccggactgctgtcggccattggcgtcgccggcatgagccgcatgatgcaggccaacgtgatcgccacctccgggcgcgccgtcgaagcggccggcgacgtcgatgtgctgctgatggacaagaccggcacgatcacgctgggcaatcgccaggcgtcggttttcctgccagccgatggcgtcagcgaagccgaactggccgatgccgcccaactggcctcactggccgatgaaacgccggaaggccgcagcatcgtggtgctggccaagcagcgcttccagttgcgcgagcgcgacatccatgcccttgatgcccacttcgtgcatttctcagcacatacccgcatgagcggggtggatatggccggtcgccaggtgcgcaagggtgcggccgatgccatcaggaaacacgttgaagcgctgggcggcaaattcccggcatcggtgtcgggctatgtggatgaagtcgcccgccgtggcagcacgccgctggtcgttgccgatggtacccgcgtcatgggcgtcatcgagctcaaggacatcgtcaagggcggcatcaaggagcgttttgccgaactgcgcaagatgggcatcaagaccgtcatggtgaccggcgacaaccgcgtaacggccgccgccattgccgccgaggcgggggtcgacgatttcctgtcagaagcgacgccggaagccaagctcgcgctgattcgcaagtaccaggccgagggccggctggtcgccatgaccggcgatggtaccaacgacgctccggcgctggcccaggccgatgtcgcagtggccatgaataccggtacgcaagccgccaaggaggccggcaacatggtcgacctggattccaacccgaccaagctgatcgaggtggtcgaaaccggcaagcagatgctgatgacgcgcggctcactgaccacattcagtattgccaatgacatcgccaaatacttcgcgatcatcccagccgccttcgtgacgacctacccgcaactcgccgcgctcaacgtcatggggctagccagcccggcctcggccattctgtcggcagtgatcttcaatgccctgatcatcgtcttcctgatcccgctggcgctgaagggcgtcaagtaccgcccgctcggtgccgcgacgctgctccgccagaacctggcgatctacggcctgggtggcgtcatcgttccctttatcggcatcaagctgatcgacttggcgattgccgccgtcggcctggcctga

SEQ ID NO: 254 - protein, 688 aa, Dechloromonas aromatica RCB
MTRKTFTLFDPTLALPAIADAFRKLNPAVQWRNPVMFVVYVGSILTTILWVQALGGQGEAPAGFILAITIWLWFTVLFANFAEALAEGRSKAQAASLRGLKKETWAKKLAEPRFGAQWQMTPAADLRKGDVIVVQAQETIPADGEVIEGVASVDESAITGESAPVIRESGGDFSAVTGGTRVLSDWIVVRVTVNPGETFVDRMIAMVENAKRQKTPNEIALTILLVALTIVFLGVIVTLLPFSMFSVEVAGAGTPISITVLIALLVCLIPTTIAGLLSAIGVAGMSRMMQANVIATSGRAVEAAGDVDVLLMDKTGTITLGNRQASVFLPADGVSEAELADAAQLASLADETPEGRSIVVLAKQRFQLRERDIHALDAHFVHFSAHTRMSGVDMAGRQVRKGAADAIRKHVEALGGKFPASVSGYVDEVARRGSTPLVVADGTRVMGVIELKDIVKGGIKERFAELRKMGIKTVMVTGDNRVTAAAIAAEAGVDDFLSEATPEAKLALIRKYQAEGRLVAMTGDGTNDAPALAQADVAVAMNTGTQAAKEAGNMVDLDSNPTKLIEVVETGKQMLMTRGSLTTFSIANDIAKYFAIIPAAFVTTYPQLAALNVMGLASPASAILSAVIFNALIIVFLIPLALKGVKYRPLGAATLLRQNLAIYGLGGVIVPFIGIKLIDLAIAAVGLA

SEQ ID NO: 255 - DNA, 2220 bp, Ralstonia eutropha JMP134
  CDS (1)..(2220): transl_table=11
atgcaacaagaatccatggcgacgcaaggcaagaccggcggcgccgcatccagaaccaatgcatcggcggccaaggccgcccagccatcgggcgccgccaaccgtccgcatggccagcatccgcatcgtccgccgcgccgcggcatgttcgctgccgaactcgtcaagccggctttgctggccgcagtgaagaagctgtcgccacgcgatcaggtgcgcaacccggtgatgttcgtggtgtatgtcggcagcagcctgaccactgtcctgttcctcaaggcgctggcttcgccggtggcgggaggcgaaagcgccggctttatcctggccgtctcggtctggttgtggttcacggtgctgttcgccaactttgccgaggcgctggccgaagggcgaagcaagcagcaggcggaatcgctgcgtggtctgaagacgaccgccatggcgcacgtactcgtggacggcaagcgaggcggtgcgatggaaacgcgcgcggctacaaccctgcggcgcggcgacatcgtgcaggtccaggccggcgacatgatccccggcgacggtgaagtgatcgagggcgtggcgtcggtggacgaaagcgccatcactggcgaatcggcgcccgtgatccgcgaatccggcggcgacttctcgtcggtgaccggcggcacgcgcgtgctgtccgactggatcgtggtgcgcatcaccaccaacccgggcgagagcttcatcgaccgcatgatcagcatggtcgagggcgccaagcggcagaagacgccgaacgaactcgcgctgaccatcctgctggtgggcctgaccatcgtgctgctcctggcgaccgccacgctgctgccgttctcgctctacagcgtgctggtcaccaaggccggcatgccggtcacgatcaccgtactggtcgcgctgctcgtttgcctgattccgaccacgatcggcggcctgctgtctgcgatcggcgtggccggcatgagccgcatgatggaggccaacgtcatcgccacctcgggccgtgccgtggaagcggcaggcgacgtcgacgtgctgctgctcgacaagaccggcaccatcacgcatggcaaccgccaggccgcgcgctttgtgccggcaccgggcatctcggcgcagcagcttgcgcaggcagcgtggctgtcgtcgctcgccgacgaaacgcccgaaggccgcagcatcgtgacgctggcgcgccagcagcaaggggttgccgcgccggacatggcggagctgcgcccggtgttcgtgccgttcacggcgcagacgcgcatgagcggggtggacctgcgcaatggagacagcgaacgcatcgtacgcaagggcgctgccgacgcggtgcgccgcttcgtgaccgaacgcgcgggcaagttcccggaagccgtgatgcaggccgtcgacgacgttgccggtgccggcagcacgccgctggtggtggccgagggatccgacggcaatgtgcgcgtgctcggcgtggtcgagctcaaggacatcgtcaagaccggtatccgtgagcgctttgccgaattgcgcaagatgggcatcaagaccgtgatgattacgggcgacaaccggcttaccgcggcgaccatcgcggccgaggcgggcgtcgatgacttccttgccgaggccacgcctgaagcgaagctcaagctgatccgccagtaccagggcgagggacgcctggtggcgatgaccggcgacggcaccaacgacgcgcccgcgctggcgcaggccgacgtcgccgtggcgatgaacagcggcacgcaggcggcgaaggaggcaggcaatatggtcgacctcgacagcaacccgaccaagctgatcgagatcgtcgagatcggcaagcagatgctgatgacgcgcggttcgctgaccacgttcagcgtggccaacgacattgccaagtacttcgccatcattccggctgcctttgccacgacctatccgcagctcaacctgctgaacgtgatggggctgagcacgccggcgtccgcgatcatgtcggcggtgatcttcaatgcgctgatcatcgtcgcgctgatcccgctggcgctcaagggcgtcgcctaccggccgctcggcgcggcggtgctgctgcgtcgcaacctgctgatctacggccttggcggcattctcgtgccgtttgtcgggatcaagctgatagacatggcgctggccctgctgggctgggtctga

SEQ ID NO: 256 - protein, 739 aa, Ralstonia eutropha JMP134
MQQESMATQGKTGGAASRTNASAAKAAQPSGAANRPHGQHPHRPPRRGMFAAELVKPALLAAVKKLSPRDQVRNPVMFVVYVGSSLTTVLFLKALASPVAGGESAGFILAVSVWLWFTVLFANFAEALAEGRSKQQAESLRGLKTTAMAHVLVDGKRGGAMETRAATTLRRGDIVQVQAGDMIPGDGEVIEGVASVDESAITGESAPVIRESGGDFSSVTGGTRVLSDWIVVRITTNPGESFIDRMISMVEGAKRQKTPNELALTILLVGLTIVLLLATATLLPFSLYSVLVTKAGMPVTITVLVALLVCLIPTTIGGLLSAIGVAGMSRMMEANVIATSGRAVEAAGDVDVLLLDKTGTITHGNRQAARFVPAPGISAQQLAQAAWLSSLADETPEGRSIVTLARQQQGVAAPDMAELRPVFVPFTAQTRMSGVDLRNGDSERIVRKGAADAVRRFVTERAGKFPEAVMQAVDDVAGAGSTPLVVAEGSDGNVRVLGVVELKDIVKTGIRERFAELRKMGIKTVMITGDNRLTAATIAAEAGVDDFLAEATPEAKLKLIRQYQGEGRLVAMTGDGTNDAPALAQADVAVAMNSGTQAAKEAGNMVDLDSNPTKLIEIVEIGKQMLMTRGSLTTFSVANDIAKYFAIIPAAFATTYPQLNLLNVMGLSTPASAIMSAVIFNALIIVALIPLALKGVAYRPLGAAVLLRRNLLIYGLGGILVPFVGIKLIDMALALLGWV

SEQ ID NO: 257 - DNA, 2067 bp, Pseudomonas fluorescens PfO-1
  CDS (1)..(2067): transl_table=11
atgaatatgcatgttccagcttcaaaaccagcggcagctgccaagtcggctgaagctccgaaaaccgcgatcagcgccctgtggcgcccggcgctggtgcaagcgttcgtcaagctcgacccgcggcagttgcagcgctcgccagtgatgctggtggtcgaactgacagcgatcctgaccaccgtgctgtgcttcattcccgacagcagcgtgccgaccttcgttgctgcgcaaatcgccctgtggctgtggttcaccgtgctgttcgccaacttcgccgaagcgctggccgaaggtcgcggcaaggcccgcgccgacagcctcaaggccggcagcgaaggcctcagcgcccgacgcaaactggccaacggcagcttccaggtcgtaccggccagcagcctgcgcaagggcgatgtggtgcgcgttgaagccggcgaaatgatccccggtgacggcgaggtcatcgaaggcattgcggcggtcaacgaagcagcgatcactggcgaatcggcgccggtgatccgcgagtccggcggcgaccgttccgccgttaccggcaacacccggctggtgtccgactggctgctggtgaagatcaccgccaatcctggtgaatcgaccctcgaccgcatgatcgcgctggtcgaaggcgccaaacgccagaagaccccgaacgaagtggcactggacatcctgctgatcggcctgaccctgatcttcctgctggtggtcgtgaccctgcaaccgttcgcccacttcgctaacggcagcctgccgctggtgttcctggtggcgttattggtcacgctgattccgaccaccatcggcggtctgctgtcggcgatcggtatcgccgggatggatcgtctggtgcgcctgaacgtgatcgccaagtccggtcgcgcggtggaagcggcgggtgacgtgcacgtgttgctgctggacaagaccggcaccatcaccttcggtaaccgtcgttgcagcgcggtatatgccgcgccgggtgtgaacgcccgtgagctggccgaaggcgcgctgttcgcctcgctggccgacgaaaccgctgaaggcaagtccatcgtcgagtacctgcgcggctccaatccgcagccggaaccttcgccggaaaccctgactgccgtgccgttcagtgcggaaacccgtttgtccggtgtcgactaccagggccgtgtgttccgcaagggcgcggtggattcgctgctggcgttccttggtcagcaacgcaaggatctggccccggcgctgtcccgggaaatcgacaagatcgcccagagcggcggcaccccgttgctggtctgcgccgacggcaaactgcttggtgcgatccacctcaaagacgtggtcaagccgggcatccgcgagcgcttcgccgagctgcgcaaactggggattcgcacggtgatggtgactggcgacaacccgctgaccgctgccgcgattgccgctgaagcgggcgtcgacgatgtattggccgaagccacaccggagaaaaaactggcgcgtatccgtcacgagcagaacgacggtcgtctggtcgcgatgtgcggcgacggcgccaacgatgctccggcgctggcccaggctgacgtcggcatggcgatgaacgacggcacacaagccgcgcgtgaggcggccaacatggtcgacctcgacagcgacccgaccaagttgctggacgtggtgcagatcggcaaggaattgctggtgactcgcggtgcgctgacgaccttttccatcgccaacgacgtggccaagtactttgcgatcctgccggcactgtttgctgcgatctacccgcaactgggtgtgctgaacatcatgcagttgagcagcccgcagagcgcgatcctgtcagccatcgtgttcaacgctttgatcatcgtggtgctgattccgttggccctgcgtggtgtgcgggtgcaggcggcgagcgcggcggcgctgctgcgtcgcaatctgctgatctatggcctgggcgggattctggtgccgttcgtggggatcaaggcgatcgacatgctgttgacggcgttgcatctggtttga

SEQ ID NO: 258 - protein, 688 aa, Pseudomonas fluorescens PfO-1
MNMHVPASKPAAAAKSAEAPKTAISALWRPALVQAFVKLDPRQLQRSPVMLVVELTAILTTVLCFIPDSSVPTFVAAQIALWLWFTVLFANFAEALAEGRGKARADSLKAGSEGLSARRKLANGSFQVVPASSLRKGDVVRVEAGEMIPGDGEVIEGIAAVNEAAITGESAPVIRESGGDRSAVTGNTRLVSDWLLVKITANPGESTLDRMIALVEGAKRQKTPNEVALDILLIGLTLIFLLVVVTLQPFAHFANGSLPLVFLVALLVTLIPTTIGGLLSAIGIAGMDRLVRLNVIAKSGRAVEAAGDVHVLLLDKTGTITFGNRRCSAVYAAPGVNARELAEGALFASLADETAEGKSIVEYLRGSNPQPEPSPETLTAVPFSAETRLSGVDYQGRVFRKGAVDSLLAFLGQQRKDLAPALSREIDKIAQSGGTPLLVCADGKLLGAIHLKDVVKPGIRERFAELRKLGIRTVMVTGDNPLTAAAIAAEAGVDDVLAEATPEKKLARIRHEQNDGRLVAMCGDGANDAPALAQADVGMAMNDGTQAAREAANMVDLDSDPTKLLDVVQIGKELLVTRGALTTFSIANDVAKYFAILPALFAAIYPQLGVLNIMQLSSPQSAILSAIVFNALIIVVLIPLALRGVRVQAASAAALLRRNLLIYGLGGILVPFVGIKAIDMLLTALHLV

SEQ ID NO: 259 - DNA, 2028 bp, Rhodobacter sphaeroides 2.4.1
  CDS (1)..(2028): transl_table=11
atgtcccgacatcccagacccgaggcacggctcgcaacccttgcgcccgcagccctccggcagtccttcgtcaagctcgacccgcgcagcctgtcgcgcaacccggtgatcttcaccacggccgtggtggcgggcctgaccaccgttctcgccctcccggcgctggcgaccgacctgtcccgcggcctcacggcgctgcatatctcggcctggctctggatcgcggtgctgttcgcgaatttcgccgaggcgctggccgagggccggggccgggcccgcgccgacagcctgcgcgcaagccgctccgagacgccggtcaagcttctcgcctcggccgaggccgcgcccgcgagcgcgacgctcgtgccctcggcggggctccggaagggccagatcctgctcgtcgaggcgggcgacctgatcccggccgatgccgaggtgatccgcggcgtggcctcggtggacgagagcgccatcaccggcgagagcgcgcccgtgatccgcgagagcggcggcgaccggtcgtcggtgacgggcggcacgcgcatcgtctcggacagtctcgtgctgcgcgtcaccgccgatccggggcgcagcttcctcgaccggatgatcgcgctggtcgaaggggccgagcgcaagaagaccccgaacgagatcgcgctgaacatcctgctcgcggggctcacgctgatcttcctgatcgtggtcgtgacgctcgagcctttcgcgcgcttctcgggtgcgaccatcccggtcgtgttcctcgcggcgctcttcgtcacgctcatccccaccaccatcggcggcctgctttcggccatcggcatcgcggggatggaccggctggtgaaggccaatgtcatcgccaagtcgggccgtgcggtcgaggcggcgggcgacgtggacacgcttctgctcgacaagaccggcacgatcaccttcggcaaccgcatggccgaccggttcgtgccggccgagggcgtgagcctgcgcgagctggccgaccgcgccatgctggcctcgctcgccgacgagacgcccgagggcaagtccatcgtcgagctggcgcgcgctcagggggccacggcggtgcccgaggggcaggccgtggccttctcggcccagacgcggctttcgggcgtggatctgggcgaggtcgcgctgcgcaagggggcggtcgatgccgtcctgcgccacacgggccgggtgcccgatgcgcgggtcgcggccgaggtcgaggccatcgcccggtcgggcggcacgccgctgctcgtctcggaaggcaaccggatcctcggcgcgatccatctgaaggatgtggtgaagcccggtgtgcgtgcccgcttcgccgacctgcgccgcatggggatccgcacggtgatgatcacgggcgacaaccccctgaccgccgccgccatcgcggccgaggccggggtcgacgatttcctcgccgaggccacgcccgagatgaagctcgactacatccggcgcgaacaggcgcagggccggatggtcgccatgtgcggcgacggctcgaacgacgccccggcgctggcgcaggccgatgtgggcgtggcgatgaattcgggcacgcccgccgccaaggaggccgcgaacctgatcgacctcgacagcgaccccaccaagctcatcgaggtggtgatggtgggcaaggagctgctcatcagccgcggcgccctcaccaccttttcggtggccaacgatgtggcgaaatatttcgccatcctgccggccatgttcgtggcggcctatccgggccttcaggcgctgaacatcatgcgtctggccagccccgaaagcgcgatcctctcggccgtgatcttcaacgcgctggtgatcgtggcgctgatcccgctcgcgctgcgcggggtgggttatgcgcccgcctcggctgcggccctgttgcggcgcaatctgacgatctatggtctgggcggactggtcgtgccgttcgtggggatcaagatcatcgacatgggcctcgtggccctcggcctcgcctga

SEQ ID NO: 260 - protein, 675 aa, Rhodobacter sphaeroides 2.4.1
MSRHPRPEARLATLAPAALRQSFVKLDPRSLSRNPVIFTTAVVAGLTTVLALPALATDLSRGLTALHISAWLWIAVLFANFAEALAEGRGRARADSLRASRSETPVKLLASAEAAPASATLVPSAGLRKGQILLVEAGDLIPADAEVIRGVASVDESAITGESAPVIRESGGDRSSVTGGTRIVSDSLVLRVTADPGRSFLDRMIALVEGAERKKTPNEIALNILLAGLTLIFLIVVVTLEPFARFSGATIPVVFLAALFVTLIPTTIGGLLSAIGIAGMDRLVKANVIAKSGRAVEAAGDVDTLLLDKTGTITFGNRMADRFVPAEGVSLRELADRAMLASLADETPEGKSIVELARAQGATAVPEGQAVAFSAQTRLSGVDLGEVALRKGAVDAVLRHTGRVPDARVAAEVEAIARSGGTPLLVSEGNRILGAIHLKDVVKPGVRARFADLRRMGIRTVMITGDNPLTAAAIAAEAGVDDFLAEATPEMKLDYIRREQAQGRMVAMCGDGSNDAPALAQADVGVAMNSGTPAAKEAANLIDLDSDPTKLIEVVMVGKELLISRGALTTFSVANDVAKYFAILPAMFVAAYPGLQALNIMRLASPESAILSAVIFNALVIVALIPLALRGVGYAPASAAALLRRNLTIYGLGGLVVPFVGIKIIDMGLVALGLA

SEQ ID NO: 261 - DNA, 2085 bp, Burkholderia sp. 383
  CDS (1)..(2085): transl_table=11
atgactcaacattccgcaacacggtccatgttcgatccggcgctgctgcgcccggcgatcgtggactcgttcaagaaactcacgccgcgcacgcagttccgcaatccggtgatgttctgcgtgtacgtcggcagcatcctgaccacgatcctgtggatcgcggcgctcgccggccaggccgaggcgcccgcgggcttcatcctcgcgatcgcgctgtggctgtggttcaccgtcctgttcgcgaacttcgccgaagcgctcgccgaagggcgctcgaaggcgcaggcggcctcgctgcgcagcgcgaagaaagacgtgatggcgaagaagctcaacgagccgcatccgaagtcgccgatccgcatcacgaccgcgaccgagctgcgcaagggcgacgtcgtgctggtcgaggccggcgacgtgatcccggccgacggcgaggtggtcgacggtgtcgcatccgtcgacgaatcggcaatcaccggcgaatccgcgccggtgatccgcgaatcgggcggcgacttctcgtcggtcacgggcggcacgcgcgtgctgtcggactggatcgtcgtcaaggtcaccgcgaacccgggcgaggcgttcctcgaccggatgatcgcgatggtcgaaggcgcgaagcgcaagaagacgccgaacgagatcgcgctgacgatcctgctcgtcgcgctgacgatcgtgatgctgctcgcgaccgcgacgctgctgccgttctcgatgttctcggtggaagcgatgaaggccggccacgtggtgacgatcaccgctttggttgcgctgctcgtgtgcctgatcccgacgacgatcggcggtctcttgtccgcaatcggcgtggccgggatgagccggatgatgcaggcgaacgtgatcgcgacgtcgggccgcgcagtggaagcggccggcgacgtcgacgtgctgctgctcgacaagaccggcacgatcacgctcggtaaccgccaggcatcgacgttcgtgcccgcgccgggcgtgaccgaggaagcgctggccgatgccgcgcaactgtcgtcgctcgccgacgaaacgccggaaggccgcagcatcgtcgtgctcgcgaaggagcgcttcaacattcgccagcgcgacatggggcaactgcacgcgacgttcatcggcttctccgcgcagacgcggatgagcggcgtcgacctgcccggccgcgagatccgcaagggcgcggccgacgcgatccgcaactacgtcgaatcgcacggcagccgcttcccggaagaggtgcgccgcgcggtcgatgaagtcgcgcgccgcggcagcacgccgctcgtcgtggccgacctgcatgaaggcgcggcgcgcgtactcggcgtgatcgagctgaaggacatcgtgaagggcggcatcaaggagcgcttcgcggagctgcgcaagatgggcatcaagaccgtgatggtgacgggcgacaaccggctgacggctgcggcgatcgcggcggaagcgggcgtcgacgatttcctcgcggaagcgacgccggaaaccaagctcgcgacgatccgcgaacaccaggcagcaggccgcctcgtcgcgatgaccggcgacggcaccaacgacgcaccggcactcgcgcaggccgacgtcgccgtggcgatgaacaccggcacgcaggcggcgaaggaagccggcaacatggtcgacctcgactcgaacccgacgaagctgatcgagatcgtcgagatcggcaagcagatgctgatgacgcgcggttcgctgacgacgttctcgatcgcgaacgacatcgcgaagtatttcgcgatcatcccggccgcgttcgtcacgacgtacccgcagctgcgcgtgctcgacatcatgcacctgacgtcgccggcgtccgcgatcctgtcggcggtgatcttcaacgcgctgatcatcgtcgcgctgattccgctggcactgaagggcgtcacgtaccggccgctcggcgccgcttcgctcctgcgccgcaacctgctggtgtacggcctcggcggcgtgctgctgccgttcccgttcatcaagctgatcgacatgacgctcgctgcactcggctgggcgtga

SEQ ID NO: 262 - protein, 694 aa, Burkholderia sp. 383
MTQHSATRSMFDPALLRPAIVDSFKKLTPRTQFRNPVMFCVYVGSILTTILWIAALAGQAEAPAGFILAIALWLWFTVLFANFAEALAEGRSKAQAASLRSAKKDVMAKKLNEPHPKSPIRITTATELRKGDVVLVEAGDVIPADGEVVDGVASVDESAITGESAPVIRESGGDFSSVTGGTRVLSDWIVVKVTANPGEAFLDRMIAMVEGAKRKKTPNEIALTILLVALTIVMLLATATLLPFSMFSVEAMKAGHVVTITALVALLVCLIPTTIGGLLSAIGVAGMSRMMQANVIATSGRAVEAAGDVDVLLLDKTGTITLGNRQASTFVPAPGVTEEALADAAQLSSLADETPEGRSIVVLAKERFNIRQRDMGQLHATFIGFSAQTRMSGVDLPGREIRKGAADAIRNYVESHGSRFPEEVRRAVDEVARRGSTPLVVADLHEGAARVLGVIELKDIVKGGIKERFAELRKMGIKTVMVTGDNRLTAAAIAAEAGVDDFLAEATPETKLATIREHQAAGRLVAMTGDGTNDAPALAQADVAVAMNTGTQAAKEAGNMVDLDSNPTKLIEIVEIGKQMLMTRGSLTTFSIANDIAKYFAIIPAAFVTTYPQLRVLDIMHLTSPASAILSAVIFNALIIVALIPLALKGVTYRPLGAASLLRRNLLVYGLGGVLLPFPFIKLIDMTLAALGWA

SEQ ID NO: 263 - DNA, 2154 bp, Burkholderia sp. 383
  CDS (1)..(2154): transl_table=11
atgtctctccctcccatgacaggtccgcgtcccgcgcagccaggccatgcgcgcacggccgtgcgctcgatgttcgaccccgcgctcgtgcgcccggcgatcgccgattcgttcaggaaactcacgccgcgcacgcagttccgcaacccggtgatgttctgcgtgtacgtcggcagcatcctgaccacgatcctgtggatcgccgcgctgttcggccaggccgaagcgcccgccggctttatcgtcgcgatcgcgctgtggctgtggttcaccgtgctgttcgccaacttcgccgaagcgctcgccgaagggcgctcgaaggcgcaggccgcatcgctgcgtagtgcaaaacacaacgtggtcgcgaaaaagcttgcggcgccgcgtgcgaaggcggccgtcgaagtgatggcgtcgaccgacctgcgcaaaggcgacgtcgtgctcgtcgaaaccggcgacacgatcccggccgacggcgacgtgatcgaaggcgtcgcgtcggtcgacgaatcggcgattaccggcgaatccgcaccggtgatccgcgaggcgggcggcgacttctcgtcggtgacgggcggcacgcgcgtactgtccgactggatcgtcgtgcgcgtcgccgtcaatccgggtgaggcgttcctcgaccggatgatcgcgatggtcgagggcgcgaagcgaaagaagacgccgaacgagatcgcgctgacgatcctgctcgtcgcgttgacgatcgtgatgctgctcgcaaccgccacgttgctgccgttctcgacgttcgcggtcgaagcgatgaaagccggccatgtcgtgacgatcaccgcattggtggcgctgctcgtgtgcctgatcccgacgacgatcggcgggctgttgtccgcgatcggcgtggccgggatgagccggatgatgcaggcgaacgtgatcgcgacgtcgggccgcgcggtggaagccgccggcgacgtcgacgtgctgctgctcgacaagactggcacgatcacgctcggcaaccgccaggcgtcggcgttcgtgcccgcgccgttcgtgaccgaggaagcgctggccgatgccgcgcaactgtcgtcgctcgccgacgaaaccccggaaggccgcagcatcgtcgtgctcgcgaagcagcgtttcaacctgcgcgagcgcgacatgcaggcgctgcatccggtgttcctgtcgttcagcgcgcagacgcggatgagcggtgtcgacctgttccccgcgggttctgctcccggggcggctggccgcgagattcgcaaaggtgcggcggacgcgatcaagcattacgtcgagtcccacggtggccgcgtcacgcgcgaagtcgaagcggtcgtgaccgacatcgcgcgtcgcggcagcacgccgctcgcggtggcggagcgggtggacggtgtcgctcgcgtgctcggcgtgatcgagctgaaggacatcgtgaagggcggcatcaaggagcgcttcgcggagctgcgcaagatgggcatcaagaccgtgatggtgacgggcgacaaccggctgacggccgcggcgattgcagcggaagcgggtgtcgacgatttcctcgcggaagcgacaccggaaaccaagctcgcgacgattcgcgagcaccaggcggcaggccgtctggttgcgatgacgggcgacggcacgaacgacgcgccggcgctcgcgcaggccgacgtcgccgtggcgatgaacacgggtacgcaagcggcgaaggaagcgggcaacatggttgacctcgactcgaacccgacgaagctgatcgagatcgtcgagatcggcaagcagatgctgatgacgcgcgggtcgctgacgacgttttcgatcgcgaacgacgtcgcgaagtatttcgcgatcatcccggccgcattcgcgacgacgtatccgcaattgagcgtgctcgacgtgatgcacctcgcgtcgccgtcgtcggcaatcctgtcggcggtgatcttcaacgcactgatcatcgtcgcgctgattccgctcgcgctgaagggcgtgcgctatcgcccgctcggtgccgcgccgctgctgcgcaggaacctgctgctgtacggcctcggtggcgtgctgctgccgttcccgttcatcaagctgatcgacatggtgctggtggcatgcggatgggcgtga

SEQ ID NO: 264 - protein, 717 aa, Burkholderia sp. 383
MSLPPMTGPRPAQPGHARTAVRSMFDPALVRPAIADSFRKLTPRTQFRNPVMFCVYVGSILTTILWIAALFGQAEAPAGFIVAIALWLWFTVLFANFAEALAEGRSKAQAASLRSAKHNVVAKKLAAPRAKAAVEVMASTDLRKGDVVLVETGDTIPADGDVIEGVASVDESAITGESAPVIREAGGDFSSVTGGTRVLSDWIVVRVAVNPGEAFLDRMIAMVEGAKRKKTPNEIALTILLVALTIVMLLATATLLPFSTFAVEAMKAGHVVTITALVALLVCLIPTTIGGLLSAIGVAGMSRMMQANVIATSGRAVEAAGDVDVLLLDKTGTITLGNRQASAFVPAPFVTEEALADAAQLSSLADETPEGRSIVVLAKQRFNLRERDMQALHPVFLSFSAQTRMSGVDLFPAGSAPGAAGREIRKGAADAIKHYVESHGGRVTREVEAVVTDIARRGSTPLAVAERVDGVARVLGVIELKDIVKGGIKERFAELRKMGIKTVMVTGDNRLTAAAIAAEAGVDDFLAEATPETKLATIREHQAAGRLVAMTGDGTNDAPALAQADVAVAMNTGTQAAKEAGNMVDLDSNPTKLIEIVEIGKQMLMTRGSLTTFSIANDVAKYFAIIPAAFATTYPQLSVLDVMHLASPSSAILSAVIFNALIIVALIPLALKGVRYRPLGAAPLLRRNLLLYGLGGVLLPFPFIKLIDMVLVACGWA

SEQ ID NO: 265 - DNA, 2085 bp, Burkholderia sp. 383
  CDS (1)..(2085): transl_table=11
atgtcccatatcgaaaccccgatcaatccagcggcgatgccggtcggcggcgtgccgtcgatgcgctggacggccgtgctgcgcgaggcattccgcaagctcgcgccgcgcgtccagttgaagaatcctgtgatgttcgtcgtgtatctcggcagcatcgtcacgaccgtgctgtggctgcaggcgctgaccggcacgggcgacgcgccggccggcttcatcttcgcggtcgcgtgctggttgtggttcaccgtgctgttcgcgaacgcggccgaggcgctggccgaagggcgcggcaaggcgcaggccgacgcgctgcgtgcggcgcgcaagcgtgtgtacgcgaaggtgctcgacgagccgaagcaattcggcagcaccagccatcgcgtgccgagcgacgagctcgccgccggcagcatcgtgctcgtcgaggccggcgacacgattccggccgatggcgaagtgatcgacggcgttgcgtcggtcgacgaatcggcgatcacgggtgaatccgcgccggtgatccgcgagtcgggcggcgatttctcgtcggtgacgggcggtacgcgcgtgctgtccgactggatcatcgtgaagatcaccgcgcaaccgggcgaggcatttctcgaccggatgatcgcgatggtcgaaggcgcgaagcgcggcaagacgccaaacgaagtcgcgctgacgatcctgctcgtcgcactgaccatcatcttcctgctcgtgtgcgtgacgctgctgccgttctcgcagttcagcgtgctgctgaacgcgtcgggcacggcggtgagcctgaccgtgctgatcgcgctgctcgtctgcctgatcccgacgacgatcggtgcgctgctgtcggcgatcggcatcgcggggatgagccgcatgatgcgtgcgaacgtgcttgcgacgtcgggccgcgcgatcgaggcggccggcgacgtcgacgtgctgctgctcgacaagaccggcacgatcacgctcggtaaccgcgaggccgtgcagttccggccggcgccgggcgtggacgagcgtgcgctggccgaggccgcgcaactgtcgtcgctcgctgacgagacacccgaggggcgctcgatcgtcgcgctcgcgaagcagcgcttctcgctgaacgtggccgcgaccgccggcagtgtcaccgtgccgttcagcgcgcgtacgcggatgagcggcctcgacatcggcgagcgtcaggtgcgcaaaggcgcggcgtcggcgatccgcgcgcacgtcgatgcgctcggcggcgtgtttcctcaagcggtcgagacggctgtcaacgatatcgcgcgacgcggcggcacgccgctcgtcgtcgccgacggctcgcgcgtgctcggcgcgatcgagctgaaggacatcgtcaagcacgggatcgccgcgcgcttcgccgagctgcgcaaggtcggcgtgaagaccgtgatgatcaccggcgacaaccggctcaccgcggccgcgatcgcggcggaagccggcgtcgacgactacctcgccgaagcgacgcccgaggacaagctgcggctgatccgcgagcaccaggcgaagggccatctcgtcgcgatgacgggcgacggcaccaacgacgcgcccgcgcttgcgcaggccgacgtggccgtcgcgatgcacagcggcacgcaggcggcgaaggaggcggccaacatggtcgacctcgacagcaacccgacgaagctgatgcaggtggtcgaggtcggcaagcagatgatcatgacgcgcggcgcgctgaccacgttcagcgtggccaacgatctcgcgaagtatttcgcgatcatcccggccgcgttcgtcgcgacgtatccggcgctcggcgcgctgaacgtgatggggctgcacagcccgacgtcggcgatcctgtcggcggtgatcttcaatgcgctgatcatcgtcgcgttgatcccgctcgcgctgaagggcgtgaagtatcgcgcggagccggccgagaagctgctggggcgcaacctgctgatctatggcgtgggcgggatcatcgcgccgttcatcggcatcaagctgatcgacatgctgttgacgccgtttatctga

SEQ ID NO: 266 - protein, 694 aa, Burkholderia sp. 383
MSHIETPINPAAMPVGGVPSMRWTAVLREAFRKLAPRVQLKNPVMFVVYLGSIVTTVLWLQALTGTGDAPAGFIFAVACWLWFTVLFANAAEALAEGRGKAQADALRAARKRVYAKVLDEPKQFGSTSHRVPSDELAAGSIVLVEAGDTIPADGEVIDGVASVDESAITGESAPVIRESGGDFSSVTGGTRVLSDWIIVKITAQPGEAFLDRMIAMVEGAKRGKTPNEVALTILLVALTIIFLLVCVTLLPFSQFSVLLNASGTAVSLTVLIALLVCLIPTTIGALLSAIGIAGMSRMMRANVLATSGRAIEAAGDVDVLLLDKTGTITLGNREAVQFRPAPGVDERALAEAAQLSSLADETPEGRSIVALAKQRFSLNVAATAGSVTVPFSARTRMSGLDIGERQVRKGAASAIRAHVDALGGVFPQAVETAVNDIARRGGTPLVVADGSRVLGAIELKDIVKHGIAARFAELRKVGVKTVMITGDNRLTAAAIAAEAGVDDYLAEATPEDKLRLIREHQAKGHLVAMTGDGTNDAPALAQADVAVAMHSGTQAAKEAANMVDLDSNPTKLMQVVEVGKQMIMTRGALTTFSVANDLAKYFAIIPAAFVATYPALGALNVMGLHSPTSAILSAVIFNALIIVALIPLALKGVKYRAEPAEKLLGRNLLIYGVGGIIAPFIGIKLIDMLLTPFI

SEQ ID NO: 267 - DNA, 2049 bp, Rhodospirillum rubrum ATCC 11170
  CDS (1)..(2049): transl_table=11
atgagcatccatcgccccaggcatgccgcgctgttcgagcgcgccctggtcgtgcccgccgcccgcaacgcggtcttgaagctcgacccgcgaagcctgatcgccaatccggtgatgttcgtcaccgccgtcgtcgctgtgctctccaccgtgctgttcgtgcgcgacctgatccatggcctcggccccgtcgccgtcgaggggcagatcgccctgtggctgtggttcaccgtgctctttgccaatttcgccgaggcgatggccgagggccggggcaaggcccaggccgactccttgcgcaagacgcgtaccgaaaccttggcgcgcaagctctccagcccgacggccaccgccgagcaaagcgtctcggcggccagcttgcgcagcggcgatctggtggtctgcgaagccggcgacgtcatccccggcgacggcgatgtgatcgtcggcatcgccacggtcgatgaatcgccgatcaccggcgaatccgccccggtcatccgcgaaagcggcggcgatcgctcggcggtcaccggcggcacccgggtggtgtcggaccgcatcgtcgtgcgcatcaccgtcaatcccggcgagtcctttctggatcgcatgatcaatttggtcgaaggggccaagcgccagaagacccccaacgaaatcgccctgactatcttgcttgtcggattgacgctgatcttcctgctggtggtcgccagcctgccggccttcgccgccttctcgggggcgatgatcccggtggtcttcctgctcgccctgttcgtcaccctgattcccaccaccatcggcggcctgctttcggccatcggcatcgccggcatggaccggctggtcaccttcaacgtcatcgccaaatccggccgggcggtcgaggcggcgggcgatatcgacgtgctgctgctcgataaaaccggcaccatcaccctgggcagccgccaagccgccgaattcctgccggtttcgggcatcaacgagcgcgatctggccgaggccgccttcttgtcatcgctggaggatcagacgcccgagggcaagtcgatcgtcgccctggcccgccagcgcttcggcttcaccgggggcgagggcacggcgatgcgcttcattccctttaccgcccaaacacggatgagcggcgtcgatttcggcgatagcgaaatccgcaagggggcctcggacgccgtgctcgcctatcttcaggcccatggcggaccgggggcggcgcgcgatctggtctccgccgtcgaacgcgtcgccaaaagcggcggcacgccgctggtcgtcgcccgcgataatcgggcccttggcgtggtccatctgaaggacatcgtcaagccgggcatccgcgagcgcttcgccaccttgcgcgacatgggcatccgcacggtgatggtcactggcgacaatccgctgaccgcggccgccatcgccgccgaggccggggttgacgacgtgctggccgaggccacccccgagcgcaagctggaactgatccgcaaggaacaggccgagggacggctggtcgccatgtgcggcgacggctccaacgacgccccggccctggcccaggccgatgtcggcgtggcgatgaacaccggtacccaggcggcgcgcgaagccggcaatatggtcgatctggaaagcgatccgaccaagctgatcgaaatcgtcatgatcggtaaacagctgctgatgagccggggctctttgaccaccttttccatcgccaatgatgtcgccaagtatttcgccatcatcccggcgctgttcctggccagctttccccagcttcaggccctgaacgtcatggggttgtcgagcccgcaaagcgccattctctcggcgatcatcttcaacgccctggtcatcatcgccctgatcccgctggccctgaaaggcgtcgcctatcgcccggccgccgcggccgatctgttgcggcgcaatctgttgatctacggtctgggcggccttgccgcgcccttcatcggcatcaaggtgatcgatatgctggtcaccgccgtcggtttggcctga

SEQ ID NO: 268 - protein, 682 aa, Rhodospirillum rubrum ATCC 11170
MSIHRPRHAALFERALVVPAARNAVLKLDPRSLIANPVMFVTAVVAVLSTVLFVRDLIHGLGPVAVEGQIALWLWFTVLFANFAEAMAEGRGKAQADSLRKTRTETLARKLSSPTATAEQSVSAASLRSGDLVVCEAGDVIPGDGDVIVGIATVDESPITGESAPVIRESGGDRSAVTGGTRVVSDRIVVRITVNPGESFLDRMINLVEGAKRQKTPNEIALTILLVGLTLIFLLVVASLPAFAAFSGAMIPVVFLLALFVTLIPTTIGGLLSAIGIAGMDRLVTFNVIAKSGRAVEAAGDIDVLLLDKTGTITLGSRQAAEFLPVSGINERDLAEAAFLSSLEDQTPEGKSIVALARQRFGFTGGEGTAMRFIPFTAQTRMSGVDFGDSEIRKGASDAVLAYLQAHGGPGAARDLVSAVERVAKSGGTPLVVARDNRALGVVHLKDIVKPGIRERFATLRDMGIRTVMVTGDNPLTAAAIAAEAGVDDVLAEATPERKLELIRKEQAEGRLVAMCGDGSNDAPALAQADVGVAMNTGTQAAREAGNMVDLESDPTKLIEIVMIGKQLLMSRGSLTTFSIANDVAKYFAIIPALFLASFPQLQALNVMGLSSPQSAILSAIIFNALVIIALIPLALKGVAYRPAAAADLLRRNLLIYGLGGLAAPFIGIKVIDMLVTAVGLA

SEQ ID NO: 269 - DNA, 2112 bp, Burkholderia thailandensis E264
  CDS (1)..(2112): transl_table=11
atgactcaacattccgctacgcgatcgatgttcgacccggcgctcgtgcgcccggcgatcgtcgattcgttcaagaaactcacgccgcgcacgcagttgcgcaacccggtgatgttctgcgtgtacgtcggcagcctcctggcgacgattctctggatcgccgcgctgatggggcaggccgaggcgcccgcgggcttcattctcgcggtcgcgctgtggctgtggttcacggtgctgttcgcgaacttcgccgaggcgctcgccgagggccgctcgaaggcgcaggccgcgtcgcttcgcagcgcgaagaaggacgtgatggccaagaagctcaacgagccgcatccgaagtcgcccgtgcgcatcacgacggcgtcggatctgcgccgcggcgacgtcgtgctcgtcgagacgggcgacacgattccggccgacggcgaggtgatcgagggcgtcgcttcggtcgacgaatcggcgatcaccggtgaatcggcgcccgtgatccgcgaatcgggcggcgacttctcgtcggtgacgggcggcacgcgcgtgctgtccgactggatcgtcgtcaaggtgacggcgaacccgggcgaggcgttcctcgaccggatgatcgcgatggtcgagggcgcgaagcgcaagaagacgccgaacgagatcgcgctcacgatcctgctcgtcgcgctgacgatcgtgatgctgctcgccaccgcgacgctgctgccgttctcgatgttctcggtcgacgcgatgaaggcgggccacgtcgtgacgatcaccgcgctcgtcgcgctgctcgtgtgcctgattccgacgacgatcggcgggctgctgtccgcgatcggcgtggccggcatgagccggatgatgcaggcgaacgtgatcgcgacgtcgggccgcgcggtggaggcggcgggcgacgtcgacgtgctgctgctcgacaagacgggcacgatcacgctcggcaaccggcaggcgtcggcgttcgtgcccgcgcccgacgtgaccgaagcgatgctcgccgacgccgcgcagctgtcgtcgctcgccgacgagacgccggagggccgcagcatcgtcgtgctcgcgaaggagcgcttcaacattcgccagcgcgacatgggcgcgctgcatgcggtgttcctgtcgttttccgcgcaaacgcgcatgagcggtgtcgatctgttccccaacgggccttccgccggagcgcccggccgcgagattcgcaagggcgcggccgacgcggtgaagaagtatgtcgagagctacggcgggcgctttcccgccgaggtgacgaacgcggtgacggacgtcgcgcgccgcggcagcacgccgctcgtcgtcgccgagaagcagggggacgttgcgcgcgtgcttggcgtgatcgagctgaaggacatcgtgaagggcggcatcaaggagcgcttcgcggaactgcgcaagatgggcatcaagaccgtgatggtgacgggcgacaaccggctgaccgcggcggcgatcgcggcggaggcgggcgtcgacgatttcctcgcggaagcgacgcccgagacgaagctctcgacgattcgcgagcaccaggcggcgggccggctcgtcgcgatgacgggcgacggcacgaacgacgcgccggcgctcgcgcaggcggatgtggccgtcgcgatgaacaccggcacgcaggccgcgaaggaagcgggcaacatggtcgacctcgactcgaatccgacgaagctcatcgagatcgtcgagatcggcaagcagatgctgatgacgcgcggctcgctcacgacgttctcgatcgcgaacgacatcgcgaagtacttcgcgatcattccggccgcgttcgcgacgacctatccgcagctgaacgcgctgaacgtgatgcatctcgcgacgcccgcgtccgcgatcatgtcggccgtgatcttcaacgcgctcatcatcgtgctgctgattccgcttgcgctcaagggcgtcaagtatcgtccgctcggcgccgcgacgctgctgcgccgcaatctgctcgtctacggcctgggcgggattctcgtgccgttcgtcggcatcaagctgatcgacgtcgtgctcgccgcgctcggctgggtttaa

SEQ ID NO: 270 - protein, 703 aa, Burkholderia thailandensis E264
MTQHSATRSMFDPALVRPAIVDSFKKLTPRTQLRNPVMFCVYVGSLLATILWIAALMGQAEAPAGFILAVALWLWFTVLFANFAEALAEGRSKAQAASLRSAKKDVMAKKLNEPHPKSPVRITTASDLRRGDVVLVETGDTIPADGEVIEGVASVDESAITGESAPVIRESGGDFSSVTGGTRVLSDWIVVKVTANPGEAFLDRMIAMVEGAKRKKTPNEIALTILLVALTIVMLLATATLLPFSMFSVDAMKAGHVVTITALVALLVCLIPTTIGGLLSAIGVAGMSRMMQANVIATSGRAVEAAGDVDVLLLDKTGTITLGNRQASAFVPAPDVTEAMLADAAQLSSLADETPEGRSIVVLAKERFNIRQRDMGALHAVFLSFSAQTRMSGVDLFPNGPSAGAPGREIRKGAADAVKKYVESYGGRFPAEVTNAVTDVARRGSTPLVVAEKQGDVARVLGVIELKDIVKGGIKERFAELRKMGIKTVMVTGDNRLTAAAIAAEAGVDDFLAEATPETKLSTIREHQAAGRLVAMTGDGTNDAPALAQADVAVAMNTGTQAAKEAGNMVDLDSNPTKLIEIVEIGKQMLMTRGSLTTFSIANDIAKYFAIIPAAFATTYPQLNALNVMHLATPASAIMSAVIFNALIIVLLIPLALKGVKYRPLGAATLLRRNLLVYGLGGILVPFVGIKLIDVVLAALGWV

SEQ ID NO: 271 - DNA, 2163 bp, Frankia sp. CcI3
  CDS (1)..(2163): transl_table=11
atgtccacctcgaccattgcgggtacgccggttccggcgcccgcgccgaccccgccgccggctccccggcgagtgcagggggggctgctcgacccgacgatgctcctgcggtcgacgccgggcgcgctgcgcaagctcgacccgcgcacgctgtggcgcaacccggtgatgttcatcgtggagatcggcgcggtgttcaccaccgtcctggcgattcgggacgagaccgcgttcagctggctgatcacggtctggctctggctgaccgtgctgttcgccaacctcgccgaagcggttgcggagggccgcggcagggcccaggcggacgcgctacgccgcaccaagactgacacgatcgcccaccggctgcgcgacgacggccggcttgaggaggtgcccgcgccgcggctgcggcagggcgacaccgtcgtcgtcgaggccggtcagttcatccccggggacggcgacgtcatcgaggggattgccagcgttgacgagtcggccatcaccggtgagtccgcgccggtgatccgggagtccggcggtgatcgcagttcggtgaccggcggcacccgggtgctgtcggaccggatcgtcgtgcggatcactcagaaaccgggcgagagcttcatcgaccggatgattgcgctggtggagggggcgaatcggcagaagaccccgaacgagatcgcgctgaacatcctgctggccgccctgacgctcacctttctgctcgctgtcgcgaccctgcagccgttggcgatcttctcgaaggcgcagctgccgggcgtgccggacaccggtgcgctgaacggcgacggcctgtccgggatcgtgatggtgtcactgctggtctgcctgattccgacgacaatcggcgcgttgctgtccgcgatcggcatcgccggcatggaccggctggtccaacgcaacgtgctggccatgtccggccgggccgtcgaggccgccggcgatgtcaataccctcctgctcgacaagaccgggacgatcaccattggcaaccgggaggcacgggccttcgtcccggtcggcggcacatcggagaatgacctggccagcgcggcccagctgtcctcgctcgcggacgagacccccgagggccgctccatcgtcgtgcacgcgaagaacacctacggcctgcgggagcgcggtcccggcgagctcagccacgcccggttcgtggcgttcaccgcccagacccggatgtccggggtcgacctcgatgcgatcgacgggggggcgaaccggcaggtgcgcaagggagcggccagcgcggtgatcacctgggtgcgcgatcttggtggcgccgtgcccgcggagaccggggagatcgtggacggcatctccgcttccggtggcaccccgctggtcgtcgccgaggccaccgatggcggcctggcccgcgtcctgggcgtgatccagctcaaggacgtcgtcaagcagggcatgcgtgagcggttcgacgagatgcgccggatgggcatccgcaccattatgatcaccggtgacaatccgctgaccgcccggtcgatcgccgaggaggcgggcgtcgacgacttcctcgccgaggccacgcccgaagacaagatggccctgatcaaacgagagcaggccggcggcaagctcgtcgcaatgaccggcgacggcaccaacgacgcccctgcgctcgcccaggccgatgtcggcgtggcgatgaacaccggcacgtcggccgccaaggaggccggcaacatggtcgacctcgactccaacccgacgaagctgatcgagatcgtcgagatcgggaagcagctgctcatcacccgcggggcgctgaccaccttctcgatcgccaacgacatcgccaagtacttcgcgatcatcccggcgatgttcgcggcgatctaccccgggctggacgcgctcaacctcatgcggctgcacagcccgcagtcggcgatcctctccgccgtcatcttcaacgcgctcgtcatcgtcgccctgatcccgctggcgctgcgcggcgtccgttacaccccgtccagcgcgtcggcgatgctgcgtcgcaacctctacatctacggcgtcggcggtctgatcatcccgttcgtcgggatcaaactcatcgaccttgtcatccagttcatcccgggagcccggtaa

SEQ ID NO: 272 - protein, 720 aa, Frankia sp. CcI3
MSTSTIAGTPVPAPAPTPPPAPRRVQGGLLDPTMLLRSTPGALRKLDPRTLWRNPVMFIVEIGAVFTTVLAIRDETAFSWLITVWLWLTVLFANLAEAVAEGRGRAQADALRRTKTDTIAHRLRDDGRLEEVPAPRLRQGDTVVVEAGQFIPGDGDVIEGIASVDESAITGESAPVIRESGGDRSSVTGGTRVLSDRIVVRITQKPGESFIDRMIALVEGANRQKTPNEIALNILLAALTLTFLLAVATLQPLAIFSKAQLPGVPDTGALNGDGLSGIVMVSLLVCLIPTTIGALLSAIGIAGMDRLVQRNVLAMSGRAVEAAGDVNTLLLDKTGTITIGNREARAFVPVGGTSENDLASAAQLSSLADETPEGRSIVVHAKNTYGLRERGPGELSHARFVAFTAQTRMSGVDLDAIDGGANRQVRKGAASAVITWVRDLGGAVPAETGEIVDGISASGGTPLVVAEATDGGLARVLGVIQLKDVVKQGMRERFDEMRRMGIRTIMITGDNPLTARSIAEEAGVDDFLAEATPEDKMALIKREQAGGKLVAMTGDGTNDAPALAQADVGVAMNTGTSAAKEAGNMVDLDSNPTKLIEIVEIGKQLLITRGALTTFSIANDIAKYFAIIPAMFAAIYPGLDALNLMRLHSPQSAILSAVIFNALVIVALIPLALRGVRYTPSSASAMLRRNLYIYGVGGLIIPFVGIKLIDLVIQFIPGAR

SEQ ID NO: 273 - DNA, 2085 bp, Burkholderia xenovorans LB400
  CDS (1)..(2085): transl_table=11
atgactgaacataatgcaaccaggtccatgttcgacccggcgctggtgcgcccggcgatcgtggactccttcaagaagctcacgccgcgcacgcagttccgcaatccggtgatgttctgcgtgtacgtgggcagcattctcaccaccattctctggatcgccgcgctcggcggccaggccgaggcgcccgcgggcttcattctcgcggtcaccttgtggctgtggttcacggtgctgttcgccaacttcgcggaggcgctcgccgaaggccggtcgaaggcccaggccgcgtcgctgcgcagcgcgaagaaagacgtgatggccaagaagttgaacgagccgcatccgaagtcgccgatccgcattctgacggcttccgacctgcgcaagggcgatgtcgtgctggtcgaaaccggtgacgtgattccggccgacggcgaagtggtcgaaggtgtcgcgtcggtcgacgagtcggcgatcacgggcgaatccgcgccggtgatccgcgagtcgggcggcgacttttcgtcggtgacgggcggcacgcgcgtgctgtcggactggatcgtggtgcgcgtcacggcgaatccgggcgaggcgttcctcgatcgcatgatcgcgatggtggaaggcgcgaagcgtcagaagacgccgaacgaaatcgcgctgaccattttgctggtcgcgttgacgatcgtgatgctgctggccaccgccacgctgctgccgttctccatgttctctgtcgaagccgcgaaagcgggccacgtggtgacgattaccgcgctggtcgcgctgctggtgtgtctgattccgaccacgatcggcggcttgctgtccgcgatcggcgtggcgggcatgagccggatgatgcaggcgaacgtgatcgccacctcgggccgcgcggtggaagccgccggcgacgtcgacgtgctgttgctcgacaagaccggcaccatcacgctcggcaatcgccaggcttcgcagttcgtgccggcgccgggcttgacggaagaagcgctcgcggatgccgcgcaactgtcgtcgcttgccgacgaaacgccggaaggccgcagcatcgtcgtgctggcgaagcagcgcttcaatatccgtcaacgcgatatggcttcgctgcatgccgtgtttctcgcgttcaccgcgcaaacgcgcatgagcggcgtcgatctgcctggccgggaaatccgcaagggcgcggccgacgcagtgaagaactatgtcgaagcgaatggcggccggttcccgaacgaagtcagcaacgccgtggccgaagtcgcccgccgtggcagcacgccgctcgtggtcgccgagaagggcgagcagggcgcgcgcgtgctcggcgtgatcgagctgaaggacgtggtgaagggcggcatcaaggagcgtttcgccgaactgcgcaagatgggtatcaagaccatcatggtgacgggcgacaaccggctgaccgcggcggcgattgccgctgaagccggcgtcgacgatttcctcgccgaagccacgccggaagcgaagctctccacgattcgcgcgcaccaggccgaaggccgcctcgtggcaatgacgggcgacggcaccaacgacgccccggcgctcgcgcaggccgacgtcgcggtggcgatgaacaccggcacgcaggccgcgaaggaagcgggcaacatggtcgacctcgattcgaatccgaccaagctgatcgagatcgtcgagatcggcaagcagatgctgatgacgcgcggctcgctcaccacgttctcgattgccaacgacgtcgccaaatacttcgcgatcattcctgccgcgttcgccacgacctatccggcgctgaacgcgctgaacgtgatgcatctggccacgccggcctcggcgatcatgtcggcggtgattttcaacgcgctgatcatcgtgctgctgattccgctggcgctcaagggcgtgcgttatcgcgcgctgggcgcggcgatcctgctgcgccgcaatctgctgatttacggtttgggcgggatcatcgtgccgttcatcggcatcaagctgatcgatatggtgctggccgcattcggttgggtctaa

SEQ ID NO: 274 - protein, 694 aa, Burkholderia xenovorans LB400
MTEHNATRSMFDPALVRPAIVDSFKKLTPRTQFRNPVMFCVYVGSILTTILWIAALGGQAEAPAGFILAVTLWLWFTVLFANFAEALAEGRSKAQAASLRSAKKDVMAKKLNEPHPKSPIRILTASDLRKGDVVLVETGDVIPADGEVVEGVASVDESAITGESAPVIRESGGDFSSVTGGTRVLSDWIVVRVTANPGEAFLDRMIAMVEGAKRQKTPNEIALTILLVALTIVMLLATATLLPFSMFSVEAAKAGHVVTITALVALLVCLIPTTIGGLLSAIGVAGMSRMMQANVIATSGRAVEAAGDVDVLLLDKTGTITLGNRQASQFVPAPGLTEEALADAAQLSSLADETPEGRSIVVLAKQRFNIRQRDMASLHAVFLAFTAQTRMSGVDLPGREIRKGAADAVKNYVEANGGRFPNEVSNAVAEVARRGSTPLVVAEKGEQGARVLGVIELKDVVKGGIKERFAELRKMGIKTIMVTGDNRLTAAAIAAEAGVDDFLAEATPEAKLSTIRAHQAEGRLVAMTGDGTNDAPALAQADVAVAMNTGTQAAKEAGNMVDLDSNPTKLIEIVEIGKQMLMTRGSLTTFSIANDVAKYFAIIPAAFATTYPALNALNVMHLATPASAIMSAVIFNALIIVLLIPLALKGVRYRALGAAILLRRNLLIYGLGGIIVPFIGIKLIDMVLAAFGWV

SEQ ID NO: 275 - DNA, 2232 bp, Ralstonia metallidurans CH34
  CDS (1)..(2232): transl_table=11
atgcaacaacaatccaccgcgacacgctccagcgctgccggcacggcgtcgcgcaatccggcaccgggttccacggtgatgacaggcggcggcctgccaggccatccgcgtccctcgcgcggcatgatgtcgcccgagctggtgaagccggccatcatcgatgccttccgcaagctgaatccacgcgatcagttgcgcaacccggtgatgttcgtggtctacgccggcagcatcctgacgtcgatcctgtgcgtgcgtgcctggctgcacccgacgccgggtggcgaatcggcaggcttcatcctggccgtgacggtatggctctggttcacggtactgtttgcgaacttcgccgaagcactggctgaaggtcgcagcaagcagcaggccgctgcgctgcgcggactcaagaccaccaccatggcacgcgtggtgcgcgccggccatcgcgatgcgcgcgcgcagggggctaccgagcagcgtgcggccacggaactgcgcaagggcgatgtcgtgctcgtcgaggccggcgacatgatccctggcgatggcgaagtcatcgagggcgtggcgtcggacgatgaaagcgccatcaccggcgaatcggcgccggtgatccgtgagtcgggtggcgacttctcatcggtcactggtggcacgcgtgtgctgtcggactggatcatcgtgcgcatcacggccaaccccggcgagagcttcatcgaccgcatgatcagcatggtcgaaggtgccaagcgccagaagacaccgaacgaactcgcgctgacgatcctgctggtggggctcacgctggtgctgttgctggccacagccacgctgcagccgtattcgctctacgcggtgctggtgaccaaggccggcgtgccggtctcggtgacggtgctcgtggcgctgctggtctgcctgattccgaccacgatcggtggcctgctgtcggcgatcggcgtagccggcatgagccgcatgatggaagcgaatgtgatcgccacgtcgggccgcgcggtggaagcggcgggcgatgtcgacgtgctgctgctcgacaagaccggcacgatcacacatggcaatcgccaggcctcgcgctttatctgtgcgcccggcgttaccgagcgtcagctcgccgaggccgcgtggctgtcgtcgctggccgatgaaacaccggaaggccgcagcatcgttgtgctggcacgccagcagtcagacgtgagcgcgccggagatgggcgagcggggactggcagcgccggtgttcgtgccgttcaccgcgcagacgcgcatgagcggtgtcgacgtggccaatggccagatcgtgcgcagcgtgcgcaagggcgcggccgatgcggtgcgccgctacgtgaccgagcgcgcgggcaagttccccgatgtggtgatgcaggccgtcgatgatgtggcgcgcgcgggcagcacgccgctggtggtggcggaatccatcgcgcagggtaccgaggaatcggtgcgagtgctcggcgtgatcgagctcaaggacatcgtcaaggccggcatccgcgagcgctttgtcgaactgcgcaagatgggtatccgcacggtgatgatcaccggcgacaaccggttgaccgctgcgtcgatcgcggccgaggccggtgtcgacgacttcctcgccgaggccacgccagaggccaagctggcgctgattcgcgagtaccagagcgaagggcgtcttgtggcgatgaccggcgacggtaccaacgatgcaccggcgctggcgcaggccgatgtggccgtggcgatgaacagcggcacgcaggccgcgcgcgaggccggcaatatggtcgacctggacagcaatccaaccaagctgatcgagatcgtagagatcggcaagcagatgctgatgacgcgcgggtcgttgaccacgttcagcgtggccaacgacgtggccaagtatttcgccatcatcccggccgcgttcgcgaccacctatccgcagctcaacctgctcaacgtgatggggctgtcgacaccgggctcggccatcatgtccgccgtgatcttcaatgcgctcatcatcgtcgcgctgattccgctggcgttgcgcggcgtggtgtaccgcccgctgggcgcggcggtgctgctgcgccgcaacctgctgatctatggcctgggtggcatcgtggtgccgttcgtcgggatcaagctgatcgacatgttgctgacgatgttcggctgggtctga

SEQ ID NO: 276 - protein, 743 aa, Ralstonia metallidurans CH34
MQQQSTATRSSAAGTASRNPAPGSTVMTGGGLPGHPRPSRGMMSPELVKPAIIDAFRKLNPRDQLRNPVMFVVYAGSILTSILCVRAWLHPTPGGESAGFILAVTVWLWFTVLFANFAEALAEGRSKQQAAALRGLKTTTMARVVRAGHRDARAQGATEQRAATELRKGDVVLVEAGDMIPGDGEVIEGVASDDESAITGESAPVIRESGGDFSSVTGGTRVLSDWIIVRITANPGESFIDRMISMVEGAKRQKTPNELALTILLVGLTLVLLLATATLQPYSLYAVLVTKAGVPVSVTVLVALLVCLIPTTIGGLLSAIGVAGMSRMMEANVIATSGRAVEAAGDVDVLLLDKTGTITHGNRQASRFICAPGVTERQLAEAAWLSSLADETPEGRSIVVLARQQSDVSAPEMGERGLAAPVFVPFTAQTRMSGVDVANGQIVRSVRKGAADAVRRYVTERAGKFPDVVMQAVDDVARAGSTPLVVAESIAQGTEESVRVLGVIELKDIVKAGIRERFVELRKMGIRTVMITGDNRLTAASIAAEAGVDDFLAEATPEAKLALIREYQSEGRLVAMTGDGTNDAPALAQADVAVAMNSGTQAAREAGNMVDLDSNPTKLIEIVEIGKQMLMTRGSLTTFSVANDVAKYFAIIPAAFATTYPQLNLLNVMGLSTPGSAIMSAVIFNALIIVALIPLALRGVVYRPLGAAVLLRRNLLIYGLGGIVVPFVGIKLIDMLLTMFGWV

SEQ ID NO: 277 - DNA, 2034 bp, Acidobacteria bacterium Ellin345
  CDS (1)..(2034): transl_table=11
atgtccccaacccaacgcaaatcgctctgggacccgaagatcgtacgtcgcgcctcgcttgaggcactgatcaagctcaacccgaagaagatgacgggcaatcccgtgatgttcgtcgtggaagttggcagcgtgatcactacggcgctgctcgtcgttcatccgcacacggcgttcaagttcaatctgcaaatcacattgtggttgtggttcaccgtgctctttgcgaactttgcggaagcgatggcggaagggcgcgggaaagcgcaggccgatacgctccgcaaagcccggagcgaaaccatcgcgcatcgcttgctgccgaacggcaacaccgaagagatcgcaagctcgaagctgcgagccaacgacatcgtccttgtcgtcgccggccagatgatccctggcgatggagagatcatcgagggtgtcgcctcggttgacgagtcagcgatcacgggtgaatccgcgccggtcattcgcgaatctggtggcgatcgctcggcggttactggcggcacacgtgtcctctccgatcagatcaaggtgaagattacgtcgaaccccggtgagactttcctcgatcgcatgatcgcgctggtggaaggcgcagagcgtcagaagacgccgaacgagatcgcgcttaacatcctgcttgcaggattgacgatcatcttcttgctcgcggtcgtcacgttgcagccgttcgcgatctactccggagcgcagcagacgatcttcgtccttgtctcgttgctcgtttgccttatcccgacaacgatcggcggattgctctccgcaatcggcatcgccggcatggatcgcctggtgcagcacaatgtgcttgcaatgtcggggcgcgcggtggaagccgcgggtgacgtgaacactctgctactcgacaagaccggcacgatcacgctgggaaatcgccaggcgtcgaagttcatgccggcgcccggtgtgaccgaagccgaacttgccgatgcggcgcagctctcctcgctcgccgacgaaactcccgaggggcgttccatcgtggtgctcgcgaaagagaagtacaatcttcgcggtcgcgagctcggcaatcacgaagcacacttcgttccgttcacggcacaaacccgcatgtcgggcgtgaatctcaatggtttcgagatccgcaagggttcggtggacgccatcgagcgttatctcgtcgacaactccaagcccattcctgatgaggtaaaggccacggtcgagcaggttgcgcgtaccggcggcacgccactggttgttgcggagcgaagccgtggcgcacttggcgtaatcgagctgaaggacatcgttaagggcggcatgcgcgagcgcttcgatcaactccgtgccatgggcattcgcaccgtgatgatcaccggcgacaatccgcttaccgccgctgcaattgcgcgggaagctggtgtggatgacttcctggcgcaggccacgccgaaagacaaaatggacctcatccgcaaagaacaggctgacggcaaactcgtggcgatgaccggcgacggcaccaacgatgcgcccgcgcttgcgcaagctgatgttggcgttgccatgaacactggcacgcaagctgcgaaagaagccggcaacatggtggacctcgattcgaacccgacaaagctgatcgaagtcgtcgagatcggcaagcaattgttgatgacccgcggcgccctgacgacgttctccatcgcgaatgacgtcgcaaaatactttgccattattcccgcgatgtttgccgcaaccttcccagtgcttcaggccctgaacgtcatgcgtctcaagacgccggaatcggcaattctttcggccgtgattttcaacgcgatcatcatcatcgcgctcatcccgctagcactgcgtggcatcaagtaccgccccatgggcgctgcggccatgctacgcagaaacctggtgatctacggtgtgggcggcgtaattgttccgttcatcggaatcaagctcatcgacatgctcattactgcagcgcgtttggcatag

SEQ ID NO: 278 - protein, 677 aa, Acidobacteria bacterium Ellin345
MSPTQRKSLWDPKIVRRASLEALIKLNPKKMTGNPVMFVVEVGSVITTALLVVHPHTAFKFNLQITLWLWFTVLFANFAEAMAEGRGKAQADTLRKARSETIAHRLLPNGNTEEIASSKLRANDIVLVVAGQMIPGDGEIIEGVASVDESAITGESAPVIRESGGDRSAVTGGTRVLSDQIKVKITSNPGETFLDRMIALVEGAERQKTPNEIALNILLAGLTIIFLLAVVTLQPFAIYSGAQQTIFVLVSLLVCLIPTTIGGLLSAIGIAGMDRLVQHNVLAMSGRAVEAAGDVNTLLLDKTGTITLGNRQASKFMPAPGVTEAELADAAQLSSLADETPEGRSIVVLAKEKYNLRGRELGNHEAHFVPFTAQTRMSGVNLNGFEIRKGSVDAIERYLVDNSKPIPDEVKATVEQVARTGGTPLVVAERSRGALGVIELKDIVKGGMRERFDQLRAMGIRTVMITGDNPLTAAAIAREAGVDDFLAQATPKDKMDLIRKEQADGKLVAMTGDGTNDAPALAQADVGVAMNTGTQAAKEAGNMVDLDSNPTKLIEVVEIGKQLLMTRGALTTFSIANDVAKYFAIIPAMFAATFPVLQALNVMRLKTPESAILSAVIFNAIIIIALIPLALRGIKYRPMGAAAMLRRNLVIYGVGGVIVPFIGIKLIDMLITAARLA

SEQ ID NO: 279 - DNA, 2061 bp, Myxococcus xanthus DK 1622
  CDS (1)..(2061): transl_table=11
atgtcctcgcctgcttcgaaaccggcgtcgctgctggacgcctcactgctcaaacccgcgatggtggacagcctgcgaaagctccacccgcgcgacgtggcccgcaaccccgtcatgttcgtggtgtgggctgggagtctgctcaccacggtgttggtggtgaaggatttggtggcgccgcgcccggatgccgcgccgctgggcttcaccgtgcaggtgacgctgtggctgtggttcaccgtgctcttcgccaacttcgcggaggccgtggcggagggccgcggcaaggcccaggctggcgccctgcggaagatgcgcaaggagaccaccgcgcgccgctggaaggacgggcgcgaggagcgcgtgcccgcgccggacctgcgcaagggggacgaggtgatttgcgaggccggggacctcatccccggtgacggtgaggtggtggagggcatcgccagcgtggacgagtccgcgattaccggcgagtccgcgcccgtcatccgggagtcgggtggtgaccgctcggcggtgacgggcggaacgaaggtgctctccgaccgcatccgcgtgcgcatctccgccaaccccggcgactccttcctggaccggatgattggcctggtggaaggcgcggcccggcagaagacgcccaacgaggtggcgctccacatcctgctggtggggctcaccctcatcttcctgttggcgtgcgtgacgctggtgccgctggcgctctactcgggagtgccgctgtcgggcacggcggtggtggcgctgctggtgtgcctcattcccacgacgattggcggcctgctgagcgccattggcatcgcgggcatggaccggctgctgcgcaagaatgtgctggccatgagtggccgcgcggtggaggcggcgggtgacgtggacacgctgctgctcgacaagacggggaccattaccctgggcaaccgcatggccacggagttgctccccatgccgggtgtgcggatggaggagctggccgaggccgcgcagctcgccagtctcgcggatgagacacccgaggggcgctccatcgtcacgctggtgaaggacacgtacaagatgcgcccgcgcgagctccaggcgcaccacgccaccttcgtgcccttcaccgcgcagacacgcatgagcggctgtgacctggtggacccgcacccgcgcagcatccgcaagggcgcggtggacgccatcgtcacgtacgtccgttcccagggcggcgcggtgccggatgagctggcgcaggcgtcgggccgtatcggcgacgcgggtggaacaccgctggcggtggcggacggtgcgcggctgctgggcatcatccacctgaaggacgtggtgaagggcggcatcaaggagcgcttcgaccgcttccgcgccatgggcattcgcacggtgatgattacgggcgacaacccgcgcaccgccgcggcgattgcacgcgaggcgggcgtggatgacttcctggccgaggccactcccgaggccaagctggccctcatccgcaccgagcagggccgcggcaagctggtggccatgacgggcgacggcaccaacgacgcgcccgcgctggcccaggcggacgtgggcgtggcgatgaacaccggcacccaggcggcgaaggaggccgggaacatggtggacctggactccaatcccaccaagctgctggaggtggtggaggtgggcaagcagttgctgatgacgcgcggcacgttgacgaccttctccatcgccaacgacgtggcgaagtacttcgccatcctcccggcgctcttcatgggcgtgttcccgcagattgcgccgctcaacgtgatggggttgtcctcgccgttcagcgcggtgctgtcggccgtcatcttcaacgcgctcatcatcatcctgctcatccccctggcgctgaagggtgtccgctaccgcccgttgggcgccgaggccctgctgcggcgcagcctgctgctgtacggcgtgggcggcgtcatcgttcccttcgtgggcatcaaggtcatcgacgtgctgctcggcgccgtgggtctggcgtga

SEQ ID NO: 280 - protein, 686 aa, Myxococcus xanthus DK 1622
MSSPASKPASLLDASLLKPAMVDSLRKLHPRDVARNPVMFVVWAGSLLTTVLVVKDLVAPRPDAAPLGFTVQVTLWLWFTVLFANFAEAVAEGRGKAQAGALRKMRKETTARRWKDGREERVPAPDLRKGDEVICEAGDLIPGDGEVVEGIASVDESAITGESAPVIRESGGDRSAVTGGTKVLSDRIRVRISANPGDSFLDRMIGLVEGAARQKTPNEVALHILLVGLTLIFLLACVTLVPLALYSGVPLSGTAVVALLVCLIPTTIGGLLSAIGIAGMDRLLRKNVLAMSGRAVEAAGDVDTLLLDKTGTITLGNRMATELLPMPGVRMEELAEAAQLASLADETPEGRSIVTLVKDTYKMRPRELQAHHATFVPFTAQTRMSGCDLVDPHPRSIRKGAVDAIVTYVRSQGGAVPDELAQASGRIGDAGGTPLAVADGARLLGIIHLKDVVKGGIKERFDRFRAMGIRTVMITGDNPRTAAAIAREAGVDDFLAEATPEAKLALIRTEQGRGKLVAMTGDGTNDAPALAQADVGVAMNTGTQAAKEAGNMVDLDSNPTKLLEVVEVGKQLLMTRGTLTTFSIANDVAKYFAILPALFMGVFPQIAPLNVMGLSSPFSAVLSAVIFNALIIILLIPLALKGVRYRPLGAEALLRRSLLLYGVGGVIVPFVGIKVIDVLLGAVGLA

SEQ ID NO: 281 - DNA, 2142 bp, Mycobacterium sp. MCS
  CDS (1)..(2142): transl_table=11
atgaccctcaccaccatcgacgcgcgcaccgcccaccccgacgatccggcgccgcagaagatccggagcggcctcctcgacccggcgatgctgtggcggtcgacaccggcggcgctgcgcaaactcgacccccgcacactctggcgcaacccggtgatgctgatcgtcgagatcggcgctttgtggagcaccgcgctggcactgatcgacccgacctggttcggcgggctgaccgtcgcgtggctgtggctgacggtcgtgttcgccaacctcgccgaagccgtcgccgagggccgcggcaaggcgcaggccgagaccctgcgaaagaccaaggccgacaccatggcccgacgtctcatcggatgggcaccggggcatcccggtaccgaggaggaggtcgccgcaccactgctacgccagggcgacgtcgtcgtggtcgaagccggcgaggtcattcccggcgacggcgaagtggtggaaggcattgcctcggtggatgaatcggcgatcaccggcgaatccgccccggtcatccgcgaatccggcggtgaccgttcggcggtgacgggcggcaccacggtgctcagcgaccgcatcgtcgtgcggatcacgcagaagccgggcgacagcttcatcgaccgcatgatcgcgctggtggaaggcgccaaccggcagaagacacccaacgagatcgcgctgaacatcctgctgacgtcactgacgatcgtgttcgtcatcgccgtcgccaccctgcaaccgctggccatctacgccaaggccggtaaccccggcgtccccgacagcctcgccctggacggcgacggcatcaccgggatcgtgttggtctcgctgctggtctgcctgatccccaccaccatcggggcgctgctgtccgcgatcggaatcgccgggatggaccgcttggtgcagcgcaacgtactggccatgtcgggccgggccgtcgaggccgccggggacgtcaacacgctgctgctcgacaagaccggcaccatcacgttgggcaaccggcaggccgccgagttcgtcccgctcaccggcgtcaccaccgccgaactcgccgacgcggcgcaactgtcgagcctcgccgacgagacaccggagggacgctcgatcgtcgtgttcgccaaacagcagtacgggttgcgcgcccgcacccccggtgaactcgccgacgcgcactgggtcgagttcagcgccaccacccggatgtcgggtgtcgacaccggcggtcaccggctgcgcaagggagcggccagttcggtggccgagtggattcgctccgaaggcggttctgtcccagctgaactcgacgccatcgtcacgcggatctccgtcgccggaggcaccgcactcgtcgtcggacgggtgagcgacggacgcgccgacatcctcggcgtgatccacctcaaggacgtcgtcaaacaaggtatgcgggaacggttcgacgagatgcgccgcatgggcatccgcaccgtgatgatcaccggcgacaacccgttgaccgccagggcgatcgcggacgaggccggtgtcgacgacttcctcgccgaagccacccccgaagacaagatggcgctgatcaagaaggagcaggccggcggcaagctcgtcgcgatgaccggtgacggcaccaacgacgcacccgcgctcgcgcaggccgacgtcggcgtcgcgatgaacagcggtacgccggcggccaaggaggccggcaacatgatcgacctcgactccgatccgaccaagctcatcgagatcgtcgcgatcggcaagcaactgctgatcacccggggtgcgctcaccaccttctcgatcgccaacgacatcgcgaagtacttcgcgatcatcccggcgttgttcgtcggactcttccccggcctcgacctgctcaacgtgatgcgcctgcacagcccgcagtcggcgatcctgtccgccgtcgtgttcaacgcactggtgatcgtcgcgctgatcccgctggcgctgcgcggtgtgcgctacacccccggcggcgcgtcgaaactgttgagccgcaacctgtccgtctacggcgtcggcggcatcgtcgcaccgttcatcggtatcaaactcatcgacctcgtcgtccaactcctcccgggaatgtga

SEQ ID NO: 282 - protein, 713 aa, Mycobacterium sp. MCS
MTLTTIDARTAHPDDPAPQKIRSGLLDPAMLWRSTPAALRKLDPRTLWRNPVMLIVEIGALWSTALALIDPTWFGGLTVAWLWLTVVFANLAEAVAEGRGKAQAETLRKTKADTMARRLIGWAPGHPGTEEEVAAPLLRQGDVVVVEAGEVIPGDGEVVEGIASVDESAITGESAPVIRESGGDRSAVTGGTTVLSDRIVVRITQKPGDSFIDRMIALVEGANRQKTPNEIALNILLTSLTIVFVIAVATLQPLAIYAKAGNPGVPDSLALDGDGITGIVLVSLLVCLIPTTIGALLSAIGIAGMDRLVQRNVLAMSGRAVEAAGDVNTLLLDKTGTITLGNRQAAEFVPLTGVTTAELADAAQLSSLADETPEGRSIVVFAKQQYGLRARTPGELADAHWVEFSATTRMSGVDTGGHRLRKGAASSVAEWIRSEGGSVPAELDAIVTRISVAGGTALVVGRVSDGRADILGVIHLKDVVKQGMRERFDEMRRMGIRTVMITGDNPLTARAIADEAGVDDFLAEATPEDKMALIKKEQAGGKLVAMTGDGTNDAPALAQADVGVAMNSGTPAAKEAGNMIDLDSDPTKLIEIVAIGKQLLITRGALTTFSIANDIAKYFAIIPALFVGLFPGLDLLNVMRLHSPQSAILSAVVFNALVIVALIPLALRGVRYTPGGASKLLSRNLSVYGVGGIVAPFIGIKLIDLVVQLLPGM

SEQ ID NO: 283 - DNA, 2037 bp, Magnetospirillum magnetotacticum MS-1
  CDS (1)..(2037)
atgaccattcatcgccctcaggcgctgtcgcttctggacggccccatcctggcccaggctggccgggacgcggtgaccaagctggacccgcgccaattggtgcgcaatcccatcatgttcgccaccgccctggtctccgtcgcctccaccatcctgacgctcagagatgccgccagcggcgccgcccaggtggcggtgatggctcagatcagcgcctggctgtggttcaccgtgctgttcgccaacttcgccgaagccatcgccgaaggacgcggcaaggcccaggccgcctcgcttcgccgcaccaagtccgaggccatggcgcgcaaagtcgcctccctggaaggggagaacccggtcaccgttccggccgcctcactcaaggccggggatctggtggtctgcgaaacgggcgacgtcatccccggcgatggcgacgtggcggcgggcatcgccaccgtggacgaaagcgccatcacgggcgaatccgcccccgtcatccgcgaatccggcggcgaccgttcggcggtcaccgggggcacccgggtggtctcggaccgcatcatcgtgcgcatcaccgccaatccgggagagtccttcctggaccgcatgatcactttggtggaaggcgccaagcgccagaagacccccaatgagatcgcgctgaccatcttgctggtgggcatgaccctgatcttcctggtggtggtggccagcctgccggcctgggcgtcctggtcgggcaccgctattccggtggtgttcctggccgccctgttcatcaccttgatccccaccaccatcggcggattgctgtcggccatcggcatcgcgggcatggaccggctggtgaagttcaacgtcatcgccaaatcgggccgcgccgtcgaggctgcgggcgatatcgacgttctgctgttggacaagaccggcaccatcaccctgggcgcccggcaggcctccgagttcctggccctgcccggcatctctgagcacgacctggccgaagccgccttcctgtcctccctggccgacgagaccccggaaggcaaatccatcgtcgccctggccaggctgcgctttcagttcgccgaacccgacatgacggccatgaccttcgtgcccttcacggcgcaaacccgcatgagcggagtggatgcgggcgcttgccgcatccgcaagggcgcctcggacgccatcctcaaacatgtggccgatgccgcgccacgcgagctggtccccctggtggagcgcgtcgccaaggccggtggaacgccgctggtcgtcgcgcgcaatggccgggcgctgggcgtcattcacctgaaagacatcatcaagcccggcatccgcgagcgtttcctgacccttcgcgccatgggcatccgcacggtgatgatcaccggcgacaatccgctgaccgccgcggccatcgccgccgaggccggagtggacgacttcctggccgaagcaacgccggagcggaagctggaactgatccgcgagcaccagcagggcggcaagctggtggccatgtgcggcgacggctccaacgacgcccccgccctggctcaggccgatgtgggcgtggccatgaacaccggcacccaggcggcgcgcgaggcgggcaacatggtggatctggaaagcgatcccaccaagctcatcgagatcgtcatgatcggcaagcagctgctcatgagccggggcgcgctcaccaccttttccatcgccaatgacgttgccaagtatttcgccatcattccggcgctgttcctggcctcctaccctcagcttcaagcgctgaacatcatgggtctgaccagtccgcaaagcgccatcctgtcggccatcatcttcaacgccctgatcatcatcgcgctgattcccctggccttgaagggggtgcgttatcgccccgccgacgccgaaaccctgttgaagcgcaatctgctggtctatggcctgggcggtctggtggtccccttcgcgggcatcaagctgatcgacatggccgtggccgccctgcatctcgcctga

SEQ ID NO: 284 - protein, 678 aa, Magnetospirillum magnetotacticum MS-1
MTIHRPQALSLLDGPILAQAGRDAVTKLDPRQLVRNPIMFATALVSVASTILTLRDAASGAAQVAVMAQISAWLWFTVLFANFAEAIAEGRGKAQAASLRRTKSEAMARKVASLEGENPVTVPAASLKAGDLVVCETGDVIPGDGDVAAGIATVDESAITGESAPVIRESGGDRSAVTGGTRVVSDRIIVRITANPGESFLDRMITLVEGAKRQKTPNEIALTILLVGMTLIFLVVVASLPAWASWSGTAIPVVFLAALFITLIPTTIGGLLSAIGIAGMDRLVKFNVIAKSGRAVEAAGDIDVLLLDKTGTITLGARQASEFLALPGISEHDLAEAAFLSSLADETPEGKSIVALARLRFQFAEPDMTAMTFVPFTAQTRMSGVDAGACRIRKGASDAILKHVADAAPRELVPLVERVAKAGGTPLVVARNGRALGVIHLKDIIKPGIRERFLTLRAMGIRTVMITGDNPLTAAAIAAEAGVDDFLAEATPERKLELIREHQQGGKLVAMCGDGSNDAPALAQADVGVAMNTGTQAAREAGNMVDLESDPTKLIEIVMIGKQLLMSRGALTTFSIANDVAKYFAIIPALFLASYPQLQALNIMGLTSPQSAILSAIIFNALIIIALIPLALKGVRYRPADAETLLKRNLLVYGLGGLVVPFAGIKLIDMAVAALHLA

SEQ ID NO: 285 - DNA, 2043 bp, Listeria monocytogenes str. 4b H7858
  CDS (1)..(2043): transl_table=11
atggaaaaaggtatttggaaagatgcgctgattcagtcgacgaaaaaactgtctccaaaactgcaagtgaaaaatccggtgatgttgcttgtttatgttggtgcgattttggcaacgagcctttattttctcggtttcttcgggatttcagatgagaagtctggttatacgctagcaattgcgctgattttatggtttacagtgttatttgcgaattttgcagaggcgattgcggaaggtcgcggtcgagcacaggcggatagtttgaaaatggctcgaaaagacgttttagctcgaaaattgaagaatattgatgataaaactgatgtgatcgaaattgcttcgaatgacttgaaaaaaggcgacattgtgtatgtccttgcgaatgaacaaattccgatggatggcgaggttattgaaggtgcggcttcagttgatgaaagtgcgataactggggagtctgcacccgtaattcgagagtctggcggggatagaagtgctgtgacgggtggaactacgcttgtttctgactggcttgttgttcgtgtgacggcggtctctggagaaagtttcttagataaaatgattgcaatggtggaaggagcttcacggaaaaagacgccgaatgagattgcgctacaaattttgcttgtaacgctttcgattatttttttggcagtttcagcgacgcttttaccatttactgaatttgcgagtaagcaggcgggtgctggatcggcaatttcgattacgaatgtgattgctttgcttgtttgtttggcgccaactacgattggtgcactactttcgtcgattggaattgcagggatgagtcggttaaatcaagcgaatgttttagcgatgagtggtcgtgcgattgaggcagctggtgatgtggatgtgcttttgctcgataaaactgggacgattacactgggaaaccgcaaagcaagcgaatttttgccagtggatggtgtgacggaacaagagctggcagatgcggcgcaactttcctcgattgcggacgaaacagcggaaggcaggagtattgttgtattagcgaaagaacggttcgacattcgcggccgagattttgctgaaatgcacgcagaatttgttcccttcactgcaacaacccgaatgagcggaattgactatcaagaaaatacgattcgaaaaggtgcggcggatgcggttcgtgcttacgtaacggcgaatggcgggacgtacccaaaagagtgtgatgcaattgtgagcaaagttgctggtgctggtggtacaccgcttgtagtagtccgaaataacaaagtgctaggcgttatttatttaaaagacatcgtgaaaaatggagtgaaagaacgtttccttgatttacgaaaaatgggtattaaaaccattatgattaccggtgataacccaatgactgcggcagccattgcggcggaagcaggggtcgatgattttctagcagaagcaactccagaagcaaaattggaattaattcgtgaatatcaacgggaaggtcatttggttgcaatgacaggtgatggcacgaatgacgcaccagctcttgcacaagcggatgttgctgttgcgatgaatacaggaacacaagcggcaaaagaagctgggaatatggttgatctggattctagtcctactaaattaattgatattgtgcggattggcaaacaacttttaatgacgcgtggtgcactgacaacatttagtgttgctaatgatttagcgaaatactttgcgattattccagtgctgttttacggtattttcccacaacttgaagcacttaatttaatgggattaaccagcccgacgagcgctattttatccgcgattatttacaatgcggtgattatcattattttaattccgctttctttaaaaggcgtgaagtatcgtgaaatgccggccgggaaattactgagcagaaatatgttgatttatggtctgggcggtttgattgctccatttatcgcgattaaattgattgatatgctgttaactgttttaggaatcgtttaa

SEQ ID NO: 286 - protein, 680 aa, Listeria monocytogenes str. 4b H7858
MEKGIWKDALIQSTKKLSPKLQVKNPVMLLVYVGAILATSLYFLGFFGISDEKSGYTLAIALILWFTVLFANFAEAIAEGRGRAQADSLKMARKDVLARKLKNIDDKTDVIEIASNDLKKGDIVYVLANEQIPMDGEVIEGAASVDESAITGESAPVIRESGGDRSAVTGGTTLVSDWLVVRVTAVSGESFLDKMIAMVEGASRKKTPNEIALQILLVTLSIIFLAVSATLLPFTEFASKQAGAGSAISITNVIALLVCLAPTTIGALLSSIGIAGMSRLNQANVLAMSGRAIEAAGDVDVLLLDKTGTITLGNRKASEFLPVDGVTEQELADAAQLSSIADETAEGRSIVVLAKERFDIRGRDFAEMHAEFVPFTATTRMSGIDYQENTIRKGAADAVRAYVTANGGTYPKECDAIVSKVAGAGGTPLVVVRNNKVLGVIYLKDIVKNGVKERFLDLRKMGIKTIMITGDNPMTAAAIAAEAGVDDFLAEATPEAKLELIREYQREGHLVAMTGDGTNDAPALAQADVAVAMNTGTQAAKEAGNMVDLDSSPTKLIDIVRIGKQLLMTRGALTTFSVANDLAKYFAIIPVLFYGIFPQLEALNLMGLTSPTSAILSAIIYNAVIIIILIPLSLKGVKYREMPAGKLLSRNMLIYGLGGLIAPFIAIKLIDMLLTVLGIV

SEQ ID NO: 287 - DNA, 2043 bp, Listeria monocytogenes str. 1/2a F6854
  CDS (1)..(2043): transl_table=11
atggaaaaaggtatttggaaagatgcgctgattcagtcgacgaaaaaactgtctccaaaactgcaagtgaaaaatccggtgatgttgcttgtttatgttggtgcgattttggcaacgagcctttattttctcggtttcttcgggatttcggatgagaagtctggttatacgctagcaattgcgctgattttatggtttacagtgttatttgcgaattttgctgaggcgattgcggaaggtcgtggtcgagcacaggcggatagtttgaaaatggctcgaaaagacgttttagctcgaaaattaaagaatgttgatgataaaactgatgtgattgaagttgcttcgaatgacttgaaaaaaggcgatattgtgtatgtccttgcgaatgaacaaataccgatggatggcgaggtcattgaaggtgcggcttcggttgatgaaagtgcgataactggggaatctgcaccagtaattcgagagtctggcggggatagaagtgccgtgacgggtggaactacacttgtttccgattggctggttgttcgtgtaacggcggtctctggagaaagtttcttagataaaatgattgcgatggtggaaggagcttcacggaaaaagacgccgaatgagattgctttacaaattttacttgtaacgctttcgattatttttctggcggtttcagccacacttttaccatttactgaatttgcgagtaagcaggcgggtgctggatcggcaatttcgattacgaatgtgattgctttgctcgtttgtttggcgccaactacgattggtgcactactttcgtcgattggaattgcagggatgagccgtttaaatcaagcgaatgttttagcaatgagtggtcgtgcgattgaggcagctggcgatgtggatgtgcttttgctcgataaaactgggacgattacactgggaaaccggaaagcaagcgaatttttgcctgtggatggtgtgacggaacaagagctggccgatgcggcgcaactttcctcgattgcggacgaaacggcggaaggtcgcagtattgttgtgttggcgaaagaacggtttgacattcgcggtcgagattttgctgaaatgcacgcagaatttgttcccttcactgcaacaacgcgaatgagcggaattgactatcaagaaaatacgattcgaaaaggtgcggcggatgcggttcgcgcttacgtaacggcgaatggcgggacgtaccccaaagagtgtgatgcgattgtgagtaaagttgctggagctggtggtacaccgcttgtcgttgttcgtaacaatcaagtgctgggcgtcatttatttaaaagatatcgtgaaaaatggagtaaaagaacgttttctcgatttacgaaaaatgggtattaaaacaattatgattactggcgataatccaatgaccgcagcagcaattgcggcagaagcaggagtcgatgattttctagcagaagcaaccccagaagcaaaattggaattaattcgtgaatatcaacgggaaggccatttagtggcgatgacaggagacggaacgaatgatgcgccagctcttgcgcaagcggatgtggcggttgcgatgaatacaggaacacaagctgcaaaagaagctggaaatatggttgatctggattctagtcctactaaattaattgatattgttcggattggcaaacaactgctaatgacacgtggggcactgacgacttttagtgttgctaacgacttagcaaaatactttgcgattattccggtgttattttacggtatttttccacagcttgaagcgcttaatttaatgggattaaccagcccgacgagcgccattttatccgcgattatttacaatgcggtgattatcattattttaattccgctttctttaaaaggcgtgaagtatcgtgaaatgccggccgggaaattactgagcagaaatatgttgatttatggtctgggtggtttgattgctccatttatcgcgattaaattgattgatatgctgttaactgttttaggaatcgtttaa

SEQ ID NO: 288 - protein, 680 aa, Listeria monocytogenes str. 1/2a F6854
MEKGIWKDALIQSTKKLSPKLQVKNPVMLLVYVGAILATSLYFLGFFGISDEKSGYTLAIALILWFTVLFANFAEAIAEGRGRAQADSLKMARKDVLARKLKNVDDKTDVIEVASNDLKKGDIVYVLANEQIPMDGEVIEGAASVDESAITGESAPVIRESGGDRSAVTGGTTLVSDWLVVRVTAVSGESFLDKMIAMVEGASRKKTPNEIALQILLVTLSIIFLAVSATLLPFTEFASKQAGAGSAISITNVIALLVCLAPTTIGALLSSIGIAGMSRLNQANVLAMSGRAIEAAGDVDVLLLDKTGTITLGNRKASEFLPVDGVTEQELADAAQLSSIADETAEGRSIVVLAKERFDIRGRDFAEMHAEFVPFTATTRMSGIDYQENTIRKGAADAVRAYVTANGGTYPKECDAIVSKVAGAGGTPLVVVRNNQVLGVIYLKDIVKNGVKERFLDLRKMGIKTIMITGDNPMTAAAIAAEAGVDDFLAEATPEAKLELIREYQREGHLVAMTGDGTNDAPALAQADVAVAMNTGTQAAKEAGNMVDLDSSPTKLIDIVRIGKQLLMTRGALTTFSVANDLAKYFAIIPVLFYGIFPQLEALNLMGLTSPTSAILSAIIYNAVIIIILIPLSLKGVKYREMPAGKLLSRNMLIYGLGGLIAPFIAIKLIDMLLTVLGIV

SEQ ID NO: 289 - DNA, 2100 bp, Rubrivivax gelatinosus PM1
  CDS (1)..(2100)
atgaacaacgacaggacctccctcgcgctcctcgaccccgtgcttctgcggccggccatcggcgcggcattccgcaagctcgatccgcgcctgcaatggcgcaacccggtgatgctggtggtctatgtcggtagcctgctgaccaccgggctcggcgtccaggcgctgctcggtgccggcgaggcaccgccggccttcatcctggcggtggccacggggctgtggttcacggtgctgttcgccaacttcgccgaggcgctggccgagggccgcagcaaggcccaggccgcctcgctgcgtggcatgaagcgcaaggggatcgcgaagaagctcgagcagccgcgccatgggtcgtcgtggcacccgatgccggccgatgaactgcgccggggtgccgtggtgctggtggaggccggcgacaccatcccgctcgacggcgaggtgatcgagggcgcggcctcggtcgacgaaagcgcgatcaccggcgaatccgcgccggtgatccgcgagtccggtggcgatttcgcatcggtgaccggcggcacgcgcgtgctgtccgactggctggtggtgcgcatctcggtgaacccgggcgaggcgtttctcgaccgcatgatctccatggtggagggcgcgaaacgccagaagacaccgaacgagatcgcgctgaacatcctgctgatcacgctgaccctcgtgttcctggtggtcgtggtgacgctgctgccgatgtcgatcttcgccgtggagacggcgaaacagggcacggcagtgaccctcaccgcgctggtcgcgctgctggtgtgcctgatcccgacgaccatcggcgcactgctgtcggccatcggcgtcgccggcatgagccgcatgatgcaggccaatgtgatcgccacctcggggcgcgcggtcgaggcagccggcgacgtcgacgtgctgctgatggacaagaccggcaccatcacgctcggcaaccggcaggcctcggccttcctcgcggcgccaggcgtgagcgagccggtgctggccggtgcggcgcagctcgcgtcgctcgccgacgagacgcccgaggggcgcagcatcgtggtgctggccaagcagaagttccgcctgcgcgagcgcgaactcgcggcgctgggcgcgagcttcgtgccgttcagtgcgcagacgcggatgagcggcgtcgactgcaccgtcgacggcgcggcgcggcaactgcgcaagggatcgggcgaggcgatccgccagtgggtcgaggcgcagcacggccacttcccggccgaggcgcagcgcatcgccgacgaggtggcgcgccggggcagcacgccgctgctggtggcgcagtctgacgggcagggcgcgcgcgtgctcggcgtcgtggaactgaaggatgtcgtcaagggcggcatcaaggagcgcttcgccgagctgcgccgcatgggcatccgcaccgtgatgatcaccggcgacaaccggctcaccgcggcggcgatcgcggccgaagccggcgtcgacgacttcctggccgaggccacgcccgaggccaagctgaagctgatccgcgactaccaggccgaggggcggctggtcgcgatgaccggtgacggcaccaacgacgcgccggcgctggcccaggccgacgtggcggtggccatgaacaccggcacgcaggccgcgaaggaggccggcaacatggtcgacctcgactccaacccgaccaagctgctggagatcgtcgagaccggcaagcaactgctgatgacgcgcggctcgctgaccaccttctcgatcgccaacgacgtggcgaagtacttcgccatcatcccggcggccttcgccagcacctacccgcagttgcagtcgctcgacgtgatgcatctcgccagcccgtcgtcggccatcctgtcggcggtgatcttcaacgccgtggtgatcgtgttcctgatcccgctcgcgctgaagggcgtggcctatcgcgccatcggcgcggccgcgctgctgcgtcgcaacgtgctggtctacggcctgggcgggctggtggtgcctttcgccggcatcaaggcgatcgacctgctgctcggtgcggcggcgcactgggtctga

SEQ ID NO: 290 - protein, 699 aa, Rubrivivax gelatinosus PM1
MNNDRTSLALLDPVLLRPAIGAAFRKLDPRLQWRNPVMLVVYVGSLLTTGLGVQALLGAGEAPPAFILAVATGLWFTVLFANFAEALAEGRSKAQAASLRGMKRKGIAKKLEQPRHGSSWHPMPADELRRGAVVLVEAGDTIPLDGEVIEGAASVDESAITGESAPVIRESGGDFASVTGGTRVLSDWLVVRISVNPGEAFLDRMISMVEGAKRQKTPNEIALNILLITLTLVFLVVVVTLLPMSIFAVETAKQGTAVTLTALVALLVCLIPTTIGALLSAIGVAGMSRMMQANVIATSGRAVEAAGDVDVLLMDKTGTITLGNRQASAFLAAPGVSEPVLAGAAQLASLADETPEGRSIVVLAKQKFRLRERELAALGASFVPFSAQTRMSGVDCTVDGAARQLRKGSGEAIRQWVEAQHGHFPAEAQRIADEVARRGSTPLLVAQSDGQGARVLGVVELKDVVKGGIKERFAELRRMGIRTVMITGDNRLTAAAIAAEAGVDDFLAEATPEAKLKLIRDYQAEGRLVAMTGDGTNDAPALAQADVAVAMNTGTQAAKEAGNMVDLDSNPTKLLEIVETGKQLLMTRGSLTTFSIANDVAKYFAIIPAAFASTYPQLQSLDVMHLASPSSAILSAVIFNAVVIVFLIPLALKGVAYRAIGAAALLRRNVLVYGLGGLVVPFAGIKAIDLLLGAAAHWV

SEQ ID NO: 291 - DNA, 2085 bp, Burkholderia vietnamiensis G4
  CDS (1)..(2085): transl_table=11
atgactcaacattccgcaacacggtccatgttcgatccggcgctgctgcgcccggcgatcgtggattcgttcaagaagctcacgccgcgcacgcagctgcgcaatccggtgatgttctgcgtgtacgtcggcagcatcctgacgaccatcctgtggatcgcggcgctcgccggccaggccgaggcgcccgcgggcttcatcctcgcgatcgcgctgtggctgtggttcacggtgctgttcgcgaacttcgccgaagcgctcgcggaggggcgctcgaaggcgcaggccgcgtcgctgcgcagcgcgaagaaggacgtgatggccaagaagctcaacgagccgcatccgaagtcgccgatccgcatcacgacggcgtcggacctgcgcaagggcgacgtcgtgctggtcgagaccggcgacgtgattccggccgacggcgaagtggtggacggcgtcgcgtcggtcgacgaatcggcgatcaccggcgagtccgcgccggtgatccgcgagtccggcggcgacttctcgtcggtgacgggcggcacgcgcgtgctgtccgactggatcgtcgtgaaggtcaccgcgaaccccggcgaggcgttcctcgaccggatgatcgcgatggtcgagggcgcgaagcgcaagaagacgccgaacgaggtcgcgctgacgatcctgctggtcgcattgacgatcgtgatgctgctcgcgaccgcgacgctgctgccgttctcgatgttctcggtcgaggcgatgaagtccggccacgtggtgacgatcacggtgctcgtcgcgctgctggtgtgcctgattccgaccacgatcggcgggctgctgtccgcgatcggcgtcgcgggcatgagccggatgatgcaggcgaacgtgatcgcgacgtcgggccgcgcggtggaagcggccggcgacgtcgacttgctgctgctcgacaagaccggcacgatcacgctcggcaaccgtcaggcgtcggcgttcgtgccggcgccgggcgtgaccgaggaagcgctggccgacgccgcgcagctgtcgtcgctcgccgacgaaacgccggaaggccgcagcatcgtggtgctggccaaggagcgcttcaacatccgccagcgcgacctcgcgcagctgcaggcgacgttcctcggcttctccgcgcagacgcggatgagcggcgtcgatctgcccggccgcgaaatccgcaagggcgccgccgatgcgattcgccgctacgtcgagctgcacggcagccgctttccggacgacgtgcgccgcgcggtcgacgaggtcgcgcgccgcggcagcacgccgctcgtggtcgcggagctgcacgacggcgccgcgcgcgtgctcggcgtgatcgagctgaaggacatcgtgaagggcggcatcaaggagcgcttcgcggagctgcgcaagatgggcatcaagacggtgatggtgaccggcgacaaccggctgacggccgcggcgatcgcggcggaggcgggcgtcgacgatttcctcgcggaagccacgccggaaaccaagctcgcgacgatccgcgaacaccaggcggccgggcgcctcgtcgcgatgaccggcgacggcaccaacgacgcgccggcgctcgcgcaggccgacgtggcggtcgcgatgaacaccggcacgcaggcggcgaaggaggccggcaacatggtcgacctcgactcgaacccgaccaagctgatcgagatcgtcgagatcggcaagcagatgctgatgacgcgcggctcgctgacgaccttctcgatcgcgaacgacatcgcgaagtacttcgcgatcatcccggccgcgttcgtcaccacctacccgcagctgcgcgtgctcgacatcatgcatttgacgtcgccggcgtcggcgatcctgtcggcggtgatcttcaatgcgctgatcatcgtcgcgctgatcccgctcgcgctgaagggcgtcgcctaccggccgctcggcgccgcgacgctgctgcgccgcaacctgctggtgtacgggctgggcggcgtgctgctgccgttcccgttcatcaagctgatcgacctgacgctcgccgcgctcggctgggcctga

SEQ ID NO: 292 - protein, 694 aa, Burkholderia vietnamiensis G4
MTQHSATRSMFDPALLRPAIVDSFKKLTPRTQLRNPVMFCVYVGSILTTILWIAALAGQAEAPAGFILAIALWLWFTVLFANFAEALAEGRSKAQAASLRSAKKDVMAKKLNEPHPKSPIRITTASDLRKGDVVLVETGDVIPADGEVVDGVASVDESAITGESAPVIRESGGDFSSVTGGTRVLSDWIVVKVTANPGEAFLDRMIAMVEGAKRKKTPNEVALTILLVALTIVMLLATATLLPFSMFSVEAMKSGHVVTITVLVALLVCLIPTTIGGLLSAIGVAGMSRMMQANVIATSGRAVEAAGDVDLLLLDKTGTITLGNRQASAFVPAPGVTEEALADAAQLSSLADETPEGRSIVVLAKERFNIRQRDLAQLQATFLGFSAQTRMSGVDLPGREIRKGAADAIRRYVELHGSRFPDDVRRAVDEVARRGSTPLVVAELHDGAARVLGVIELKDIVKGGIKERFAELRKMGIKTVMVTGDNRLTAAAIAAEAGVDDFLAEATPETKLATIREHQAAGRLVAMTGDGTNDAPALAQADVAVAMNTGTQAAKEAGNMVDLDSNPTKLIEIVEIGKQMLMTRGSLTTFSIANDIAKYFAIIPAAFVTTYPQLRVLDIMHLTSPASAILSAVIFNALIIVALIPLALKGVAYRPLGAATLLRRNLLVYGLGGVLLPFPFIKLIDLTLAALGWA

SEQ ID NO: 293 - DNA, 2115 bp, Solibacter usitatus Ellin6076
  CDS (1)..(2115): transl_table=11
atgccggtagcaaccgtaaacaaaccgtctccgaccgaagatatcgccaccatcgtcccgcgtaagggatcgcgatcccggccgctattcgacccgcccatcgtcaagcgcgccatcacggactcgctgatcaaactaaatccgcgcaccatgatgaagaatcccgtgatgttcgtggtggaagcgggagcggtgatgacgacgattctcgcggcgcgcgatgcggtatcgggcgccggcgtggcgggcttcacattccaaatcaccttgtggctgtggttcacggtgctcttcgcgaatttcgcggaggccatggccgaaggccgcggcaaggcgcaggccgataccttgcgcaagaccaaaaccgaaaccactgcccgccgtatcgccggcggacgcaccgagacagtctccgcgaccctactgcgatccggcgatatcgtgatcgtcgaagccggggaaaccatcccgggcgacggcgacgtgatcgaaggcatcgccagcgtggatgagtcggcgattaccggcgagagtgctcccgtgatccgcgaatcgggcggtgaccgcagcgccgtgaccggcggcaccaaagtgctcagcgattggatccggatccgcgtcacctccaatcccggcgagaccttcctcgatcgcatgattgctcttgtggaaggagcgcagcgccagaagacaccgaatgagattgcgctgaacatcgtgatcgccggcctcaccctggtcttcctgctggccgtcgtcaccctgcagcccttcgcgatttacagtgtcgcgaccagcggcaccgttaccgcgccttccgtgaccgtgctgatttccctgctggtctgcctgattccgaccaccatcggcggattgctctccgccatcgggatcgccggcatggatcgcgtcatgcagcacaacgtgctcgccatgagcggcaaggccgtcgaagccgccggcgatgtcaacagcctgctgctggataagaccggcaccatcacgcttggcaaccggcaggccgtggaattcatcgcgatggaaggcgtcacggaggcggagctcgccgacgccgcccagctctccagcctcgccgatgagacgccggaaggccgctccatcgtggtgctcgccaaagagaagtacaacatccgcggccgcgaggtcgctgagcatgaagcgcatttcattccattcaccgcgcaaacgcgcatgagcggcgtggatatggatggccgccaaattcgcaaaggcgccaccgaaagcgtcgccgaattcgtgcacgagcacggcggccaggtcccgccgcggttaaccgagatcaccgatcgtatttcgcgcttcggcggcaccccgctggtggtggccgatggcggccgcgcgctcggcgtggtccacctgaaggacgtcgtcaagggcggcatgcgcgagcgcttcgcgcagctgcgcgccatgggcatccgcaccatcatgatcacgggcgataacccgctgaccgcctccgccatcgccgcagaggccggcgtggacgatttcctggcgcaggccacgcccaaagacaagatggatttgatcaagaaggaacaggccggcggtcgcctcgtggctatgaccggcgacggcaccaacgacgcccccgcgctggcgcaggccgatgtcggcctcgccatgaacaccggcaccatggccgccaaggaggcgggcaacatggtggacctggacagcaatcccaccaagctcatcgaggtggtcgccatcggcaagcagttgctaatgacccgcggcgcgctcaccacgttctccattgccaacgacatcgccaaatacttcgccattcttcccgctatgttcatggcgacttatccggccctcgcgaaactcaacgtcatggggttgcatagcccgcagagcgcggtgctggcctccgtgatcttcaatgcgctaatcatcatcgtgctcattccgctggcgctgcgcggagtcaagtaccggcccatgagcgccgccgcgctgctgcgccgcaacctgctggtctacggagtcggcggcgtgattgcgcccttcccgggcatctggttgctcgatcgcctgctcggcctgctgcgcctcgcataa

SEQ ID NO: 294 - protein, 704 aa, Solibacter usitatus Ellin6076
MPVATVNKPSPTEDIATIVPRKGSRSRPLFDPPIVKRAITDSLIKLNPRTMMKNPVMFVVEAGAVMTTILAARDAVSGAGVAGFTFQITLWLWFTVLFANFAEAMAEGRGKAQADTLRKTKTETTARRIAGGRTETVSATLLRSGDIVIVEAGETIPGDGDVIEGIASVDESAITGESAPVIRESGGDRSAVTGGTKVLSDWIRIRVTSNPGETFLDRMIALVEGAQRQKTPNEIALNIVIAGLTLVFLLAVVTLQPFAIYSVATSGTVTAPSVTVLISLLVCLIPTTIGGLLSAIGIAGMDRVMQHNVLAMSGKAVEAAGDVNSLLLDKTGTITLGNRQAVEFIAMEGVTEAELADAAQLSSLADETPEGRSIVVLAKEKYNIRGREVAEHEAHFIPFTAQTRMSGVDMDGRQIRKGATESVAEFVHEHGGQVPPRLTEITDRISRFGGTPLVVADGGRALGVVHLKDVVKGGMRERFAQLRAMGIRTIMITGDNPLTASAIAAEAGVDDFLAQATPKDKMDLIKKEQAGGRLVAMTGDGTNDAPALAQADVGLAMNTGTMAAKEAGNMVDLDSNPTKLIEVVAIGKQLLMTRGALTTFSIANDIAKYFAILPAMFMATYPALAKLNVMGLHSPQSAVLASVIFNALIIIVLIPLALRGVKYRPMSAAALLRRNLLVYGVGGVIAPFPGIWLLDRLLGLLRLA

SEQ ID NO: 295 - DNA, 2103 bp, Kineococcus radiotolerans SRS30216
  CDS (1)..(2103): transl_table=11
gtgagcaccctcaccgagaaacccctcccgccggacaccgccgcccccgaaccgcaccgcgtccccggcggggcgttcagcccccgccagctcgtcgccgcggtgcccggcgcgttccgcaagctcgacccgcgccacctcgtccgcaccccggtgatgttcgtcgtcgccctcggcgccgtcctcaccaccgcgctcgcggtcaccgacccgtcggtgttcgcgtgggtcatcgtcgcctggctgtggatcaccgtcctcttcgcgaacctggccgaggccgtcgccgaggggcgcgggcgggcgcaggccgcgtcgctgcgccgggtgagcgcggagaccgtcgcgcgccggctgaccgagggccgggaggagcgcgtcgcctccagccggctgcgcgtgggcgacctcgtcgtcgtcgaggccggcgagaccgtccccggcgacggcgacgtcgtcgagggcgtcgccagcgtcgacgagtcggccatcaccggggagtccgctcccgtcgtccgcgagtccggcggcgaccgcagcgccgtcaccggcggcaccaccgtcctctccgaccggatcgtcgtgcgggtcacggccaaaccgggtgagagcttcgtggaccggatgatcgccctcgtcgagggctccgcccgccagcgcacccccaacgagatcgcgctgaacatcctgctgtccggcctgaccctggtgttcctgctcgccgtcgtgaccctgcagccgatggcggtctactccgggcgcccccagccgctggtcgtgctggtcgccctgctggtctgcctcatccccaccaccatcggggcgctgctctcggccatcggcatcgccggcatggaccgcctggtgcagcgcaacgtcctggcgatgtcgggacgcgccgtcgaggccgccggcgacgtggggaccctgctgctggacaagaccggcaccatcaccctcggcaaccggcaggcccacgagctcgtccccgccccgggcgtggaccccgccgagctcgccgacgccgcccggctctccagcctcgccgacaccacccccgagggccgctcgatcgtggtcctcgtggaggagcgccagggggtggccgcccaccccgcggacctcggcgccacgcccgtcccgttcaccgcccagacccgcatgtccggggtcgacctgaccaccggccggggggagcggcggatccgcaagggggccgccgcggcgacggcgcactgggtccgagggctcggcggcgacgtcccccgcgaggtcgagcgggccgtggaggacatctccaccgtcggcgggaccccgctggtcgtggcggaggacgtcacgacgggttccgggtcgcgggcccgcgtcctcggcgtcgtccacctcaaggacgtcgtcaaggaggggatgcgcgaacgcttcgcgcagctgcgggccatggggatccgcaccgtcatggtcaccggcgacaacgcccgcaccgccgccgccatcgccgccgaggccggggtcgacgacgtgctcgccgaggccacgccggaggacaagctggacctcatccgccgcgagcagtccggcgggcgcctggtggcgatgatgggcgacggcaccaacgacgcccccgccctggcccaggccgacgtcggggtcgcgatgaacaccggcacctcggccgccaaggaggccgggaacatggtcgacctggactccgacccgacgaagctcatcgagatcgtcgagatcggcaagcagctgctcatcacccgcggcgcgctcaccacgttctccatcgccaacgacgtcgcgaagtacttcgccatcctcccggcgatgttcgtcaccacgttcccgcagctcggcgcgctcaacgtcatgcggctggccacgccggagtccgcgatcgtctccgcggtcgtcttcaacgccctcgtcatcgtggcgctcatccccctcgccctgcgcggggtgcgctaccggccctccggcgccgcggccctgctgcgccgcaacctgctcgtgtacggcctcggcggcgtcgccgtgccgttcctgggcatcaagctcgtcgacctgctcgtctcccagatcccaggaatcggctga

SEQ ID NO: 296 - protein, 700 aa, Kineococcus radiotolerans SRS30216
MSTLTEKPLPPDTAAPEPHRVPGGAFSPRQLVAAVPGAFRKLDPRHLVRTPVMFVVALGAVLTTALAVTDPSVFAWVIVAWLWITVLFANLAEAVAEGRGRAQAASLRRVSAETVARRLTEGREERVASSRLRVGDLVVVEAGETVPGDGDVVEGVASVDESAITGESAPVVRESGGDRSAVTGGTTVLSDRIVVRVTAKPGESFVDRMIALVEGSARQRTPNEIALNILLSGLTLVFLLAVVTLQPMAVYSGRPQPLVVLVALLVCLIPTTIGALLSAIGIAGMDRLVQRNVLAMSGRAVEAAGDVGTLLLDKTGTITLGNRQAHELVPAPGVDPAELADAARLSSLADTTPEGRSIVVLVEERQGVAAHPADLGATPVPFTAQTRMSGVDLTTGRGERRIRKGAAAATAHWVRGLGGDVPREVERAVEDISTVGGTPLVVAEDVTTGSGSRARVLGVVHLKDVVKEGMRERFAQLRAMGIRTVMVTGDNARTAAAIAAEAGVDDVLAEATPEDKLDLIRREQSGGRLVAMMGDGTNDAPALAQADVGVAMNTGTSAAKEAGNMVDLDSDPTKLIEIVEIGKQLLITRGALTTFSIANDVAKYFAILPAMFVTTFPQLGALNVMRLATPESAIVSAVVFNALVIVALIPLALRGVRYRPSGAAALLRRNLLVYGLGGVAVPFLGIKLVDLLVSQIPGIG

SEQ ID NO: 297 - DNA, 2094 bp, Xanthobacter autotrophicus Py2
  CDS (1)..(2094): transl_table=11
atggccagatcccattccgtaagcctgctcgaccccgccatcctcctgcccgccgtcggcgcctcgttccgcaagctcgatccgcgcgcgatggtgaggaacccggtcatgttcgtggtggaggtggtcgccctcctcaccaccgtgctgttcgtgcgcgacctcgtcacctcgggcggcggcctcggcttctccttccagatcatcctgtggctgtggttcaccgtgctgttcgccaatttcgccgaagcggtggcggaggggcgcggcaaggcgcaggcggaatcactgcgccgcacccgcaccgagacccaggccaagctgctcaccggcgagggcgacgccttccgcaccgtgcccggcacctcactgaaggtcggcgacgtggtgctggtggaggccggcgacatcatcccctccgacggcgaggtggtggaaggcgtcgcctcggtgaacgaggccgccatcaccggcgagagtgcccctgtgatccgcgaatccggcggcgaccgctcagcggtgaccggcggcaccacggtggtctccgatcatctcaaggtgcgcatcacggcggcggcgggcgcgaccttcctcgaccgcatgatcgcgctggtggaaggcgccgagcggcagaagacgcccaacgagatcgccctcaacatcctgctcgcgggcatgacgctgatcttcatcttcgccaccgcgtcgatcccgagctttgcgtcctacgcgggcggctccatctccgtggtggtgctggtggcgctgttcgtgaccctcattcccaccactatcggggcgctgctctcggccatcggcatcgccggcatggaccggctggtgcgcttcaacgtgctcgccatgtcgggccgcgcggtggaggcggcgggcgacgtggacaccctgctgctcgacaagaccggcaccatcacgctcggcaaccggcaggccgccgccttccacccggtgcgcggggtgagcgagcaggacctggcggacgccgcccagctcgcatcgctcgccgacgagacccccgaaggccgctccatcgtagtgctcgcgaaggagaaatacgccatccgcggccgcgacatggcgagcctgaacgcccatttcgtgcccttcaccgcccagacccgcatgagcggcgtggacgtggacggaagctccgtccgcaagggcgcggtggatgccatcctgtcttatgtccagggcggcagcagcaccgtcaccggctccggcgcggtgcagactgtgcgaacgctggtgagccaggaggccatccgcgagatcaatgccatcgccgaggagatcgccaagtccggcggcacgcccctggcggtggcgcgggacgggcgcctgctcggcgtcatccatctcaaggacatcgtgaagggcggcatccgcgagcgcttcgccgaattgcggcgcatgggcatccgcacggtgatgatcaccggcgacaacgcgctcaccgccgccgccatcgccgccgaggcgggggtggacgacttcctcgcccaggcgaccccggaagccaagctgcgcctcatccgcgatgagcaggccaagggcaagctggtggccatgtgcggcgacggcaccaacgatgccccagcgctggcccaggccgacgtgggggtggccatgaacaccggcactgtggcggcccgcgaggccggcaacatggtggacctcgacagcgaccccaccaagctcatcgagatcgtggagatcggcaaggcgctgctgatgacgcgcggctcgctcaccaccttctccatcgccaatgatgtggcgaagtatttcgccatcatccccgccatgttcgtggccttctacccgcagctcggcacgctgaacgtgatggggctggcctcgccccagagcgccatcctgtcggccatcatcttcaacgcgctcatcatcatcgccctcatcccgctggcgctgaagggtgtcgccttccggcccatcggcgcggcggcgctgctgaagcgcaaccttctgatctacggcctcggcggcatcctcgtgccgttcgtcggcatcaaggccatcgaccttgcggtcacggcccttcacctggtttga

SEQ ID NO: 298 - protein, 697 aa, Xanthobacter autotrophicus Py2
MARSHSVSLLDPAILLPAVGASFRKLDPRAMVRNPVMFVVEVVALLTTVLFVRDLVTSGGGLGFSFQIILWLWFTVLFANFAEAVAEGRGKAQAESLRRTRTETQAKLLTGEGDAFRTVPGTSLKVGDVVLVEAGDIIPSDGEVVEGVASVNEAAITGESAPVIRESGGDRSAVTGGTTVVSDHLKVRITAAAGATFLDRMIALVEGAERQKTPNEIALNILLAGMTLIFIFATASIPSFASYAGGSISVVVLVALFVTLIPTTIGALLSAIGIAGMDRLVRFNVLAMSGRAVEAAGDVDTLLLDKTGTITLGNRQAAAFHPVRGVSEQDLADAAQLASLADETPEGRSIVVLAKEKYAIRGRDMASLNAHFVPFTAQTRMSGVDVDGSSVRKGAVDAILSYVQGGSSTVTGSGAVQTVRTLVSQEAIREINAIAEEIAKSGGTPLAVARDGRLLGVIHLKDIVKGGIRERFAELRRMGIRTVMITGDNALTAAAIAAEAGVDDFLAQATPEAKLRLIRDEQAKGKLVAMCGDGTNDAPALAQADVGVAMNTGTVAAREAGNMVDLDSDPTKLIEIVEIGKALLMTRGSLTTFSIANDVAKYFAIIPAMFVAFYPQLGTLNVMGLASPQSAILSAIIFNALIIIALIPLALKGVAFRPIGAAALLKRNLLIYGLGGILVPFVGIKAIDLAVTALHLV

SEQ ID NO: 299 - DNA, 2058 bp, Alicyclobacillus acidocaldarius
  CDS (1)..(2058): transl_table=11
gtgcgtatggctcgcaaaggctcgttcgatcgcgccctcgtcttgcgcgcatgtgtcgactccttcgtcaaactcgatccgcgcgtcctggtgcgcaatcccgtgatgttcgtcgtcgagatcggcatgttggtcacgctcgcgctgaccttcgatcccagcctgttcggctccgcggtgcgccctggcggtatggccggcgcgcgaggctatgatctcgccgtcacggtgattctctttgtcaccctgctcttcggcaactttgctgaggccatcgcggaaggacgcggcaaggcgcaggcggagtcgctgcgcaggacgaaaacagaactgatggcgaacgtcctgcgcgatgggcgctacgaacgcatcccggcgtccgatctgcgcaagggggacgtcgtcaaggtggtggcgggggaactcatccccgcggacggcgaggtgatcgagggcattggcagtgtggatgagtcggctatcaccggcgaatcggctccggtcattcgcggagcggggggtgacttcagctcggtcacaggcgggacgaagctgttgtcggatgaactcgtcatccgcgtcaccgccaatcccggcgagacgtttctcgaccgaatgatcgcgctcgtggaaggcgcgtctcggcaaaagacgccaaacgaaattgcgctgtccgtgctgctcgcggggctcacgctcatctttctcatcgtcatcgactgcctgccgcccatcgcgaaggggctcggcgcacacgtggacgtcgcgacactcgtggcgcttctcgtctgcctcattcccacgaccattggcgcgctcctatccgccattggcatcgctggtatggatagggtcatacgcttcaacgtcatcgcgaagtccggcaaagccgtggaggccgccggcgacgtcgatacgctcattctcgacaagacgggcaccatcaccatcggcaatcggctcgcgtcggcgtttctcccggtgcagggcgtcgatgagcgcacgctcgccgagaaagcggctttgtgttcgctgttcgatgagacgcccgagggccgctcggtggtcgatctcgcccggcagatgggccttaccttccgccgcgaggactatgccgatgcacgcaacgtcgagttttcggcggacacgcgcatgtccgggctcgaccttccggacgggacgcgtctccgcaagggcgcagcggacgccatcaagcggtacgtgctcgcgcaaggcgggcagatcccgggcgatctcgacgcggtggtggagcgcgtggccaaggagggcggcacgccgctcgtggtggccgagaatcagcgcgtgtacggcgtcatctacctgaaagacatcgtcaagccgggcatccgcgagcggtttgaggagttgcgcaagatgggcattcggaccgtcatgtgcacgggcgacaacccgctcacggcggcgaccatcgcgcgcgaggccggcgtcgacgagttcgtcgccgaggcaaagcccgaggacaagatgcgcctcatccggcgcgagcaggaacagggcaggctcgtcgccatgtcgggcgacggcaccaacgacgcgccggcgctcgcccaggcggacgtggggctcgccatgcagagtggcacacaggcggccaaggaagccgcaaacatggtcgatctcgactccgatccgacgaagctcatcgaggtggtggccatcggcaagcagctgctcatcacgcgcggcgccatcacaacattttcgattgcgaacgacgtggcgaagtatttcgccatcatcccggcgatgtttacgagctttctgccagcgctcggcgccttgaacgtgatgcatctgacgagcccgcggagcgccatcctgtccgcgctcatcttcaacgctgtgatcattccgctgctcatcccgctcgcgatgcgcggcgtcaaataccgcccgacaagtgcgatgcagctgttgatgcgaaatctgctcctgtacggcgtcggcggcgtgatcgcgccgtttgtggggatcaaggtcattgatgtcatcctgcacgcgcttggcgcggtgtga

SEQ ID NO: 300 - protein, 685 aa, Alicyclobacillus acidocaldarius
MRMARKGSFDRALVLRACVDSFVKLDPRVLVRNPVMFVVEIGMLVTLALTFDPSLFGSAVRPGGMAGARGYDLAVTVILFVTLLFGNFAEAIAEGRGKAQAESLRRTKTELMANVLRDGRYERIPASDLRKGDVVKVVAGELIPADGEVIEGIGSVDESAITGESAPVIRGAGGDFSSVTGGTKLLSDELVIRVTANPGETFLDRMIALVEGASRQKTPNEIALSVLLAGLTLIFLIVIDCLPPIAKGLGAHVDVATLVALLVCLIPTTIGALLSAIGIAGMDRVIRFNVIAKSGKAVEAAGDVDTLILDKTGTITIGNRLASAFLPVQGVDERTLAEKAALCSLFDETPEGRSVVDLARQMGLTFRREDYADARNVEFSADTRMSGLDLPDGTRLRKGAADAIKRYVLAQGGQIPGDLDAVVERVAKEGGTPLVVAENQRVYGVIYLKDIVKPGIRERFEELRKMGIRTVMCTGDNPLTAATIAREAGVDEFVAEAKPEDKMRLIRREQEQGRLVAMSGDGTNDAPALAQADVGLAMQSGTQAAKEAANMVDLDSDPTKLIEVVAIGKQLLITRGAITTFSIANDVAKYFAIIPAMFTSFLPALGALNVMHLTSPRSAILSALIFNAVIIPLLIPLAMRGVKYRPTSAMQLLMRNLLLYGVGGVIAPFVGIKVIDVILHALGAV

SEQ ID NO: 301 - DNA, 2046 bp, Listeria innocua
  CDS (1)..(2046): transl_table=11
atgatggaaaatggtatttggaaagatgcgttaattcagtcgatgaaaaaattgtctccaaaactacaagtgaaaaatccagtgatgctactcgtatatgttggcgcgattttagcaacaagtctttattttcttggttttttcggaatttcagatgagaaagctggttatacgctcgcaattgcgctgattttatggtttactgttttgtttgcaaattttgcggaggcaattgcagaaggtcgcggtcgcgctcaagcagacagtttgaaaatggctcgaaaagacgttttagctcggaaattaaaaaatttagaagataaatctgatgtgatagaagttgcttcgaatgatttgaaaaaaggcgacattgtgtatgtgcttgcgaatgaacaaatcccgatggacggtgaagttattgaaggcgcggcttcggttgatgaaagtgcaataactggggaatccgcgccggtaattcgcgagtctggtggcgatagaagtgctgttacaggaggaactacccttgtttctgactggcttgttattcgtgtgacggctgtttctggggaaagtttcttagataaaatgattgcgatggtagaaggcgcttcacggaaaaaaacaccaaatgagattgcgctacaaattttacttgtgacactgtcaattattttcttggcagtttcagcgacacttttaccatttaccgaatttgcgagtaaacaagcaggggcgggatcggcaatttcgattacaaatgtgattgctttacttgtttgtttagcaccaaccactattggcgcattgctttcgtccattgggattgctggaatgagccgtttaaatcaagcgaatgttttagcaatgagcggccgggcgattgaggcagctggtgatgtggatgtacttttgcttgataaaactggaacgattacacttgggaatcggaaagcgagtgaatttttaccggtggatggtgtgacggaacaagagttagcagatgcggctcaactgtcctctattgcggatgaaactgcagaaggtcgaagcattgttgtattagcaaaagaacgtttcgacattcgcggacgagattttgctgaaatgcacgcagaatttgtacctttcactgcaacgacacgaatgagtggaatcgattatcaaggaaacacaattcgaaaaggtgcggcggatgcagttcgtgcgtatgtctctgcaaatggcggtacgtacccaaaagaatgcgatacgattgtaagtaaagtggctggcgctggtggaacgccgcttgtagtagtccgaaataataaagtgctaggcgttatttatttaaaagacatcgtgaaaaatggagtgaaagaacgtttccttgatttgcgaaaaatgggtattaaaaccattatgattactggtgataacccaatgaccgcggcggcaattgcggcagaagctggagtggatgattttctagctgaagcaactccagaagcaaaattggaattaattcgcgaatatcaacgagaagggcatttggttgcaatgacaggagatggcacaaacgacgcaccagctcttgcgcaagccgatgttgctgtggcgatgaatacagggacgcaagctgccaaagaagcgggaaatatggtggaccttgattctagcccaactaaattaattgatattgttcgtatcggaaaacaacttttaatgactcgcggagctttgactacatttagtgttgccaacgatttggcgaaatactttgcgattattcctgtgctattttacgggattttcccacaacttgaagcacttaacttgatggatttaacaagtcctacgagtgcgattttgtccgcgattatttataacgcagtgattattattttcttaattccgttatctttaaaaggcgtgaaatatcgtgaaatgccagctggaaaattattaagtcgcaatatgttgatttacggtcttggtggtttaattgcaccatttattgcgattaaattaattgatatgctattaactgttttaggaatcgtttaa

SEQ ID NO: 302 - protein, 681 aa, Listeria innocua
MMENGIWKDALIQSMKKLSPKLQVKNPVMLLVYVGAILATSLYFLGFFGISDEKAGYTLAIALILWFTVLFANFAEAIAEGRGRAQADSLKMARKDVLARKLKNLEDKSDVIEVASNDLKKGDIVYVLANEQIPMDGEVIEGAASVDESAITGESAPVIRESGGDRSAVTGGTTLVSDWLVIRVTAVSGESFLDKMIAMVEGASRKKTPNEIALQILLVTLSIIFLAVSATLLPFTEFASKQAGAGSAISITNVIALLVCLAPTTIGALLSSIGIAGMSRLNQANVLAMSGRAIEAAGDVDVLLLDKTGTITLGNRKASEFLPVDGVTEQELADAAQLSSIADETAEGRSIVVLAKERFDIRGRDFAEMHAEFVPFTATTRMSGIDYQGNTIRKGAADAVRAYVSANGGTYPKECDTIVSKVAGAGGTPLVVVRNNKVLGVIYLKDIVKNGVKERFLDLRKMGIKTIMITGDNPMTAAAIAAEAGVDDFLAEATPEAKLELIREYQREGHLVAMTGDGTNDAPALAQADVAVAMNTGTQAAKEAGNMVDLDSSPTKLIDIVRIGKQLLMTRGALTTFSVANDLAKYFAIIPVLFYGIFPQLEALNLMDLTSPTSAILSAIIYNAVIIIFLIPLSLKGVKYREMPAGKLLSRNMLIYGLGGLIAPFIAIKLIDMLLTVLGIV

SEQ ID NO: 303 - DNA, 2085 bp, Agrobacterium tumefaciens
  CDS (1)..(2085): transl_table=11
atgagccagtccaaacaagcgagcatactcgattctcgcattctcgtgccggccattgccgacgcattcaaaaagctcaatccgcgcacgcttgcgcgcaatcccgtcatgttcgtcgttgcgacggtgtcggtgctgacaacggtgctgttcatccgcgatctcatcaccggcggcgccaatctcgccttttccttccagatcaatctctggctctggttcaccgtgctgtttgccaatttcgcggaagccgtcgccgaagggcgcggcaaggcgcaggcggattcgctgcgcaagacccgcacggaaacccaggcgaaacttctgaacagcgatgatcgcagccagtataaaatggttgcgggcgacagcctgaaggtgaacgatgtcgttcttgtcgaggcaggcgatatcatcccctccgacggtgaagtcatcgagggtgtcgcctccgtcaacgaggcggcgatcacgggtgaatccgcccccgtcatccgcgaatccggcggcgaccgctcggcggttaccggcggcacgcaggttctgtcggactggatccgcgttcgcatcaccgccgctgccggctccaccttccttgatcggatgatttcgctggtcgaaggtgccgagcgccagaagacaccgaatgagatcgcgctcaacatcctgctggccggtatgacgctgatcttcgttctcgccacagcgaccattccaagtttcgcggcctatgccggcggttccatcccgatcatcgtgctggtggcgctgttcgtcacgcttatcccgaccaccatcggcgcgcttctgtccgccatcggcattgccggcatggaccgtctggtgcgtttcaacgttctcgccatgtccggccgcgccgtcgaggcggcgggtgacgtggatacgcttctgctcgacaagaccggcacgatcacgcttggcaaccggcaggcgaccgatctccgccccattcccggcgtctccgagcaggaacttgccgatgccgcccaactcgcctcgctcgccgacgaaaccccggaaggccgctccatcgtggttctggccaaggaaaaatacggaatccgtgcccgggatatgcagaagctgcacgctacttttgtgcccttcaccgcccagacccgcatgagcggtgtcgattttgaaggtgcctccatccgcaagggcgcggttgatgcggttcttgcctatgtcgatggcggcgctctgcaacatggcaatgcggcgcttgccctcaaaactgaaacggatgccacgcgggctatccgcgcaatagcggaagacatcgccaaggccggcggcacaccgcttgcggtggtgcgcgatggcaagctgctcggcgtggtgcaactgaaggatatcgtcaagggcggtattcgggagcgtttcgccgagcttcggcgcatgggcatccgcaccgtgatgattactggtgacaatccgatgaccgccgccgccatcgcagcggaggcaggcgtcgatgatttccttgcccaggcaacgccggaaaacaagctggaacttatccgcgaggagcaggccaagggcaagcttgtcgccatgtgcggcgacggcaccaacgacgcgccggcgctggcgcaggccgatgtcggcgtcgccatgaacaccgggacggtcgcagcccgcgaagccggcaacatggtcgatctcgacagcgatccgaccaagctcatcgagatcgtcgaaatcggcaagcagttgctgatgacccgcggtgcgctgacgaccttctccatcgccaacgatatcgccaaatatttcgccatcatcccggcaatgttcctggcgctgtatccgcagcttggcgtcttgaatgtgatggggctttcaacgccgcagagcgccattttgtcggcgatcatcttcaacgcactcatcatcatcgcgctcatcccgttgtcgctgaagggcgtcaaataccgtccgattggcgctggcgcgctcctgtcgcgcaatctggtcatttatggcctcggcggcatcatcgttcccttcatcggcatcaagctcatcgacctcgccgtcacggcgctcggtctcgcctga

SEQ ID NO: 304 - protein, 694 aa, Agrobacterium tumefaciens
MSQSKQASILDSRILVPAIADAFKKLNPRTLARNPVMFVVATVSVLTTVLFIRDLITGGANLAFSFQINLWLWFTVLFANFAEAVAEGRGKAQADSLRKTRTETQAKLLNSDDRSQYKMVAGDSLKVNDVVLVEAGDIIPSDGEVIEGVASVNEAAITGESAPVIRESGGDRSAVTGGTQVLSDWIRVRITAAAGSTFLDRMISLVEGAERQKTPNEIALNILLAGMTLIFVLATATIPSFAAYAGGSIPIIVLVALFVTLIPTTIGALLSAIGIAGMDRLVRFNVLAMSGRAVEAAGDVDTLLLDKTGTITLGNRQATDLRPIPGVSEQELADAAQLASLADETPEGRSIVVLAKEKYGIRARDMQKLHATFVPFTAQTRMSGVDFEGASIRKGAVDAVLAYVDGGALQHGNAALALKTETDATRAIRAIAEDIAKAGGTPLAVVRDGKLLGVVQLKDIVKGGIRERFAELRRMGIRTVMITGDNPMTAAAIAAEAGVDDFLAQATPENKLELIREEQAKGKLVAMCGDGTNDAPALAQADVGVAMNTGTVAAREAGNMVDLDSDPTKLIEIVEIGKQLLMTRGALTTFSIANDIAKYFAIIPAMFLALYPQLGVLNVMGLSTPQSAILSAIIFNALIIIALIPLSLKGVKYRPIGAGALLSRNLVIYGLGGIIVPFIGIKLIDLAVTALGLA

SEQ ID NO: 305 - DNA, 2028 bp, Deinococcus radiodurans
  CDS (1)..(2028): transl_table=11
atgaccacggcccctcagcccaaacagagcatcttttctcccgagctggtgcgcggcgccgtccgggccagcttcgccaaactctcgccgcgcgaccaggcccgcaacccggtgatgttcgtggtctatctgggcaccgcgctcaccgcttacctcaccgtcgccaacctggtcaccggcaagccgtggggctacgaactggccatcacgctgctgctgctgctcacggtgctgtttgccaacttcgccgaaggaatggccgaggcgcgcggtaaggcacaggcggcgtcgctgcgctcggcgcgtgaggacgtcaaagcccggcggctggtgaacggtcaggaggaactggtcgcgggcaccgccctggaacgcggcgatctggtcgtcgtggaagcgggcgagatgattcccgccgacggcgaaatcgtggaaggcctcgccagcgtggacgagagtgcgattaccggcgaaagcgctcccgttatccgcgaagccggcaccgaccacagcggcgtgaccggcggcaccaaggtgctctccgaccgcatcgtcattcaaatcacctccggcgcgggcgaaagcttcctcgaccgcatgatcgcgctggtggagggagcgagccgccagaagacccccaacgaaatcgccctgtctattctgctgtccggcctcaccctgattttcctgctggcggtggtcacgctgtaccccttcacggtgtacgcgggtgcgccggcttcggcggtcaccctgatcgcgctgctggtctgcctgattcccaccaccatcggcgggctgctgccggccatcggcatcgccgggatggatagggctttgcaggccaacgtgatcgccaagagcggcaaggcggtggaagtcgcgggcgacgtggacgtgctgctgctcgacaagaccggcaccatcaccatcggcaaccgcatggcgacgaagtttcacccgctgcccggcgtgaccgaagcggaactggccaaagccgccctgctgagcagcctcgctgaccccacgcccgagggcaaaagcatcgtcgcactcgctcggcaactcggcgtggacgcgcccgaacccgccggcgccgagttcatcgaattcaccgcccagacccgcatgagcggcgtggattttcccggcacctccatccgcaagggcgcgggcagccgcatctcggcgctggcgcaggagcgcgggggccagctgccgcccgaacttgccgccatcaccgacgaggtgtcgcggcagggggccacgccgctcaccgtcatcgaaaacgaccgactgctgggcgtggtagcactctccgacatcatcaaacccggtatccgcgagcgcttcgagcagctgcggcgcatgggcctgcgtaccgtcatgattaccggcgacaacccgctgaccgccgaggcgattgccaaagaggccggtgtggacggctttctggcagaggccacgcccgaagacaagatggagatgatcaagcaggagcaggcgagcggcaagctggtcgccatgatgggcgacggcaccaacgacgccccggcgctggcgcaggccgacgtgggcctcgccatgaactccggcacccaggccgccaaggaagccggcaacatggtggatttggacagcgaccccaccaagctgctggaagtggtggaaatcggcaaaggcctgctgattacccgcggcgccctgaccactttttccatcgccaacgacgtcgccaagtacttcgccatcttgcccgcgctgttcgtgacggcttacccgcaactcggcgtgctgaacgtgatgggcctgcactcgcccaccagtgccgtgctgagcgccgtgattttcaacgcgctgattatcccggtgctgattccgctggccctgcggggcgtgccgtaccagccgatgagcgctggagccctgctcaaccgcaacctgctggtgtacggcggcggcggcatcctggtgccctttatcgccatcaaattgatcgatttgttgatcggtggattgatgtcatga

SEQ ID NO: 306 - protein, 675 aa, Deinococcus radiodurans
MTTAPQPKQSIFSPELVRGAVRASFAKLSPRDQARNPVMFVVYLGTALTAYLTVANLVTGKPWGYELAITLLLLLTVLFANFAEGMAEARGKAQAASLRSAREDVKARRLVNGQEELVAGTALERGDLVVVEAGEMIPADGEIVEGLASVDESAITGESAPVIREAGTDHSGVTGGTKVLSDRIVIQITSGAGESFLDRMIALVEGASRQKTPNEIALSILLSGLTLIFLLAVVTLYPFTVYAGAPASAVTLIALLVCLIPTTIGGLLPAIGIAGMDRALQANVIAKSGKAVEVAGDVDVLLLDKTGTITIGNRMATKFHPLPGVTEAELAKAALLSSLADPTPEGKSIVALARQLGVDAPEPAGAEFIEFTAQTRMSGVDFPGTSIRKGAGSRISALAQERGGQLPPELAAITDEVSRQGATPLTVIENDRLLGVVALSDIIKPGIRERFEQLRRMGLRTVMITGDNPLTAEAIAKEAGVDGFLAEATPEDKMEMIKQEQASGKLVAMMGDGTNDAPALAQADVGLAMNSGTQAAKEAGNMVDLDSDPTKLLEVVEIGKGLLITRGALTTFSIANDVAKYFAILPALFVTAYPQLGVLNVMGLHSPTSAVLSAVIFNALIIPVLIPLALRGVPYQPMSAGALLNRNLLVYGGGGILVPFIAIKLIDLLIGGLMS

SEQ ID NO: 307 - DNA, 2049 bp, Escherichia coli O157
  CDS (1)..(2049): transl_table=11
atgagtcgtaaacaactggcgctattcgaaccaacacttgtcgttcaggcgctgaaagaagcggtgaaaaaattaaacccgcaggcgcaatggcgcaatccggtgatgtttatcgtctggatcggcagtctgctgaccacctgtattagcatcgcgatggcaagcggcgcgatgcctggcaatgcgctgtttagcgtggccattagcggctggctgtgggtcaccgtactgttcgctaatttcgccgaggcgctggcagaaggccgcagtaaagcgcaggccaacagcctgaaaggggtgaaaaaaacggcctttgcccgcaagctgcgtgagccgaaatatggcgctgcggcggacaaagttcccgccgatcaactgcgtaaaggcgatatcgtactggtagaagcaggcgatattatcccctgcgatggtgaagttattgaaggcggcgcatcggtcgatgaaagcgccatcaccggggaatcggcaccggtgatccgtgaatccggcggcgattttgcctccgtcaccggcggcacgcgtattctttctgactggctggtgattgagtgtagcgttaaccccggcgagacatttctggatcggatgatcgcgatggtggaaggcgcacagcgacgcaaaacgccgaacgagattgccctgaccatcctgctgattgccctgactatcgtctttttactggcaaccgccacgctgtggccgttttccgcgtggggcggtaatgcagtcagcgtaacggtactggtggcgctgctggtctgtctgatcccaaccactattggcggcctgttgtcagcgatcggcgtcgccgggatgagtcggatgctgggcgcgaatgtggttgccaccagcggacgtgcagttgaagcggcaggtgacgttgacgttctgctgctggataaaaccggcaccatcacactcggtaaccgtcaggcatcggagtttatccctgcgcagggcgtggatgaaaaaacgctggctgacgccgcacaactggcttcgctggctgatgaaacgccggaaggccgcagtattgtgatcctcgccaagcagcgttttaacctgcgcgagcgcgatgtgcagtcgctccatgccacctttgtaccgtttactgcgcaaagccggatgagcgggatcaatatcgacaaccgcatgatccgtaaaggttctgtcgatgccattcgccgccatgttgaggctaacggtggtcacttccctgccgatgttgatcaaaaagtcgatcaggttgcgcgtcagggggccacaccgctggtagtagtagaaggttctcgtgtgctgggcgttattgcgttgaaagatatcgtcaaaggcggcattaaagaacgcttcgcccaactgcgcaaaatgggtattaaaacggtgatgattaccggcgataaccgtctgactgccgccgcgatagctgcggaagcgggcgtcgatgattttctcgccgaagcgacaccggaggccaagctggcattgatccgtcagtatcaggcggaaggccgtttggtagcaatgaccggcgacggcaccaacgatgctccggcgctggcgcaggcagatgtcgcggtggcgatgaactccggtactcaggcggcgaaagaagcgggcaatatggtggatctcgactctaacccgaccaagttgatcgaggtggtacatattggcaaacagatgctgatgacccgtggctcgctgaccaccttcagcattgccaacgatgtggcgaaatacttcgccattattccggcggcattcgcggtaacgtatccacagttaaatgcgctgaacatcatgcgcctgcattcgcccgactccgccattctcagtgcggtcattttcaacgccttgattatcgtctttttgattcccctggcgttaaaaggcgtgagttataaaccgcttaccgcttctgccatgttgcgccgtaacttatggatttacggtctgggtgggctgctggtgccgtttattggtatcaaagtcattgatttactactgaccgtttgcggtctggtgtga

SEQ ID NO: 308 - protein, 682 aa, Escherichia coli O157
MSRKQLALFEPTLVVQALKEAVKKLNPQAQWRNPVMFIVWIGSLLTTCISIAMASGAMPGNALFSVAISGWLWVTVLFANFAEALAEGRSKAQANSLKGVKKTAFARKLREPKYGAAADKVPADQLRKGDIVLVEAGDIIPCDGEVIEGGASVDESAITGESAPVIRESGGDFASVTGGTRILSDWLVIECSVNPGETFLDRMIAMVEGAQRRKTPNEIALTILLIALTIVFLLATATLWPFSAWGGNAVSVTVLVALLVCLIPTTIGGLLSAIGVAGMSRMLGANVVATSGRAVEAAGDVDVLLLDKTGTITLGNRQASEFIPAQGVDEKTLADAAQLASLADETPEGRSIVILAKQRFNLRERDVQSLHATFVPFTAQSRMSGINIDNRMIRKGSVDAIRRHVEANGGHFPADVDQKVDQVARQGATPLVVVEGSRVLGVIALKDIVKGGIKERFAQLRKMGIKTVMITGDNRLTAAAIAAEAGVDDFLAEATPEAKLALIRQYQAEGRLVAMTGDGTNDAPALAQADVAVAMNSGTQAAKEAGNMVDLDSNPTKLIEVVHIGKQMLMTRGSLTTFSIANDVAKYFAIIPAAFAVTYPQLNALNIMRLHSPDSAILSAVIFNALIIVFLIPLALKGVSYKPLTASAMLRRNLWIYGLGGLLVPFIGIKVIDLLLTVCGLV

SEQ ID NO: 309 - DNA, 2049 bp, Escherichia coli O6
  CDS (1)..(2049): transl_table=11
atgagtcgtaaacaactggcgctattcgaaccaacacttgtcgttcaggcgctgaaagaagcggtgaaaaaattaaacccgcaggcgcaatggcgcaatccggtgatgtttatcgtctggatcggaagtctgctgaccacctgtattagcatcgcgatggcaagcggtgtgatgcctggcaatgcgctgtttagcgcggcaattagcggctggctgtgggtcaccgtactgttcgctaatttcgccgaggcgttggcagaaggccgcagtaaagcgcaggccaacagtctgaaaggggtgaaaaaaaccgcttttgctcgcaaactgcgcgaaccgaaatatggcgctgcggcggacaaagttcctgctgatcaactgcgtaaaggtgacatcgtgctggtagaagctggcgatattatcccctgcgatggtgaagtcattgaaggcggcgcatcggtcgatgaaagcgccatcaccggggaatcagcaccggtgatccgtgaatccggcggtgattttgcctccgtcactggcggcacgcgtattctttctgactggctggtgattgagtgcagcgttaaccccggcgagacatttctggatcggatgatcgcgatggtggaaggtgcgcagcgacgtaaaacgccgaacgagattgccctgaccattctcctgattgccctgactatcgtctttttactggcaaccgccacgctgtggccgttttccgcgtggggcggtaatgcagtcagcgtaacggtactggtggcactgctggtctgtctgatcccaaccactattggcggcctgttgtcagcgattggcgtcgccgggatgagtcggatgctgggcgcgaatgttattgccaccagcgggcgagcagttgaagcagcgggtgatgttgacgttctgctgctggataaaaccggcaccatcaccctcggtaaccgtcaggcgtcagagtttatccccgcacaaggcgtggaggaaaaagcgctggccgacgccgcacaactggcttcgctggctgatgaaacgccggaaggccgcagtattgtgatcctcgccaagcagcgttttaacctgcgcgagcgcgatgtgcagtcgctccatgccacctttgtaccgtttactgcacaaagccggatgagcgggatcaacatcgacaaccgcatgatccgtaaaggttctgtcgatgccattcgccgccatgttgaggctaacggcggtcacttccctgccgatgttgatcaaaaagtcgatcaggttgcgcgtcagggagccacgccgctggtggtggtggaaggttctcgtgtgctgggcgttattgcgctgaaagatatcgtcaaaggcggtattaaagagcgcttcgcccagctgcgtaaaatgggcattaaaacggtgatgattaccggcgataaccgcctgactgccgccgcgatagctgcggaagcgggtgtcgatgattttctcgccgaagcaacaccggaggccaagctggcactgattcgtcagtatcaggcggaaggccgtttagtggcgatgaccggcgatggcaccaacgatgctccggcgctggcacaggccgatgttgcggtggcgatgaactccggcacccaggcggcgaaagaagcgggcaatatggtggatctcgactccaacccgaccaagttgatcgaggtagtgcacattggcaaacagatgctgatgacccgtggctcgttgaccaccttcagcattgccaacgatgtggcgaaatacttcgccattattccagcggcgttcgcggcaacgtatccgcagttaaatgcgctgaacatcatgcgcctgcattcgcccgactccgccattctcagtgcggtcattttcaacgccttgattatcgtctttttgattcccctggcgttaaaaggcgtgagttataaaccgcttaccgcttctgccatgttgcgccgtaacttatggatttacggtctgggtgggctgctggtgccgtttattggtatcaaagtcattgatttactgctaaccgtttgcggtctggtgtga

SEQ ID NO: 310 - protein, 682 aa, Escherichia coli O6
MSRKQLALFEPTLVVQALKEAVKKLNPQAQWRNPVMFIVWIGSLLTTCISIAMASGVMPGNALFSAAISGWLWVTVLFANFAEALAEGRSKAQANSLKGVKKTAFARKLREPKYGAAADKVPADQLRKGDIVLVEAGDIIPCDGEVIEGGASVDESAITGESAPVIRESGGDFASVTGGTRILSDWLVIECSVNPGETFLDRMIAMVEGAQRRKTPNEIALTILLIALTIVFLLATATLWPFSAWGGNAVSVTVLVALLVCLIPTTIGGLLSAIGVAGMSRMLGANVIATSGRAVEAAGDVDVLLLDKTGTITLGNRQASEFIPAQGVEEKALADAAQLASLADETPEGRSIVILAKQRFNLRERDVQSLHATFVPFTAQSRMSGINIDNRMIRKGSVDAIRRHVEANGGHFPADVDQKVDQVARQGATPLVVVEGSRVLGVIALKDIVKGGIKERFAQLRKMGIKTVMITGDNRLTAAAIAAEAGVDDFLAEATPEAKLALIRQYQAEGRLVAMTGDGTNDAPALAQADVAVAMNSGTQAAKEAGNMVDLDSNPTKLIEVVHIGKQMLMTRGSLTTFSIANDVAKYFAIIPAAFAATYPQLNALNIMRLHSPDSAILSAVIFNALIIVFLIPLALKGVSYKPLTASAMLRRNLWIYGLGGLLVPFIGIKVIDLLLTVCGLV

SEQ ID NO: 311 - DNA, 2049 bp, Escherichia coli; identical to SEQ ID NO: 213
  CDS (1)..(2049)

SEQ ID NO: 312 - protein, 682 aa, Escherichia coli; identical to SEQ ID NO: 214

SEQ ID NO: 313 - DNA, 2031 bp, Enterococcus faecalis
  CDS (1)..(2031): transl_table=11
atgaaaaaaatctatcaatgggcagtgggacaatcctttaaaaaattggatccacgccaacaagttaaaaatcccgtgatgtttgtcgtttatttaggtgcgctcatcactacaatattatgcttctacccaatgggtataccgttatggtttaacatttcaataaccatttttctttggttgactttgctttttgcgaattttgctgaagctgttgcagaaggacgaggaaaagcacaggccgatagtttgaaacaagcaaaaaaggaagtcatgacttataaaattaacagtttagaagatatcaaagaagagaatttcattgaattacagtcttctgatttaaagcgaaacgatttggtctatgtacgtgcaggagagcaaatcccagctgatggtgatgtaatcgagggggctgcatcagtagatgaaagtgccattactggcgaatcagcgccagtaattcgtgaatctggtggggatcgcagtgcggttactggcggaacaaccgtcgtttccgattatttagtgattcgtgttacctcggaaaacggtcaatccttcttagataaaatgattgccatggtagagggaactcaacgaaaaaagactccgaatgagattggtttgcagattttcttgattactttgaccattattttcttaactgtatcaattactttagtcccatttactgatttcagcagtcagttatctggtaaaggagaagctttatcactggttattgtgattgctttactaatctgtctggcgccaacgacgattggggccttaatctcttcgatcgggattgcaggtatgagccgcttgacgaaggaaaacgtcattgccatgagtggtcgtgcgatcgaagcagctggtgacgtggatgttcttttactcgacaaaacaggaaccataacattgggaaatcgacgagcaagcgattttttgccagtccatggtgttagtgaagaacagttagcggatgcggcgcaattatcttctttagctgatgagacagcagaaggtcgaagtatcgtgattttagcaaaagaacgtttcaacttgcgggaaagagaattccagcaatcagaggttaaatttatcgatttcagtgccaaaacacgcatgagcggaattgattatcgcggtgacgtgattcgcaaaggtgccgcagacaccatgaaaaaatatgtacaatctaaaggagaggactatccatctgaatgtgacaagattgttgataaaatcgctcgagcaggtggaacacctctagtagttataaaaaataatcgtgtgatgggtgtcgtctatttgaaagacatcgttaagaatggtgtaaaggaaaaatttgctgatatgcgtaagatgggtatcaagaccatcatgatcactggggataaccccttaacagcggcagcgatagcagcggaagctggagtagatgatttcttggcagaagctaccccagaaaataaaatgaatctgattcgcgagtatcaagaaaagggtcacttagttgcaatgactggtgatgggacaaacgatgcaccagcattagcgcaagccgacgttgcgatggcgatgaatacaggaacacaagccgcgaaggaagcggggaacatgattgatttggattccagtccaacaaaattgctgcaagtcgtacagattgggaaacaattgttgatgactcgcggcgcgttaactacgtttagtatcgcaaatgatatcgctaagtattttgcggtgattccagtactattttacagtatttatccgcaactggatcgattgaatattatgggattaggtagtccactgactgcgattctatccgctgtcatttataatgcagtcgttatcgtggccttgattccactagcattaaaaggtgtgaggtatcaagaaaaaccggccagtcaaattttgagtcataatctgctgatttatggacttgggggaattattgcaccatttatttttatcaagattatagatctgattctctcgctgatcattttataa

SEQ ID NO: 314 - protein, 676 aa, Enterococcus faecalis
MKKIYQWAVGQSFKKLDPRQQVKNPVMFVVYLGALITTILCFYPMGIPLWFNISITIFLWLTLLFANFAEAVAEGRGKAQADSLKQAKKEVMTYKINSLEDIKEENFIELQSSDLKRNDLVYVRAGEQIPADGDVIEGAASVDESAITGESAPVIRESGGDRSAVTGGTTVVSDYLVIRVTSENGQSFLDKMIAMVEGTQRKKTPNEIGLQIFLITLTIIFLTVSITLVPFTDFSSQLSGKGEALSLVIVIALLICLAPTTIGALISSIGIAGMSRLTKENVIAMSGRAIEAAGDVDVLLLDKTGTITLGNRRASDFLPVHGVSEEQLADAAQLSSLADETAEGRSIVILAKERFNLREREFQQSEVKFIDFSAKTRMSGIDYRGDVIRKGAADTMKKYVQSKGEDYPSECDKIVDKIARAGGTPLVVIKNNRVMGVVYLKDIVKNGVKEKFADMRKMGIKTIMITGDNPLTAAAIAAEAGVDDFLAEATPENKMNLIREYQEKGHLVAMTGDGTNDAPALAQADVAMAMNTGTQAAKEAGNMIDLDSSPTKLLQVVQIGKQLLMTRGALTTFSIANDIAKYFAVIPVLFYSIYPQLDRLNIMGLGSPLTAILSAVIYNAVVIVALIPLALKGVRYQEKPASQILSHNLLIYGLGGIIAPFIFIKIIDLILSLIIL

SEQ ID NO: 315 - DNA, 2079 bp, Leptospira interrogans serogroup Icterohaemorrhagiae serovar
  CDS (1)..(2079): transl_table=11
atgaatcgtgagtccaaagtttttatagaatccccaattttaaaagaagcgatcttaaatacattcaaaaaattgcatccatttttgcaggccaaaaatccggttatgtttatcgtatttttaggcgcactttttacaacttggatcttctttaaagatttatattatggagtttattcttcctttaacctgcaaattagtctatggttgtggtttacggtgctttttgccaattttgcagaagcgattgcggaaggaaggggaaaagcgagaacggatagtcttaaaaaaactagatccaatataatcgctaaaaaattggtagggaataagatagaaaatgttcctggaactttattaaaaattggtgatatagttatttgtgaggcgggagatttgatttccggagacggggaaattttagaagggattgcaagcgtggacgaatctgcgattaccggagagtctgcgcctgtagttcgagagagtggaggagatagaagcgcggttactggtggaaccaaagttttaagcgacaggattaaaatttcaatcaccgcagaacaaggaagaacctttttagatcagatgattgcattggtagaaggagccaaacgtcaaaaaacgccaaacgaaatcgctcttacgatgttattatccgggttgtcttttatcttcttgattgctgtgatgagtcttcctttatttgccgagttcgttgctaaagaaggaggacaaagtgcaaatctttccattccaattttgatttctcttttagtatgtctgattcctaccacgattgccggattattgtcagccattggaatttctggaatggaacgtctcattcgttttaatgtaatttcaaaaagtggaagagcgatcgaggccgctggagatatagacattcttttattagataaaacaggaacaattacgttaggcaatagagaggcaagagatttttatcccgccaaaggagtagatgaaaaatatttagcggatgtggctcaactttcttctcttgcggacgaaaccccagaaggaaggtccatcgtaatattagcaaaagataaatttggaatccgagaaagaaacttaagcgaaatggaaggtgaatttatacctttcagcgcttctacaaaaatgagcggagtgaatttgaaaaaagaaggaaaggtagttcgaaaaattcgaaaaggagcgggagactcgattcgaaattatctgcatacgttgggtcaaaaaatttctgcagaactggaagaaacgattcaaacaatttcacaaagaggaagtactccaattttaataaccgaagaagataggcttttaggcgtgattgaattaaaggatatagtcaaagggggactcaaagaaagatttgcaagtcttagaaagatgggaattagaaccgtgatgattaccggagacaatcctttgacagctgcggcgattgccgcagaagcgggagtggacgattttcttgcggaagcgactccggaaactaagttgaaaaaaattagagaacaacaagccaaaggttacctggttgcgatgattggagacggaactaatgatgcgcctgcattagcgcaatcggatgtgggtgtggctatgaatacaggcacacaaaccgcaagagaggccgggaatatgatcgatcttgatagtaatcctagcaaactgatagaaatagtagaaataggaaagcaacttttgatgacaagaggagcattaactacgtttagtattgcaaatgacgtagcaaagtactttgctattttgcccgctttgttcggaagtttttatgctgtgtcggaagttggtcctttgtccgctctcaatctaatgaaactaggttctcaaaaaagtgcggtactaagcgcggttatattcaacgctctcgtgatacctgctctgatacctctggctcttagggggatcgtttataagccgttaggtgctgataggatattaaaaagaaatcttttgatttttggtttgggaggaatggtcattccgttcttagggataaagtgtatagatttgatgttaggcttcctaggaatcatttaa

SEQ ID NO: 316 - protein, 692 aa, Leptospira interrogans serogroup Icterohaemorrhagiae serovar
MNRESKVFIESPILKEAILNTFKKLHPFLQAKNPVMFIVFLGALFTTWIFFKDLYYGVYSSFNLQISLWLWFTVLFANFAEAIAEGRGKARTDSLKKTRSNIIAKKLVGNKIENVPGTLLKIGDIVICEAGDLISGDGEILEGIASVDESAITGESAPVVRESGGDRSAVTGGTKVLSDRIKISITAEQGRTFLDQMIALVEGAKRQKTPNEIALTMLLSGLSFIFLIAVMSLPLFAEFVAKEGGQSANLSIPILISLLVCLIPTTIAGLLSAIGISGMERLIRFNVISKSGRAIEAAGDIDILLLDKTGTITLGNREARDFYPAKGVDEKYLADVAQLSSLADETPEGRSIVILAKDKFGIRERNLSEMEGEFIPFSASTKMSGVNLKKEGKVVRKIRKGAGDSIRNYLHTLGQKISAELEETIQTISQRGSTPILITEEDRLLGVIELKDIVKGGLKERFASLRKMGIRTVMITGDNPLTAAAIAAEAGVDDFLAEATPETKLKKIREQQAKGYLVAMIGDGTNDAPALAQSDVGVAMNTGTQTAREAGNMIDLDSNPSKLIEIVEIGKQLLMTRGALTTFSIANDVAKYFAILPALFGSFYAVSEVGPLSALNLMKLGSQKSAVLSAVIFNALVIPALIPLALRGIVYKPLGADRILKRNLLIFGLGGMVIPFLGIKCIDLMLGFLGII

SEQ ID NO: 317 - DNA, 2094 bp, Leptospira interrogans
  CDS (1)..(2094): transl_table=11
atgaatcgtgagtccaaagtttttatagaatccccaattttaaaagaagcgatcttaaatacattcaaaaaattgcatccatttttgcaggccaaaaatccggttatgtttatcgtatttttaggcgcactttttacaacttggatcttctttaaagatttatattatggagtctattcttcctttaacctgcaaattagtctatggttgtggtttacggtgctttttgccaattttgcagaagcgattgcggaaggaaggggaaaagcgagaacggatagtcttaaaaaaactagatccaatataatcgctaaaaaattggtagggaataagatagaaaatgttcctggaactttattaaaaattggtgatatagttatttgtgaggcgggagatttgattcccggagacggggaaattttagaagggattgcaagcgtggacgaatctgcgattaccggagagtctgcgcctgtagttcgagagagtggaggagatagaagcgcggttactggtggaaccaaagttttaagcgacaggattaaaatttcaatcaccgcagaacaaggaagaacctttttagatcagatgattgcattggtagaaggagccaaacgtcaaaaaacgccaaacgaaatcgctcttacgatgttattatccgggttgtcttttatcttcttgattgctgtgatgagtcttcctttatttgccgagttcgttgctaaagaaggaggacaaagtgcaaatctttccattccaattttgatttctcttttagtatgtctgattcctaccacgattgccggattattgtcagccattggaatttctggaatggaacgtctcattcgttttaatgtaatttcaaaaagtggaagagcgatcgaggccgctggagatatagacattcttttattagataaaacagggacaattacgttaggcaatagagaggcaagagatttttatcccgccaaaggagtagatgaaaaatatttagcggatgtggctcaactttcttctcttgcggacgaaaccccagaaggaaggtccatcgtaatattagcaaaagataaatttggaatccgagaaagaaacttaagcgaaatggaaggtgaatttatacctttcagcgcttctacaaaaatgagcggagtgaatttgaaaaaagaaggaaaggtagttcgaaaaattcgaaaaggagcgggagactcgattcgaaattatctgcatacgttgggtcaaaaaatttctgcagaactggaagaaacgattcaaacaatttcacaaagaggaagtactccaattttaataaccgaagaagataggcttttaggcgtgattgaattaaaggatatagtcaaagggggactcaaagaaagatttgcaagtcttagaaagatgggaattagaaccgtgatgattaccggagacaatcctttgacagctgcggcgattgccgcagaagcgggagtggacgattttcttgcggaagcgactccggaaactaagttgaaaaaaattagagaacaacaagccaaaggttacctggttgcgatgattggagacggaactaatgatgcgcctgcattagcgcaatcggatgtgggtgtggctatgaatacaggcacacaaaccgcaagagaggccgggaatatgatcgatcttgatagtaatcctagcaaactgatagaaatagtagaaataggaaagcaacttttgatgacaagaggagcattaactacgtttagtattgcaaatgacgtagcaaagtactttgctattttgcccgctttgtttggaagtttttatgctgtgtcggaagttggtcctttgtccgctctcaatctaatgaaactaggttctcaaaaaagtgcggtactaagcgcggttatattcaacgctctcgtgatacctgctctgatacctctggctcttagggggatcgtttataagccgttaggtgctgataggatattaaaaagaaatcttttgatttttggtttgggaggaatggtcattccgttcttagggataaagtgtatagatttgatgttaggcttcctacggaatcatttaaggagaattttatga

SEQ ID NO: 318 - protein, 697 aa, Leptospira interrogans
MNRESKVFIESPILKEAILNTFKKLHPFLQAKNPVMFIVFLGALFTTWIFFKDLYYGVYSSFNLQISLWLWFTVLFANFAEAIAEGRGKARTDSLKKTRSNIIAKKLVGNKIENVPGTLLKIGDIVICEAGDLIPGDGEILEGIASVDESAITGESAPVVRESGGDRSAVTGGTKVLSDRIKISITAEQGRTFLDQMIALVEGAKRQKTPNEIALTMLLSGLSFIFLIAVMSLPLFAEFVAKEGGQSANLSIPILISLLVCLIPTTIAGLLSAIGISGMERLIRFNVISKSGRAIEAAGDIDILLLDKTGTITLGNREARDFYPAKGVDEKYLADVAQLSSLADETPEGRSIVILAKDKFGIRERNLSEMEGEFIPFSASTKMSGVNLKKEGKVVRKIRKGAGDSIRNYLHTLGQKISAELEETIQTISQRGSTPILITEEDRLLGVIELKDIVKGGLKERFASLRKMGIRTVMITGDNPLTAAAIAAEAGVDDFLAEATPETKLKKIREQQAKGYLVAMIGDGTNDAPALAQSDVGVAMNTGTQTAREAGNMIDLDSNPSKLIEIVEIGKQLLMTRGALTTFSIANDVAKYFAILPALFGSFYAVSEVGPLSALNLMKLGSQKSAVLSAVIFNALVIPALIPLALRGIVYKPLGADRILKRNLLIFGLGGMVIPFLGIKCIDLMLGFLRNHLRRIL

SEQ ID NO: 319 - DNA, 2046 bp, Listeria monocytogenes serotype 4b
  CDS (1)..(2046): transl_table=11
atgatggaaaaaggtatttggaaagatgcgctgattcagtcgacgaaaaaactgtctccaaaactgcaagtgaaaaatccggtgatgttgcttgtttatgttggtgcgattttggcaacgagcctttattttctcggtttcttcgggatttcagatgagaagtctggttatacgctagcaattgcgctgattttatggtttacagtgttatttgcgaattttgcagaggcgattgcggaaggtcgcggtcgagcacaggcggatagtttgaaaatggctcgaaaagacgttttagctcgaaaattgaagaatattgatgataaaactgatgtgatcgaaattgcttcgaatgacttgaaaaaaggcgacattgtgtatgtccttgcgaatgaacaaatcccgatggatggcgaggttattgaaggtgcggcttcagttgatgaaagtgcgataactggggagtctgcacccgtaattcgagagtctggcggggatagaagtgctgtgacgggtggaactacgcttgtttctgactggcttgttgttcgtgtgacggcggtctctggagaaagtttcttagataaaatgattgcaatggtggaaggagcttcacggaaaaagacgccgaatgagattgcgctacaaattttgcttgtaacgctttcgattatttttttggcagtttcagcgacgcttttaccatttactgaatttgcgagtaagcaggcgggtgctggatcggcaatttcgattacgaatgtgattgctttgcttgtttgtttggcgccaactacgattggtgcactactttcgtcgattggaattgcagggatgagtcggttaaatcaagcgaatgttttagcgatgagtggtcgtgcgattgaggcagctggtgatgtggatgtgcttttgctcgataaaactgggacgattacactgggaaaccgcaaagcaagcgaatttttgccagtggatggtgtgacggaacaagagctggcagatgcggcgcaactttcttcgattgcggacgaaacagcggagggcaggagtattgttgtattagcgaaagaacggttcgacattcgcggccgagattttgctgaaatgcacgcagaatttgttcccttcactgcaacaacccgaatgagcggaattgactatcaagaaaatacgattcgaaaaggtgcggcggatgcggttcgtgcttacgtaacggcgaatggcgggacgtacccaaaagagtgtgatgcaattgtgagcaaagttgctggtgctggtggtacaccgcttgtagtagtccgaaataacaaagtgctaggcgttatttatttaaaagacatcgtgaaaaatggagtgaaagaacgtttccttgatttacgaaaaatgggtattaaaaccattatgattaccggtgataacccaatgactgcggcagccattgcggcggaagcaggggtcgatgattttctagcagaagcaactccagaagcaaaattggaattaattcgtgaatatcaacgggaaggtcatttggttgcaatgacaggtgatggcacgaatgacgcaccagctcttgcacaagcggatgttgctgttgcgatgaatacaggaacacaagcggcaaaagaagctgggaatatggttgatctggattctagtcctactaaattaattgatattgtgcggattggcaaacaacttttaatgacgcgtggtgcactgacaacatttagtgttgctaatgatttagcgaaatactttgcgattattccagtgctgttttacggtattttcccacaacttgaagcacttaatttaatgggattaaccagcccgacgagcgctattttatccgcgattatttacaatgcggtgattatcattattttaattccgctttctttaaaaggcgtgaagtatcgtgaaatgccggccgggaaattactgagcagaaatatgttgatttatggtctgggtggtttgattgctccatttatcgcgattaaattgattgatatgctgttaactgttttaggaatcgtttaa

SEQ ID NO: 320 - protein, 681 aa, Listeria monocytogenes serotype 4b
MMEKGIWKDALIQSTKKLSPKLQVKNPVMLLVYVGAILATSLYFLGFFGISDEKSGYTLAIALILWFTVLFANFAEAIAEGRGRAQADSLKMARKDVLARKLKNIDDKTDVIEIASNDLKKGDIVYVLANEQIPMDGEVIEGAASVDESAITGESAPVIRESGGDRSAVTGGTTLVSDWLVVRVTAVSGESFLDKMIAMVEGASRKKTPNEIALQILLVTLSIIFLAVSATLLPFTEFASKQAGAGSAISITNVIALLVCLAPTTIGALLSSIGIAGMSRLNQANVLAMSGRAIEAAGDVDVLLLDKTGTITLGNRKASEFLPVDGVTEQELADAAQLSSIADETAEGRSIVVLAKERFDIRGRDFAEMHAEFVPFTATTRMSGIDYQENTIRKGAADAVRAYVTANGGTYPKECDAIVSKVAGAGGTPLVVVRNNKVLGVIYLKDIVKNGVKERFLDLRKMGIKTIMITGDNPMTAAAIAAEAGVDDFLAEATPEAKLELIREYQREGHLVAMTGDGTNDAPALAQADVAVAMNTGTQAAKEAGNMVDLDSSPTKLIDIVRIGKQLLMTRGALTTFSVANDLAKYFAIIPVLFYGIFPQLEALNLMGLTSPTSAILSAIIYNAVIIIILIPLSLKGVKYREMPAGKLLSRNMLIYGLGGLIAPFIAIKLIDMLLTVLGIV

SEQ ID NO: 321 - DNA, 2046 bp, Listeria monocytogenes
  CDS (1)..(2046): transl_table=11
atgatggaaaaaggtatttggaaagatgcgctgattcagtcgacgaaaaaactgtctccaaaactgcaagtgaaaaatccggtgatgttgcttgtttatgttggtgcgattttggcaacgagcctttattttctcggtttcttcgggatttcggatgagaagtctggttatacgctagcaattgcgctgattttatggtttacagtgttatttgcgaattttgctgaggcgattgcggaaggtcgtggtcgagcacaggcggatagtttgaaaatggctcgaaaagacgttttagctcgaaaattaaagaatgttgatgataaaactgatgtgattgaagttgcttcgaatgacttgaaaaaaggcgatattgtgtatgtccttgcgaatgaacaaataccgatggatggcgaggtcattgaaggtgcggcttcggttgatgaaagtgcgataactggggaatctgcaccagtaattcgagagtctggcggggatagaagtgccgtgacgggtggaactacacttgtttccgattggctggttgttcgtgtaacggcggtctctggagaaagtttcttagataaaatgattgcgatggtggaaggtgcttcacggaaaaagacaccgaacgagattgctctacaaattttgcttgtaacgctttcgattatttttctggcggtttcagcgacacttttaccatttactgaatttgcgagtaagcaggcgggtgctggatcggcaatttcgattacgaatgtgattgctttgctcgtttgtttggcgccaactacgattggtgcactactttcgtcgattggaattgcagggatgagtcggttaaatcaagcgaatgttttagcgatgagtggtcgtgcgattgaggcagctggcgatgtggatgtgcttttgctcgataaaactgggacgattacactgggaaaccggaaagcaagcgaatttttgccagtggatggtgtgacggaacaagagctagcagatgcggcgcaactttcttcgattgcggatgaaacggcggaaggtcgcagtattgttgtgttggcgaaagaacgctttgatattcgtggtcgagattttgctgaaatgcacgcagaattcgttcctttcacggcaacaacgcgaatgagtggaattgattatcaagaaaatacgattcgaaaaggcgcggcggatgcggttcgtgcatatgtaacggcgaatggtgggacgtaccccaaagagtgtgatgcgattgtgagtaaagttgctggagctggtggtacaccgcttgtcgttgttcgtaacaatcaagtgctgggcgtcatttatttaaaagatatcgtgaaaaatggtgtaaaagaacgttttctcgatttacgaaaaatgggtattaaaacaattatgattactggcgataatccaatgaccgcagcagcaattgcggcagaagcaggagtcgatgattttctagcagaagcaaccccagaagcaaaattggaattaattcgtgaatatcaacgggaaggccatttagtggcgatgacaggagacggaacgaatgatgcgccagctcttgcgcaagcggatgtggcggttgcgatgaatacaggaacacaagctgcaaaagaagctgggaatatggttgatctggattctagtcctactaaattaattgatattgttcggattggcaaacaactgctaatgacacgtggggcactgacgacttttagtgttgctaacgacttagcaaaatactttgcgattattccggtgttattttacggtatttttccacagcttgaagcgcttaatttaatgggattaacaagcccgacgagcgccattttatccgcgattatttacaatgcggtgattatcattgttcttattccgctttctttaaaaggtgtgaaatatcgtgaaatgcctgctggaaaattactgagccgaaatatgttgatttatggtctgggggggttgattgctccatttatcgcgattaaattgattgatatgctattaactgttctaggaatcgtttaa

SEQ ID NO: 322 - protein, 681 aa, Listeria monocytogenes
MMEKGIWKDALIQSTKKLSPKLQVKNPVMLLVYVGAILATSLYFLGFFGISDEKSGYTLAIALILWFTVLFANFAEAIAEGRGRAQADSLKMARKDVLARKLKNVDDKTDVIEVASNDLKKGDIVYVLANEQIPMDGEVIEGAASVDESAITGESAPVIRESGGDRSAVTGGTTLVSDWLVVRVTAVSGESFLDKMIAMVEGASRKKTPNEIALQILLVTLSIIFLAVSATLLPFTEFASKQAGAGSAISITNVIALLVCLAPTTIGALLSSIGIAGMSRLNQANVLAMSGRAIEAAGDVDVLLLDKTGTITLGNRKASEFLPVDGVTEQELADAAQLSSIADETAEGRSIVVLAKERFDIRGRDFAEMHAEFVPFTATTRMSGIDYQENTIRKGAADAVRAYVTANGGTYPKECDAIVSKVAGAGGTPLVVVRNNQVLGVIYLKDIVKNGVKERFLDLRKMGIKTIMITGDNPMTAAAIAAEAGVDDFLAEATPEAKLELIREYQREGHLVAMTGDGTNDAPALAQADVAVAMNTGTQAAKEAGNMVDLDSSPTKLIDIVRIGKQLLMTRGALTTFSVANDLAKYFAIIPVLFYGIFPQLEALNLMGLTSPTSAILSAIIYNAVIIIVLIPLSLKGVKYREMPAGKLLSRNMLIYGLGGLIAPFIAIKLIDMLLTVLGIV

SEQ ID NO: 323 - DNA, 2130 bp, Mycobacterium bovis
  CDS (1)..(2130): transl_table=11
gtgatgatcgcacgcatggagacctccgcaaccgccgcggcagcgacgtcggcaccccggctccggctggccaagcgctcgctgttcgatccgatgattgtgcgctcggcgctgccccagagcctgcgcaagctggctccgcgggtacaggcccgtaacccggtcatgttggtcgtgctggtcggtgccgtgatcaccacactggcgttcctgcgcgacctcgcatcctcgacagcccaagagaacgtcttcaacggtctggtcgccgcgttcctctggttcaccgtcctgtttgccaactttgccgaggccatggccgaaggacgcggcaaggctcaggcggcggcgctgcgcaaagtccggtccgaaacgatggccaaccggcgcacggctgcgggcaacatcgaatcggtcccttcgtcgcggctggacctcgacgacgtggtggaggtttcggctggcgaaacgatcccgtcggacggcgagatcatcgaaggcattgcctccgtcgacgagtctgcgatcaccggcgaatcggcaccggtgatccgcgagtcgggcggcgaccgttccgcggtgacgggtggcaccgtggtgctgtcggatcggatcgtcgtgcggatcaccgccaagcagggacaaacattcatcgaccggatgatcgcgctggtggagggcgccgcacggcagcagacaccgaacgagatcgcgctgaacatcctgctggctgggctgacgatcatctttttgctcgcggtggtgacgctgcagccgttcgccatctattccggcgggggacagcgggtggtcgtgctggtggcgttgctggtgtgtctcattccgaccacgatcggtgcgctgctgtccgcgatcggcatcgcggggatggaccggctggtgcaacacaacgtgctcgccacatctgggcgggcggtggaggcggccggcgacgtgaacacgctgctgctggacaagaccggcaccatcaccctcggtaaccggcaggccaccgagttcgtgccgatcaacggtgtgagtgccgaggcggtcgccgacgccgcccagctgtcgagcttggccgacgaaactccggagggccgctcgatcgtcgtgctggcgaaggacgagttcgggctgcgcgcccgcgacgagggcgtgatgtcacacgccaggttcgtgccgttcaccgccgaaacccggatgtccggggtcgatctcgccgaggttagcggcatccgtcggatccgcaagggtgccgcggctgcggtgatgaagtgggttcgcgatcacggtggccaccccaccgaggaggtgggtgccattgtcgacggcatcagctccggcggggggacacccctagtcgttgcggaatggaccgataacagcagcgcgcgggccatcggcgtcgtccatctgaaggacatcgtcaaggtgggcatacgggaacgcttcgacgaaatgcgccgaatgagcatccgcaccgtgatgatcaccggtgacaacccggcgaccgccaaggcgattgcacaggaggccggcgtcgacgatttcttggccgaggccacgcccgaggacaagcttgcgctcatcaagcgcgaacagcagggcggtcggctggtcgccatgacgggtgacgggaccaatgacgcacccgcgctcgcgcaagccgatgtcggggtggcgatgaataccggcacccaggcggcccgggaagccggcaacatggtcgatctcgactccgaccccaccaagctcatcgaggtcgtggagatcggcaagcagctgctgatcacgcggggcgcgctgacgacgttttcgatcgccaacgacgtcgcgaagtacttcgccatcatccctgccatgttcgtcggcctgtatccggtgctcgacaagctgaacgtcatggcgctgcactcaccaaggtcggcgattctgtcggcggtcatcttcaatgcgctggtgatcgtcgccttgatcccattggcgttgcggggcgtgcggtttagggcggaaagcgcgtcggcgatgctgcggcgcaacctgctgatctatgggctgggcggtctcgtcgtcccgtttatcggcattaaactggtcgatctcgtcatcgtcgccctcggggtgtcctga

SEQ ID NO: 324 - protein, 709 aa, Mycobacterium bovis
MMIARMETSATAAAATSAPRLRLAKRSLFDPMIVRSALPQSLRKLAPRVQARNPVMLVVLVGAVITTLAFLRDLASSTAQENVFNGLVAAFLWFTVLFANFAEAMAEGRGKAQAAALRKVRSETMANRRTAAGNIESVPSSRLDLDDVVEVSAGETIPSDGEIIEGIASVDESAITGESAPVIRESGGDRSAVTGGTVVLSDRIVVRITAKQGQTFIDRMIALVEGAARQQTPNEIALNILLAGLTIIFLLAVVTLQPFAIYSGGGQRVVVLVALLVCLIPTTIGALLSAIGIAGMDRLVQHNVLATSGRAVEAAGDVNTLLLDKTGTITLGNRQATEFVPINGVSAEAVADAAQLSSLADETPEGRSIVVLAKDEFGLRARDEGVMSHARFVPFTAETRMSGVDLAEVSGIRRIRKGAAAAVMKWVRDHGGHPTEEVGAIVDGISSGGGTPLVVAEWTDNSSARAIGVVHLKDIVKVGIRERFDEMRRMSIRTVMITGDNPATAKAIAQEAGVDDFLAEATPEDKLALIKREQQGGRLVAMTGDGTNDAPALAQADVGVAMNTGTQAAREAGNMVDLDSDPTKLIEVVEIGKQLLITRGALTTFSIANDVAKYFAIIPAMFVGLYPVLDKLNVMALHSPRSAILSAVIFNALVIVALIPLALRGVRFRAESASAMLRRNLLIYGLGGLVVPFIGIKLVDLVIVALGVS

SEQ ID NO: 325 - DNA, 2061 bp, Myxococcus xanthus
  CDS (1)..(2061): transl_table=11
atgtcctcgcctgcttcgaaaccggcgtcgctgctggacgcctcactgctcaaacccgcgatggtggacagcctgcgaaagctccacccgcgcgacgtggcccgcaaccccgtcatgttcgtggtgtgggctgggagtctgctcaccacggtgttggtggtgaaggatttggtggcgccgcgcccggatgccgcgccgctgggcttcaccgtgcaggtgacgctgtggctgtggttcaccgtgctcttcgccaacttcgcggaggccgtggcggagggccgcggcaaggcccaggctggcgccctgcggaagatgcgcaaggagaccaccgcgcgccgctggaaggacgggcgcgaggagcgcgtgcccgcgccggacctgcgcaagggggacgaggtgatttgcgaggccggggacctcatccccggtgacggtgaggtggtggagggcatcgccagcgtggacgagtccgcgattaccggcgagtccgcgcccgtcatccgggagtcgggtggtgaccgctcggcggtgacgggcggaacgaaggtgctctccgaccgcatccgcgtgcgcatctccgccaaccccggcgactccttcctggaccggatgattggcctggtggaaggcgcggcccggcagaagacgcccaacgaggtggcgctccacatcctgctggtggggctcaccctcatcttcctgttggcgtgcgtgacgctggtgccgctggcgctctactcgggagtgccgctgtcgggcacggcggtggtggcgctgctggtgtgcctcattcccacgacgattggcggcctgctgagcgccattggcatcgcgggcatggaccggctgctgcgcaagaatgtgctggccatgagtggccgcgcggtggaggcggcgggtgacgtggacacgctgctgctcgacaagacggggaccattaccctgggcaaccgcatggccacggagttgctccccatgccgggtgtgcggatggaggagctggccgaggccgcgcagctcgccagtctcgcggatgagacacccgaggggcgctccatcgtcacgctggtgaaggacacgtacaagatgcgcccgcgcgagctccaggcgcaccacgccaccttcgtgcccttcaccgcgcagacacgcatgagcggctgtgacctggtggacccgcacccgcgcagcatccgcaagggcgcggtggacgccatcgtcacgtacgtccgttcccagggcggcgcggtgccggatgagctggcgcaggcgtcgggccgtatcggcgacgcgggtggaacaccgctggcggtggcggacggtgcgcggctgctgggcatcatccacctgaaggacgtggtgaagggcggcatcaaggagcgcttcgaccgcttccgcgccatgggcattcgcacggtgatgattacgggcgacaacccgcgcaccgccgcggcgattgcacgcgaggcgggcgtggatgacttcctggccgaggccactcccgaggccaagctggccctcatccgcaccgagcagggccgcggcaagctggtggccatgacgggcgacggcaccaacgacgcgcccgcgctggcccaggcggacgtgggcgttgcgatgaacaccggcacccaggcggcgaaggaggccgggaacatggtggacctggactccaatcccaccaagctgctggaggtggtggaggtgggcaagcagttgctgatgacgcacggcacgttgacgaccttctccatcgccaacgacgtggcgaagtacttcgccatcctcccggcgctcttcatgggcgtgttcccgcagattgcaccgctcaacgtgatggggttgtcctcgccgttcagcgcggtgctgtcggccgtcatcttcaacgcgctcatcatcatcctgctcatccccctggcgctgaagggtgtccgctaccgcccgttgggcgccgaggccctgctgcggcgcagcctgctgctgtacggcgtgggcggcgtcatcgttcccttcgtgggcatcaaggtcatcgacgtgctgctcggcgccgtgggtctggcgtga

SEQ ID NO: 326 - protein, 686 aa, Myxococcus xanthus
MSSPASKPASLLDASLLKPAMVDSLRKLHPRDVARNPVMFVVWAGSLLTTVLVVKDLVAPRPDAAPLGFTVQVTLWLWFTVLFANFAEAVAEGRGKAQAGALRKMRKETTARRWKDGREERVPAPDLRKGDEVICEAGDLIPGDGEVVEGIASVDESAITGESAPVIRESGGDRSAVTGGTKVLSDRIRVRISANPGDSFLDRMIGLVEGAARQKTPNEVALHILLVGLTLIFLLACVTLVPLALYSGVPLSGTAVVALLVCLIPTTIGGLLSAIGIAGMDRLLRKNVLAMSGRAVEAAGDVDTLLLDKTGTITLGNRMATELLPMPGVRMEELAEAAQLASLADETPEGRSIVTLVKDTYKMRPRELQAHHATFVPFTAQTRMSGCDLVDPHPRSIRKGAVDAIVTYVRSQGGAVPDELAQASGRIGDAGGTPLAVADGARLLGIIHLKDVVKGGIKERFDRFRAMGIRTVMITGDNPRTAAAIAREAGVDDFLAEATPEAKLALIRTEQGRGKLVAMTGDGTNDAPALAQADVGVAMNTGTQAAKEAGNMVDLDSNPTKLLEVVEVGKQLLMTHGTLTTFSIANDVAKYFAILPALFMGVFPQIAPLNVMGLSSPFSAVLSAVIFNALIIILLIPLALKGVRYRPLGAEALLRRSLLLYGVGGVIVPFVGIKVIDVLLGAVGLA

SEQ ID NO: 327 - DNA, 2235 bp, Ralstonia solanacearum
  CDS (1)..(2235)
atggctctccgctatcctgaatccgatccggtggtgcgcaccgtcaagcaccgcctggacagcacggacgctgccgcccatgccgccgcgcccgcccgcaccaccacgcaccccggcgcgcaccctccgctgagcgccaaggacgtgcgccggctgtcgatgttcgcgccggcactggtcaggcccgccatcgtcgacagtttccgcaagctgtcgccgcgcgcgcaggccaagaacccggtgatgttcgtcgtctatatcggcagcatcctgaccaccctgctgtgggtgatggcgctgcgcggccaggccgaggcgccggcgggcttcatcctcgccgtgtcggtgtggctgtggttcaccgtgctgttcgccaacgttgccgaggcgctggccgagggccgcagcaagcagcaggccgcctcgctgcgcggcatcaagaccaccgtgcaggccaaggtgctggccgatccccagcggcgcgaccgcgtgcagccgcgcgcggccaccgcgctgcgccgtggcgacatcgtcctcatcgaagccggcgacatggtgcccggcgacggcgaggtcatcgaaggcgtggcctcggtggacgagagcgccatcaccggggaatccgcgccggtgatccgcgagtccggcggcgatttctcgtcggtcaccggcggcacgcgcgtgctgtcggactggatcgtggcgcgcatcaccgccaacccgggcgagagcttcctcgaccgcatgatctcgatggtggaaggcgccaagcggcagaagacgcccaacgagctggcgctgaccatcctgctggtgagcctgaccatcatcctgctgctggcgaccgtcacgctgctgccgtactcgatcttctcggtggaggtgatgaaggccgcgggcgtgacaagttcgccgatcaccatcaccgtgctggtggcgctgctggtgtgcctgatcccgaccaccatcggcgggctgctgtcggccatcggcgtggccggcatgagccgcatgatgcaggccaacgtgatcgccacctcgggccgcgcggtggaagccgccggcgacgtcgacgtgctgctgctcgacaagaccggcaccatcacgcacggcaaccgccaggcctcgcgcttcatccccgcgccgggcgtgacggtcaaggcgctggccgaggccgcgtggctgtcgtcgctggccgacgagacgcccgagggccgcagcatcgtcacgctggcgcgccagctgggcgaggccgccgtcgacgaggcggcgctggcgcggtcgcagccggtgttcgtgcccttctccgcgcagacgcgcatgagcggcatcaacgtggccctgggcgacgcagcgcaccagatccgcaagggcgccgccgatgccatccgcacgcacgtgacggtgctggccggccggtttcccgaggccgtgctggccgccgtggaagacgtggcgcgcaagggcggcacgccactggtggtgtccgacaacgaccgcgtgatgggcgtggtggaactgaaggacatcgtcaaggccggcattcgcgagcgctttgccgagctgcgccagatgggcatcaagacggtgatgatcaccggcgacaaccgcctgaccgccgcctccatcgcggccgaagcgggcgtcgacgacttcatcgccgaggccgcgcccgagaccaagctcgcgctgatccgcgaacagcaggcgcagggccgcctcgtcgccatgaccggcgacggcaccaacgacgcgcccgcgctcgcccaggccgatgtggcggtcgccatgaacagcggcacgcaggcggccaaggaggccggcaacatggtcgacctggattccagcccgaccaagctgatccagatcgtggagatcggcaagcagatgctgatgacgcgcggctcgctcaccacgttctccatcgccaacgatgtggccaagtatttcgccatcatcccggcggcgttcgcgaccacgtatccgcaactggccgcgctcaacgtgatgcgcctggccacgcccgcgtcggccgtgatgagcgcggtgatcttcaacgcgctgatcatcgtgttcctgatcccgctggcgctcaagggcgtgaagtaccgcccgctcggcgccgccgcgctgctgcgccgcaatctctggatctacggcctgggcggcctgctgctgcccttccccggcatcaagctgatcgacatgttcctggccgcgatgggctgggtctga

SEQ ID NO: 328 - protein, 744 aa, Ralstonia solanacearum
MALRYPESDPVVRTVKHRLDSTDAAAHAAAPARTTTHPGAHPPLSAKDVRRLSMFAPALVRPAIVDSFRKLSPRAQAKNPVMFVVYIGSILTTLLWVMALRGQAEAPAGFILAVSVWLWFTVLFANVAEALAEGRSKQQAASLRGIKTTVQAKVLADPQRRDRVQPRAATALRRGDIVLIEAGDMVPGDGEVIEGVASVDESAITGESAPVIRESGGDFSSVTGGTRVLSDWIVARITANPGESFLDRMISMVEGAKRQKTPNELALTILLVSLTIILLLATVTLLPYSIFSVEVMKAAGVTSSPITITVLVALLVCLIPTTIGGLLSAIGVAGMSRMMQANVIATSGRAVEAAGDVDVLLLDKTGTITHGNRQASRFIPAPGVTVKALAEAAWLSSLADETPEGRSIVTLARQLGEAAVDEAALARSQPVFVPFSAQTRMSGINVALGDAAHQIRKGAADAIRTHVTVLAGRFPEAVLAAVEDVARKGGTPLVVSDNDRVMGVVELKDIVKAGIRERFAELRQMGIKTVMITGDNRLTAASIAAEAGVDDFIAEAAPETKLALIREQQAQGRLVAMTGDGTNDAPALAQADVAVAMNSGTQAAKEAGNMVDLDSSPTKLIQIVEIGKQMLMTRGSLTTFSIANDVAKYFAIIPAAFATTYPQLAALNVMRLATPASAVMSAVIFNALIIVFLIPLALKGVKYRPLGAAALLRRNLWIYGLGGLLLPFPGIKLIDMFLAAMGWV

SEQ ID NO: 329 - DNA, 2094 bp, Rhizobium loti
  CDS (1)..(2094): transl_table=11
atgagccagttaaaatcaagcgcgatcatggatgcccgcatcctgtggcccgcctttggcggtgccttccgcaaactcgacccgcgcacgctggcccgcaatccggtgatgttcgtcgtcgccatcgtctcggcgctgacgtcggtactgttcctcagggacctcatcaccggcggcggcgacctgcgcttcacattgcagatcatcatctggctgtggttcacggtgctgttcgccaatttcgccgaggccgtcgccgaggggcgcggcaaggcgcaggcggattcgctgcgcaaggcgcgcaccgagacccaggccaagctcctggccggcgaggacaggagcaagttcaagctcgtgcccggcaccagcctgaaggtcggcgacatcgtcctggtcgaagccggcgacatcatcccgtccgacggcgaggtggtggagggcgtggcttcggtcaacgaggcggcaataacaggcgaatccgcgccggtgatccgcgaatccggcggcgaccgctcggcggtgaccggcggcacgcaggtgctgtccgactggatccgcgtacgcatcaccgccgccgccggccacactttcctcgaccgcatgatttcgctcgtcgagggcgccgagcgccagaagacgccgaacgagatcgcgcttaacatcctgctcgtcggcatgacgctgatcttcgtgctggccacggccaccattccgagctttgcgtcctattccggcggctacatctcggtgaccgtactcgtcgccctgttcgtcaccctgatcccgaccaccatcggcgcgctgctgtcggccatcggcatcgccggcatggaccgcctggtgcgcttcaatgtgctggccatgtcgggccgtgccgtcgaggccgccggcgacgtcgacacgctgctgctcgacaagaccggcaccatcacgctcggcaaccgccaggccaccgatttccggccggtcaagggcgttaccgaacaggaactggccgacgcggcgcagctcgcctcgcttgccgacgaaacgccggagggccgttcgatcgtcgtcctggccaaggagaaatacggcatccgcgcccgcgacatggcgacattgcacgccacctttgtgcctttcaccgcgcagacccgcatgagcggcgtcgacatcgacggctcctcggtgcgcaagggcgccgtcgattcggtgctcgcccatgtcaaccagtcgacagtggccagccacgcgacgcggccgaacagcgacacgataagggatctgcaggcgatcgccgacgaggtcgccaagtccggcggcacgccactggcggtcgagcgcgacgggcggctgctcggcgtcgtccacctcaaggacatcgtcaagggcggcatccgcgagcgtttcgccgagctgcgcaagatgggcatccgcacggtgatgatcaccggcgacaacccgatgacggcggccgccatcgcggcggaagctggcgtcgacgacttcctggcccaggccacgcccgaggacaagctcaagctgatccgcgacgagcaggccaagggcaagctggtcgccatgtgcggcgacggcaccaacgatgcgccggcgctcgcgcaggccgatgtcggcgtcgccatgaacaccggcacggtcgccgcgcgtgaagccggcaacatggttgacctcgacagcgacccgaccaagctcatcgagatcgtcgagatcggcaaggcgctgctgatgacgcgcggctcgctgaccaccttctcgatcgccaatgacgtggccaagtatttcgccatcatcccggccatgttcgccgtcttctacgtcgcgccgggccagtccaccggtccgctgcaggcgctcaacatcatgcatctggcgacgccgcagagcgccatcctgtcggccatcatcttcaacgcgctgattatcatcgcgctgatcccgctgtcgctgcgcggcgtcaaataccgggcgatcggcgccggtgcgctgctcagccgcaacctactcgtctacggcctgggtggcatcatcgtgccgttcgtcggcatcaagataatcgacatggccgtcacggcccttggccttgcataa

SEQ ID NO: 330 - protein, 697 aa, Rhizobium loti
MSQLKSSAIMDARILWPAFGGAFRKLDPRTLARNPVMFVVAIVSALTSVLFLRDLITGGGDLRFTLQIIIWLWFTVLFANFAEAVAEGRGKAQADSLRKARTETQAKLLAGEDRSKFKLVPGTSLKVGDIVLVEAGDIIPSDGEVVEGVASVNEAAITGESAPVIRESGGDRSAVTGGTQVLSDWIRVRITAAAGHTFLDRMISLVEGAERQKTPNEIALNILLVGMTLIFVLATATIPSFASYSGGYISVTVLVALFVTLIPTTIGALLSAIGIAGMDRLVRFNVLAMSGRAVEAAGDVDTLLLDKTGTITLGNRQATDFRPVKGVTEQELADAAQLASLADETPEGRSIVVLAKEKYGIRARDMATLHATFVPFTAQTRMSGVDIDGSSVRKGAVDSVLAHVNQSTVASHATRPNSDTIRDLQAIADEVAKSGGTPLAVERDGRLLGVVHLKDIVKGGIRERFAELRKMGIRTVMITGDNPMTAAAIAAEAGVDDFLAQATPEDKLKLIRDEQAKGKLVAMCGDGTNDAPALAQADVGVAMNTGTVAAREAGNMVDLDSDPTKLIEIVEIGKALLMTRGSLTTFSIANDVAKYFAIIPAMFAVFYVAPGQSTGPLQALNIMHLATPQSAILSAIIFNALIIIALIPLSLRGVKYRAIGAGALLSRNLLVYGLGGIIVPFVGIKIIDMAVTALGLA

SEQ ID NO: 331 - DNA, 2043 bp, Rhizobium meliloti
  CDS (1)..(2043): transl_table=11
atgtcaaacaaacccacgactccgaacctcgtcgacccgaaaatactcttcccggcagcaaaggccgcgttcgtcaagcttgatccgcgccagctcgtccgcaatccggtgatcttcgtcaccgaagccatggcggcattggtgaccctcttcttcgttctcgatgtggcaaccggtggcggcagccggctcttctcgggccagatcgccgcctggctatggttcaccgtgctcttcgccacgttcgctgaagccgttgccgagggtcgcggcaaggcgcaggccgacttcctccgccataccaaatcggagctcagcgcccgcaagcttgtcgcgcccgagggtcgggagaccaaggaaatccccgcgaccatgctgaaggtcggggatctcgtccttgtccaggccggcgaattgatcccgggcgacggcgaagtcgtagaaggggtcgcctcggtcaacgagagcgcgattacgggcgaatcggcgccggtgatccgcgaagcgggcggcgatcgctccgccgtcaccggcggtaccgaagtgctttcggactgggtcaaggtccgcatcacgaccgcccccggttccaccttcgtcgaccgcatgatcgcgctcatcgaaggggcgcagcggcagaagacgccgaacgagattgcgctgtcgatcctgctttccggtttgacgttgatcttcctgatcgccgtggtgacgctctggggccttgctagctattcagcgaccgtgctttcggtgaccgtgctttccgccctgcttgtcacgctgatcccgacgaccatcggcggattgctttcggcgatcggcatcgccggcatggaccggctggtgcgcttcaacgtgatcgccacctccggccgtgccgtcgaggctgcgggggacgttgacacgctgctcctcgacaagacggggacgatcaccttcggcaaccgcatggcaagcgacttcctgcccgtgccgggcgtaacagtggaggagctcgccgatgcggcgctcctcgcaagccttgccgacgagacaccggaaggccgctccatcgtggcgctcgccaccggcgagttcgggcgcggggcgtcgcagaccgggatcgatgcggtcgtgccctttaccgcggaaacccggttgtccggcgtcgatcaccgcggccgccggctgcgcaagggcgcggtcgactcggttctgagatttgccggcctgtccgacagcaagatcccccaggaattcaggcaggcggtcgacaaggtcgcccgaaccggcggcacgccgctcgccgtggccgatggcaaccggctgcttggcgtggtccacctgaaggacgtcgtcaagcccgggatcaaggagcgcttctccgaattacgcgcgatgggcatccgcacggtaatggtaaccggtgacaacccgatcactgccgcggcaatcgcctcggaggccggcgtcgacgatttcctcgccgaagcgacaccggaagacaagctcgcctatatccgaaaggaacagaacggcggccggctgattgctatgtgcggcgacggcaccaatgatgcgccggcgctcgcccaggcggatgtgggcgtcgccatgcagaccggcacccaagcggcccgcgaagcggcgaacatggtggacctcgattcgagcccgacgaagctgatcgagatcgtcgagatcggcaagcaattgctgatgacgcgtggttctctcacgaccttctcgatcgccaacgacgtggcgaaatacttcgccatcatcccggcgctcttcgtcaccacctatccggcactcggcgtgcttaacattatgggcttggcgtcaccgcagtcggctatcctgtcggccgtcatcttcaacgcgctgatcatcgtggcgctcattccgctggcattgaaaggcgtcaggtaccgtcccgtcggcgcggcagccctgcttcgcggcaatctcctcgtctacggcctcggcggcctggtcctgcctttcgctgggatcaagctgatcgaccttgccgtctcgaacctcaacctggtgtga

SEQ ID NO: 332 - protein, 680 aa, Rhizobium meliloti
MSNKPTTPNLVDPKILFPAAKAAFVKLDPRQLVRNPVIFVTEAMAALVTLFFVLDVATGGGSRLFSGQIAAWLWFTVLFATFAEAVAEGRGKAQADFLRHTKSELSARKLVAPEGRETKEIPATMLKVGDLVLVQAGELIPGDGEVVEGVASVNESAITGESAPVIREAGGDRSAVTGGTEVLSDWVKVRITTAPGSTFVDRMIALIEGAQRQKTPNEIALSILLSGLTLIFLIAVVTLWGLASYSATVLSVTVLSALLVTLIPTTIGGLLSAIGIAGMDRLVRFNVIATSGRAVEAAGDVDTLLLDKTGTITFGNRMASDFLPVPGVTVEELADAALLASLADETPEGRSIVALATGEFGRGASQTGIDAVVPFTAETRLSGVDHRGRRLRKGAVDSVLRFAGLSDSKIPQEFRQAVDKVARTGGTPLAVADGNRLLGVVHLKDVVKPGIKERFSELRAMGIRTVMVTGDNPITAAAIASEAGVDDFLAEATPEDKLAYIRKEQNGGRLIAMCGDGTNDAPALAQADVGVAMQTGTQAAREAANMVDLDSSPTKLIEIVEIGKQLLMTRGSLTTFSIANDVAKYFAIIPALFVTTYPALGVLNIMGLASPQSAILSAVIFNALIIVALIPLALKGVRYRPVGAAALLRGNLLVYGLGGLVLPFAGIKLIDLAVSNLNLV

SEQ ID NO: 333 - DNA, 1710 bp, Salmonella typhi
  CDS (1)..(1710): transl_table=11
atgagtcgcaagcaactggcgctgtttgaacctgttttactcgtacaggcgctaacggatgccgtaaaaaaattaagcccacgcgcccagtggcgtaacccggtgatgtttgtggtctgggccggcagcgtgctagccactctgttaacgctcgctatggtaacaggacaaatagcgggaagcgccttgtttacaggggtgatcagcctgtggttatggttcaccgtactgttcgccaattttgccgaagcactggcggaaggccgcagcaaagcccaggcaaacagtctgaaaggggtgaaaaagaccgcgttcgctcgccgtctgcgcgccccgcgccatgatgcgcaggccgataacgtgcccgccgctgaactgcggaaaggcgacattgtcctggtcaaagcgggcgatattattccctgcgacggcgaggtcatcgaaggcggcgcctcggtggatgaaagtgcgattaccggcgaatccgcgcccgtgatccgcgagtccggcggcgatttcgcctctgtcaccggcggccgcgccgtagaagccgcgggcgatgtcgacgtgttactgctggataaaaccggcactatcacgctcggcaaccgccaggcgtccgattttatacccgcccgaggggtggacgaacgcacgctggctgacgccgcgcagctcgcttcgctggccgacgaaacgccggaaggccgcagcattgtgatcctcgccaaacagcgctttaacctgcgtgaacgcgatgtgcagtcgcttcatgccacctttgttccgtttaccgcgcaaagccgcatgagcgggattaatatcgataaccggatgatccgtaaaggctcggtggacgcgattcggcgtcatgtcgagagcaatggcggccattttcccgccgatgtcgagcaaaacgtcgagaacgtggcgcgtctgggcgcgacgccgctggtggtcgtggaaggcgcgcgcgtactgggtgttatcgccctcaaggatatcgttaaaggcggcattaaagaacgtttcgcccagctacgaaagatgggcattaaaacggtgatgatcactggcgataaccgcctgacggcggcagcgattgccgccgaagccggtgtggacgattttcttgccgaagccacgccggaagccaagctggcgttgatccgtcaatatcaggcggaaggacggctggtcgccatgaccggcgacggcactaacgatgccccggcgctggcgcaggctgacgtcgcggtggcgatgaactccggcacccaggcggcgaaagaagccggtaatatggtggatctggactctaacccgaccaagttgattgaagtggtgcatatcggtaagcagatgctgatgacgcgcggctcgctcaccaccttcagtatcgcgaatgatgtagcgaaatatttcgccattattcccgccgcgtttgccgctacctatccgcagctaaacgcgctcaacgtgatggggctgcattcgccgaactccgccattctgagcgcggtgatctttaacgccctgattatcatatttctgatcccgctggcattaaaaggcgtgagttataagccgctttccgcatcggccatgctgcgccgtaatttatggatctatggtctgggtggtctggtggtgccgtttattggcatcaaagtgattgatgtgctgctgaccctgctggatctggcgtga

SEQ ID NO: 334 - protein, 569 aa, Salmonella typhi
MSRKQLALFEPVLLVQALTDAVKKLSPRAQWRNPVMFVVWAGSVLATLLTLAMVTGQIAGSALFTGVISLWLWFTVLFANFAEALAEGRSKAQANSLKGVKKTAFARRLRAPRHDAQADNVPAAELRKGDIVLVKAGDIIPCDGEVIEGGASVDESAITGESAPVIRESGGDFASVTGGRAVEAAGDVDVLLLDKTGTITLGNRQASDFIPARGVDERTLADAAQLASLADETPEGRSIVILAKQRFNLRERDVQSLHATFVPFTAQSRMSGINIDNRMIRKGSVDAIRRHVESNGGHFPADVEQNVENVARLGATPLVVVEGARVLGVIALKDIVKGGIKERFAQLRKMGIKTVMITGDNRLTAAAIAAEAGVDDFLAEATPEAKLALIRQYQAEGRLVAMTGDGTNDAPALAQADVAVAMNSGTQAAKEAGNMVDLDSNPTKLIEVVHIGKQMLMTRGSLTTFSIANDVAKYFAIIPAAFAATYPQLNALNVMGLHSPNSAILSAVIFNALIIIFLIPLALKGVSYKPLSASAMLRRNLWIYGLGGLVVPFIGIKVIDVLLTLLDLA

SEQ ID NO: 335 - DNA, 2049 bp, Salmonella typhimurium
  CDS (1)..(2049): transl_table=11
atgagtcgcaagcaactggcgctgtttgaacctgttttactcgtacaggcgctaacggatgccgtaaaaaaattaagcccacgcgcccagtggcgtaacccggtgatgtttgtggtctgggccggcagcgtgctaaccactctgttaacgctcgctatggtaacaggacaaatagcgggaagcgccttgtttacagggattatcagcctgtggttatggttcaccgtactgttcgccaattttgccgaagcgctggcggaaggccgcagcaaagcccaggcaaacagtctgaaaggggtgaaaaagaccgcgttcgctcgccgcctgcgcgcccctcgccatgatgcgcaggccgataacgtgcccgccgctgaactgcggaaaggcgacattgtcctggtcaaagcgggcgatattattccctgcgacggcgaggtcatcgaaggcggcgcctcggtggatgaaagtgcgattaccggcgaatccgcgcccgtgatccgcgagtccggcggcgatttcgcctctgtcaccggcggcacgcgaattctttccgactggctggtgattgcctgtagcgtcaatcctggcgaaacctttcttgaccggatgatcgcgatggtggaaggcgcgcagcggcggaaaacgcctaacgagattgccctgacgattttgctcatcgccctgaccattgtctttttattggcgaccgccaccctgtggcccttctccgcctggggcggtaacgcggtcagcgtcaccgtgttggtggcgttgctggtgtgcctgatccccaccaccatcggcgggctactctccgccattggcgtagccggaatgagccgaatgttgggcgcgaacgtcatcgccaccagcggccgcgccgtagaagccgcgggcgatgtcgacgtgctgctgctggataaaaccggcactatcacgctcggcaaccgccaggcgtccgattttattcccgcccgaggggtggacgaacgcacgctggctgacgccgcgcagctcgcttcgctggccgacgaaacgccggaaggtcgcagcattgtgatcctcgccaaacagcgctttaacctgcgtgaacgcgatgtgcagtcgcttcatgccacctttgttccgtttaccgcacaaagccgcatgagcgggattaatatcgataaccggatgatccgtaaaggctcggtggacgcgattcggcgtcatgtcgagagcaatggcggccattttcccgccgatgtcgagcaaaacgtcgagaacgtggcgcgcctgggcgcgacgccgctggtggtcgtggagggcgcgcacgtactgggtgttatcgccctcaaggatatcgttaaaggcggtattaaagaacgtttcgcccagctgcgaaagatgggtattaaaacggtgatgatcactggcgataaccgcctgacggcggcagcgattgccgccgaagccggtgtggacgattttcttgccgaagccacgccggaagccaagctggcgctgatccgtcaatatcaggcggaaggacggctggtcgccatgaccggcgacggcactaacgatgccccggcgctggcgcaggctgacgtcgcggtggcgatgaactccggcacccaggcggcgaaagaagccggtaatatggtggatctggactctaacccgaccaagttgattgaagtggtgcatatcggtaagcagatgctgatgacgcgcggctcgctcaccaccttcagtatcgcgaatgatgtagcgaaatatttcgccattattcccgccgcgtttgccgctacctatccgcagctaaacgcgctcaacgtgatggggctgcattcgccgaactccgccattctgagcgcggtgatctttaacgccctgattattatttttctgatcccgctggcattaaaaggcgtgagttataagccgctttccgcatcggccatgctgcgccgtaatttatggatctatggtctgggtggtctggtggtgccgtttattggtatcaaagtgattgatgtgctgctgaccctgctgggtctggcgtga

SEQ ID NO: 336 - protein, 682 aa, Salmonella typhimurium
MSRKQLALFEPVLLVQALTDAVKKLSPRAQWRNPVMFVVWAGSVLTTLLTLAMVTGQIAGSALFTGIISLWLWFTVLFANFAEALAEGRSKAQANSLKGVKKTAFARRLRAPRHDAQADNVPAAELRKGDIVLVKAGDIIPCDGEVIEGGASVDESAITGESAPVIRESGGDFASVTGGTRILSDWLVIACSVNPGETFLDRMIAMVEGAQRRKTPNEIALTILLIALTIVFLLATATLWPFSAWGGNAVSVTVLVALLVCLIPTTIGGLLSAIGVAGMSRMLGANVIATSGRAVEAAGDVDVLLLDKTGTITLGNRQASDFIPARGVDERTLADAAQLASLADETPEGRSIVILAKQRFNLRERDVQSLHATFVPFTAQSRMSGINIDNRMIRKGSVDAIRRHVESNGGHFPADVEQNVENVARLGATPLVVVEGAHVLGVIALKDIVKGGIKERFAQLRKMGIKTVMITGDNRLTAAAIAAEAGVDDFLAEATPEAKLALIRQYQAEGRLVAMTGDGTNDAPALAQADVAVAMNSGTQAAKEAGNMVDLDSNPTKLIEVVHIGKQMLMTRGSLTTFSIANDVAKYFAIIPAAFAATYPQLNALNVMGLHSPNSAILSAVIFNALIIIFLIPLALKGVSYKPLSASAMLRRNLWIYGLGGLVVPFIGIKVIDVLLTLLGLA

SEQ ID NO: 337 - DNA, 2124 bp, Streptomyces coelicolor
  CDS (1)..(2124): transl_table=11
atgaacaccgacacgcagaagcacgaggacgcgatgtccacaaccaccccggcccgggcgccgcacgacgacgcaccctccgggcagcagcccggtcagggccgcgtcggcgcgggcctcttcgaaccgaagcagctggtcaagtcgctgcccgacgcgttccgcaagctcgacccgcgggtgatggcgaagtcgcccgtcatgttcgtcgtgctcgtcggctccgtgctgaccacggccttctccgtcacggagcccggcgactggttcggctggacgatcagcgcctggctctggctgaccgtgctcttcgccaacctggcggaggcggtagccgagggccgcggcaaggcccaggccgacaccctgcgcagggccaagaccgacaccgtcgcccgccgggccgacggcaccacggtccccggcaccggcctcacggtcggcgacctggtcgtctgcgaggccggggacgtcatccccggcgacggggacgtcgtcgagggtgtcgcctcggtcgacgagtcggcgatcaccggcgagtcggcgcccgtcatccgcgagtccggcggcgaccggtccgcggtcaccggcgggaccaaggtgctctccgaccgcatcgtcgtcaggatcaccacgaagccgggcgagaccttcatcgaccggatgatcaacctggtcgagggagcggccaggcagaagacgccgaacgagatcgcgctgaacatcctgctggcctcgctgaccgtcgtcttcctgctggcctgtgccaccctcccgccgttcgccgactacgcgggcacccacctggacatgatcgtgctggtggccctgctggtctgcctcatcccgaccacgatcggcgccctgctctccgcgatcggcatcgcgggcatggaccgcctggtgcagcgcaacgtgctggcgatgtcgggccgcgcggtcgaggccgccggcgacgtctccacactgctcctcgacaagaccggcaccatcacgctgggcaaccggcaggcggccgagttcgtgccggtacgcggtgtgacggaggccgaactcgccgacgccgcccagctctcctcgctcgccgacgagacacccgagggccgctcgatcgtcgtcctcgccaaggagaagtacggcctgcgcgagcgccaccagggcgaactcgtcggcgccgaatggatcgggttcaccgcccagacccgcatgtccggcgtggacgccgacggccgcaaggtccgcaagggcgcggcgggatccgtcgtcgcctgggtccgggagcgcggcggctcggggaccgaggacgcggacacggccgtcgagcgcatctccgcggcgggcggcacaccgctgctcgtcgccgtcgaggacgagcgcggcgcccgcgtcctcggtgtcgtccacctcaaggacgtcgtcaagcagggcatgcgcgagcggttcgacgagctgcgccgcatgggcatcaggaccgtcatgatcacgggcgacaacccgctgacggccaaggcgatcgccgacgaggcgggcgtcgacgactacctcgccgaggccacgcccgaggacaagatggccctcatcaagcgcgagcaggccggcggcaaactggtcgcgatgaccggcgacggcaccaacgacgcccccgcactggcccaggcggacgtcggcgtggcgatgaacaccggcacgtcggccgccaaggaggccggcaacatggtcgacctcgactccaaccccaccaagctgatcgagatcgtcgagatcggcaagcagctcctgatcacgcgcggggcgctcacgacgttctccatcgccaacgacgtcgccaagtacttcgcgatcatcccggcgctcttcgcggccgtctacccgggcctggacaagctcaacatcatgggtctgtcctccccggactccgcgatcctgtccgcggtggtcttcaacgcgctgatcatcctcgtgctggtgccgctcgcgctgaagggcgtgcgctaccggcccacgagcgccgaccggatgctgcgccgcaacctcggcgtctacgggctgggcgggctggtcgccccgttcatcggcatcaagctcatcgacctgatcgtctcgctcattcccgggatcggctga

SEQ ID NO: 338 - protein, 707 aa, Streptomyces coelicolor
MNTDTQKHEDAMSTTTPARAPHDDAPSGQQPGQGRVGAGLFEPKQLVKSLPDAFRKLDPRVMAKSPVMFVVLVGSVLTTAFSVTEPGDWFGWTISAWLWLTVLFANLAEAVAEGRGKAQADTLRRAKTDTVARRADGTTVPGTGLTVGDLVVCEAGDVIPGDGDVVEGVASVDESAITGESAPVIRESGGDRSAVTGGTKVLSDRIVVRITTKPGETFIDRMINLVEGAARQKTPNEIALNILLASLTVVFLLACATLPPFADYAGTHLDMIVLVALLVCLIPTTIGALLSAIGIAGMDRLVQRNVLAMSGRAVEAAGDVSTLLLDKTGTITLGNRQAAEFVPVRGVTEAELADAAQLSSLADETPEGRSIVVLAKEKYGLRERHQGELVGAEWIGFTAQTRMSGVDADGRKVRKGAAGSVVAWVRERGGSGTEDADTAVERISAAGGTPLLVAVEDERGARVLGVVHLKDVVKQGMRERFDELRRMGIRTVMITGDNPLTAKAIADEAGVDDYLAEATPEDKMALIKREQAGGKLVAMTGDGTNDAPALAQADVGVAMNTGTSAAKEAGNMVDLDSNPTKLIEIVEIGKQLLITRGALTTFSIANDVAKYFAIIPALFAAVYPGLDKLNIMGLSSPDSAILSAVVFNALIILVLVPLALKGVRYRPTSADRMLRRNLGVYGLGGLVAPFIGIKLIDLIVSLIPGIG

SEQ ID NO: 339 - DNA, 2067 bp, Yersinia pestis
  CDS (1)..(2067): transl_table=11
atgactcacaaacaacgcgcgatttttgagcctgcactggttcgcactgcgcttctcgatgcagtgaaaaagttggatccgcgcgtccagtggcgcaatcccgtcatgttcgtggtgtatttgggcagttggctgaccaccctgatctggctggacatattaagtgggcacaccacgggcagcgccatgtttaccggcagtatcgctttatggctatggtttaccgtgctgtttgccaacatggccgaagccttggccgaggggcgtagcaaagcgcaggccgccagtctacgcggggtgaaaaaaaccagttgggctaaaaaactgtccgaggcccgtgttgatgcaccacaagaaaaagtctctgccgacagtttgcgcaaaggcgacctggtgttgatcgaagccggtgacacggtgccgtgtgacggcgaagtgctggaaggcggtgcgtcggtcgatgaaagtgccattactggcgaatctgcgcccgttatccgtgaatccggtggcgacttctcgtcagttaccggcggtaccagagtattgtccgattggctggtggttgaatgtcgcgttaaccccggcgagaccttccttgatcggatgattgccatggtcgagggcgcaaaacggcgcaaaactcccaacgaagtggcgctgaccatattgttggtggcactgactatcgtctttttactggcaacagcaaccctgtatccgttctctgttttcagcgtggaggccagccaagccggtagcccggtgaccatcaccgtgctagtcgctttattggtttgcctgatcccaaccacgatcggcgggttgttgtcagccatcggggtggccgggatgagccgcatgttgggggctaacgtgatcgccacgagtggccgggcggtggaagctgccggtgatgtcgatgtgctgctgctggataaaaccggcaccattaccctcggtaaccgccaggcctccgagtttttacccgctcccggtgtcaccgagcaacaactggcggatgccgctcagctttcctcgctggcagatgaaacgccagaagggcgcagtatcgtcgtgctggctaaacaacgttttaatttacgtgaacgtgatctgcatagcctgaatgccacctttattcccttctcagcacaaacgcggatgagcggtgtcaatgtacaggagcggatgatccgcaaaggcgcggtagacgctatccgccgccatgtggaatccaatcagggccacttcccacccgccgtggatgatttggtcgccagtgtcgcccggaccggcggtaccccattggtggttgccgagggatcacgcgtactgggcgtggtggcgttaaaagatatcgtgaaagggggcattaaagaacggtttgccgaactgcgcaaaatgggcattaaaactgtgatgatcaccggtgacaatcgcctaaccgcagcggcaattgccgctgaagctggcgtagatgattttctggccgaagcgacacccgaggccaagctggcactgattcgccaatatcaagccgaagggcggctggtggcgatgaccggcgatggcaccaacgatgcccccgcactggcacaggctgatgtcgcggtagcgatgaactccggcacacaggcggccaaagaggccggtaacatggtggatctagactcgaacccaaccaagttgatcgaagtggtgcatatcggtaagcaaatgctgatgacccgtggttccctgaccaccttcagtatcgccaacgacgtggcaaaatatttcgccatcattccggctgcctttgccgccacgtatccgcaactcaatgcgttgaacatcatgcagttgcattcaccgtcttccgctattttgtcggcggtcatttttaatgcattggtcatcgtgtttctgatcccgctggccctaaaaggtgtcagttataaagcgatgagtgcggccgccctcttacgccgtaatctgtggatttacggtttgggtggcttactggtgccgtttgtcggtatcaagttgatcgacctgctgttaaccgccctgaatatgggctag

SEQ ID NO: 340 - protein, 688 aa, Yersinia pestis
MTHKQRAIFEPALVRTALLDAVKKLDPRVQWRNPVMFVVYLGSWLTTLIWLDILSGHTTGSAMFTGSIALWLWFTVLFANMAEALAEGRSKAQAASLRGVKKTSWAKKLSEARVDAPQEKVSADSLRKGDLVLIEAGDTVPCDGEVLEGGASVDESAITGESAPVIRESGGDFSSVTGGTRVLSDWLVVECRVNPGETFLDRMIAMVEGAKRRKTPNEVALTILLVALTIVFLLATATLYPFSVFSVEASQAGSPVTITVLVALLVCLIPTTIGGLLSAIGVAGMSRMLGANVIATSGRAVEAAGDVDVLLLDKTGTITLGNRQASEFLPAPGVTEQQLADAAQLSSLADETPEGRSIVVLAKQRFNLRERDLHSLNATFIPFSAQTRMSGVNVQERMIRKGAVDAIRRHVESNQGHFPPAVDDLVASVARTGGTPLVVAEGSRVLGVVALKDIVKGGIKERFAELRKMGIKTVMITGDNRLTAAAIAAEAGVDDFLAEATPEAKLALIRQYQAEGRLVAMTGDGTNDAPALAQADVAVAMNSGTQAAKEAGNMVDLDSNPTKLIEVVHIGKQMLMTRGSLTTFSIANDVAKYFAIIPAAFAATYPQLNALNIMQLHSPSSAILSAVIFNALVIVFLIPLALKGVSYKAMSAAALLRRNLWIYGLGGLLVPFVGIKLIDLLLTALNMG

SEQ ID NO: 341 - DNA, 23 bp, Artificial sequence
  primer
atgagtcgtaaacaactggcgct

SEQ ID NO: 342 - DNA, 24 bp, Artificial sequence
  primer
ttacaccagaccgcaaacggtcag

SEQ ID NO: 343 - protein, 735 aa, Artificial sequence
  consensus sequence
  Variant (2)..(7): Xaa in position 2 to 7 is any amino acid
  Variant (10)..(10): Xaa in position 10 is any amino acid
  Variant (12)..(16): Xaa in position 12 to 16 is any amino acid
  Variant (22)..(22): Xaa in position 22 is any amino acid
  Variant (24)..(25): Xaa in position 24 to 25 is any amino acid
  Variant (27)..(28): Xaa in position 27 to 28 is any amino acid
  Variant (30)..(30): Xaa in position 30 is any amino acid
  Variant (32)..(48): Xaa in position 32 to 48 is any amino acid
  Variant (49)..(62): Xaa in position 49 to 62 is any or no amino acid
  Variant (65)..(65): Xaa in position 65 is any amino acid
  Variant (76)..(76): Xaa in position 76 is any amino acid
  Variant (81)..(82): Xaa in position 81 to 82 is any amino acid
  Variant (86)..(87): Xaa in position 86 to 87 is any amino acid
  Variant (89)..(94): Xaa in position 89 to 94 is any amino acid
  Variant (95)..(96): Xaa in position 95 to 96 is any or no amino acid
  Variant (98)..(109): Xaa in position 98 to 109 is any amino acid
  Variant (110)..(127): Xaa in position 110 to 127 is any or no amino acid
  Variant (129)..(130): Xaa in position 129 to 130 is any amino acid
  Variant (133)..(133): Xaa in position 133 is any amino acid
  Variant (135)..(137): Xaa in position 135 to 137 is any amino acid
  Variant (140)..(141): Xaa in position 140 to 141 is any amino acid
  Variant (144)..(144): Xaa in position 144 is any amino acid
  Variant (147)..(147): Xaa in position 147 is any amino acid
  Variant (149)..(149): Xaa in position 149 is any amino acid
  Variant (152)..(152): Xaa in position 152 is any amino acid
  Variant (175)..(175): Xaa in position 175 is any amino acid
  Variant (177)..(177): Xaa in position 177 is any amino acid
  Variant (178)..(178): Xaa in position 178 is any or no amino acid
  Variant (184)..(186): Xaa in position 184 to 186 is any amino acid
  Variant (189)..(198): Xaa in position 189 to 198 is any amino acid
  Variant (200)..(201): Xaa in position 200 to 201 is any amino acid
  Variant (203)..(203): Xaa in position 203 is any amino acid
  Variant (208)..(209): Xaa in position 208 to 209 is any amino acid
  Variant (214)..(214): Xaa in position 214 is any amino acid
  Variant (216)..(216): Xaa in position 216 is any amino acid
  Variant (222)..(222): Xaa in position 222 is any amino acid
  Variant (225)..(225): Xaa in position 225 is any amino acid
  Variant (229)..(230): Xaa in position 229 to 230 is any amino acid
  Variant (233)..(234): Xaa in position 233 to 234 is any amino acid
  Variant (237)..(240): Xaa in position 237 to 240 is any amino acid
  Variant (243)..(243): Xaa in position 243 is any amino acid
  Variant (245)..(257): Xaa in position 245 to 257 is any amino acid
  Variant (258)..(271): Xaa in position 258 to 271 is any or no amino acid
  Variant (273)..(273): Xaa in position 273 is any amino acid
  Variant (278)..(278): Xaa in position 278 is any amino acid
  Variant (286)..(286): Xaa in position 286 is any amino acid
  Variant (293)..(293): Xaa in position 293 is any amino acid
  Variant (297)..(297): Xaa in position 297 is any amino acid
  Variant (299)..(302): Xaa in position 299 to 302 is any amino acid
  Variant (305)..(305): Xaa in position 305 is any amino acid
  Variant (307)..(307): Xaa in position 307 is any amino acid
  Variant (319)..(320): Xaa in position 319 to 320 is any amino acid
  Variant (331)..(331): Xaa in position 331 is any amino acid
  Variant (335)..(335): Xaa in position 335 is any amino acid
  Variant (337)..(338): Xaa in position 337 to 338 is any amino acid
  Variant (340)..(340): Xaa in position 340 is any amino acid
  Variant (342)..(343): Xaa in position 342 to 343 is any amino acid
  Variant (346)..(349): Xaa in position 346 to 349 is any amino acid
  Variant (352)..(352): Xaa in position 352 is any amino acid
  Variant (355)..(355): Xaa in position 355 is any amino acid
  Variant (357)..(357): Xaa in position 357 is any amino acid
  Variant (371)..(371): Xaa in position 371 is any amino acid
  Variant (374)..(385): Xaa in position 374 to 385 is any amino acid
  Variant (386)..(393): Xaa in position 386 to 393 is any or no amino acid
  Variant (395)..(396): Xaa in position 395 to 396 is any amino acid
  Variant (398)..(398): Xaa in position 398 is any amino acid
  Variant (400)..(400): Xaa in position 400 is any amino acid
  Variant (406)..(413): Xaa in position 406 to 413 is any amino acid
  Variant (414)..(422): Xaa in position 414 to 422 is any or no amino acid
  Variant (427)..(427): Xaa in position 427 is any amino acid
  Variant (429)..(452): Xaa in position 429 to 452 is any amino acid
  Variant (453)..(473): Xaa in position 453 to 473 is any or no amino acid
  Variant (475)..(475): Xaa in position 475 is any amino acid
  Variant (479)..(479): Xaa in position 479 is any amino acid
  Variant (481)..(486): Xaa in position 481 to 486 is any amino acid
  Variant (487)..(494): Xaa in position 487 to 494 is any or no amino acid
  Variant (498)..(499): Xaa in position 498 to 499 is any amino acid
  Variant (503)..(503): Xaa in position 503 is any amino acid
  Variant (506)..(506): Xaa in position 506 is any amino acid
  Variant (508)..(509): Xaa in position 508 to 509 is any amino acid
  Variant (513)..(514): Xaa in position 513 to 514 is any amino acid
  Variant (517)..(517): Xaa in position 517 is any amino acid
  Variant (521)..(521): Xaa in position 521 is any amino acid
  Variant (525)..(525): Xaa in position 525 is any amino acid
  Variant (530)..(531): Xaa in position 530 to 531 is any amino acid
  Variant (538)..(538): Xaa in position 538 is any amino acid
  Variant (553)..(553): Xaa in position 553 is any amino acid
  Variant (556)..(557): Xaa in position 556 to 557 is any amino acid
  Variant (560)..(561): Xaa in position 560 to 561 is any amino acid
  Variant (563)..(564): Xaa in position 563 to 564 is any amino acid
  Variant (566)..(566): Xaa in position 566 is any amino acid
  Variant (571)..(571): Xaa in position 571 is any amino acid
  Variant (587)..(587): Xaa in position 587 is any amino acid
  Variant (592)..(592): Xaa in position 592 is any amino acid
  Variant (598)..(598): Xaa in position 598 is any amino acid
  Variant (609)..(609): Xaa in position 609 is any amino acid
  Variant (616)..(616): Xaa in position 616 is any amino acid
  Variant (618)..(618): Xaa in position 618 is any amino acid
  Variant (623)..(623): Xaa in position 623 is any amino acid
  Variant (625)..(625): Xaa in position 625 is any amino acid
  Variant (629)..(629): Xaa in position 629 is any amino acid
  Variant (635)..(635): Xaa in position 635 is any amino acid
  Variant (639)..(639): Xaa in position 639 is any amino acid
  Variant (649)..(649): Xaa in position 649 is any amino acid
  Variant (651)..(652): Xaa in position 651 to 652 is any amino acid
  Variant (653)..(654): Xaa in position 653 to 654 is any or no amino acid
  Variant (656)..(659): Xaa in position 656 to 659 is any amino acid
  Variant (660)..(666): Xaa in position 660 to 666 is any or no amino acid
  Variant (669)..(669): Xaa in position 669 is any amino acid
  Variant (671)..(671): Xaa in position 671 is any amino acid
  Variant (673)..(674): Xaa in position 673 to 674 is any amino acid
  Variant (676)..(676): Xaa in position 676 is any amino acid
  Variant (683)..(683): Xaa in position 683 is any amino acid
  Variant (689)..(689): Xaa in position 689 is any amino acid
  Variant (691)..(692): Xaa in position 691 to 692 is any amino acid
  Variant (699)..(699): Xaa in position 699 is any amino acid
  Variant (702)..(702): Xaa in position 702 is any amino acid
  Variant (704)..(707): Xaa in position 704 to 707 is any amino acid
  Variant (709)..(711): Xaa in position 709 to 711 is any amino acid
  Variant (713)..(713): Xaa in position 713 is any amino acid
  Variant (717)..(718): Xaa in position 717 to 718 is any amino acid
  Variant (724)..(726): Xaa in position 724 to 726 is any amino acid
  Variant (729)..(729): Xaa in position 729 is any amino acid
  Variant (733)..(733): Xaa in position 733 is any amino acid
AXXXXXXKLXPXXXXXNPVMFXVXXGXXLXTXXXXXXXXXXXXXXXXXXXXXXXXXXXXXXXLWXTVLFANFAEAXAEGRXXAQAXXLXXXXXXXXAXXXXXXXXXXXXXXXXXXXXXXXXXXXXXXLXXGDXVXXXAGXXIPXDGXVXEGXASVDESAITGESAPVIRESGGDXSXXVTGGTXXXSDXXXXXXXXXXGXXFXDRMIXXVEGAXRXKTPNEXALXILLXXLTXXFLXXXXTLXPXXXXXXXXXXXXXXXXXXXXXXXXXXXLXALLVXLIPTTIGXLLSAIGXAGMXRXXXXNVXAXSGRAVEAAGDVXXLLLDKTGTITXGNRXAXXFXPXXGVXXXXLAXAAXLXSLADETPEGRSIVXLAXXXXXXXXXXXXXXXXXXXXFXXFXAXTRMSGXXXXXXXXXXXXXXXXXRKGAXDXXXXXXXXXXXXXXXXXXXXXXXXXXXXXXXXXXXXXXXXXXXXXGXTPLXVXXXXXXXXXXXXXXLGVXXLKDXVKXGXXERFXXLRXMGIXTVMXTGDNXXTAAAIAXEAGVDDFLAEATPEXKLXXIRXXQXXGXLVAMXGDGTNDAPALAQADVXVAMNXGTQAAXEAGNMVDLDSXPTKLIEXVXIGKQXLXTRGXLTTFSXANDXAKYFAIIPAXFXXXXPXXXXXXXXXXXLNXMXLXXPXSAILSAXIFNALXIXXLIPLALXGVXYXXXXAXXXLXRNLXXYGLGGXXXPFXGIKXID

SEQ ID NO: 344 - protein, 59 aa, Artificial sequence
  protein pattern
  Variant (4)..(4): Xaa in position 4 is Ser or Thr
  Variant (7)..(7): Xaa in position 7 is any amino acid
  Variant (10)..(10): Xaa in position 10 is Lys or Arg
  Variant (19)..(19): Xaa in position 19 is Asp or Glu
  Variant (21)..(21): Xaa in position 21 is Asp, Asn or Ser
  Variant (26)..(26): Xaa in position 26 is Ile or Leu
  Variant (27)..(27): Xaa in position 27 is Asp, Glu, Gln or Ser
  Variant (28)..(28): Xaa in position 28 is Ile or Val
  Variant (30)..(31): Xaa in position 30 to 31 is any amino acid
  Variant (34)..(34): Xaa in position 34 is Ala, Gly or Gln
  Variant (35)..(35): Xaa in position 35 is Leu or Met
  Variant (37)..(37): Xaa in position 37 is Ile or Met
  Variant (38)..(38): Xaa in position 38 is Ser or Thr
  Variant (39)..(39): Xaa in position 39 is His or Arg
  Variant (41)..(41): Xaa in position 41 is Ala, Ser or Thr
  Variant (47)..(47): Xaa in position 47 is Ile or Val
  Variant (51)..(51): Xaa in position 51 is Ile, Leu or Val
  Variant (58)..(58): Xaa in position 58 is Ile, Leu or Val
AMNXGTXAAXEAGNMVDLXSXPTKLXXXVXXGKXXLXXXGXLTTFSXANDXAKYFAIXP

SEQ ID NO: 345 - protein, 59 aa, Artificial sequence
  protein pattern
  Variant (3)..(3): Xaa in position 3 is Lys or Arg
  Variant (5)..(5): Xaa in position 5 is Ile or Val
  Variant (7)..(7): Xaa in position 7 is Ile or Val
  Variant (12)..(13): Xaa in position 12 to 13 is any amino acid
  Variant (17)..(17): Xaa in position 17 is Ala, Ser or Thr
  Variant (20)..(20): Xaa in position 20 is any amino acid
  Variant (27)..(27): Xaa in position 27 is any amino acid
  Variant (29)..(29): Xaa in position 29 is Ala or Ser
  Variant (30)..(30): Xaa in position 30 is Glu or Gln
  Variant (32)..(32): Xaa in position 32 is any amino acid
  Variant (34)..(35): Xaa in position 34 to 35 is any amino acid
  Variant (37)..(37): Xaa in position 37 is Leu or Met
  Variant (38)..(39): Xaa in position 38 to 39 is any amino acid
  Variant (42)..(43): Xaa in position 42 to 43 is any amino acid
  Variant (45)..(46): Xaa in position 45 to 46 is any amino acid
  Variant (48)..(48): Xaa in position 48 is any amino acid
  Variant (49)..(49): Xaa in position 49 is Leu or Met
  Variant (50)..(50): Xaa in position 50 is Ile or Val
  Variant (53)..(53): Xaa in position 53 is any amino acid
  Variant (57)..(57): Xaa in position 57 is Ala, Ser or Thr
GIXTXMXTGDNXXTAAXIAXEAGVDDXLXXAXPXXKXXXIRXXQXXGXXXAMXGDGXND

SEQ ID NO: 346 - protein, 41 aa, Artificial sequence
  protein pattern
  Variant (3)..(3): Xaa in position 3 is any amino acid
  Variant (6)..(6): Xaa in position 6 is Asp, Glu or Thr
  Variant (7)..(7): Xaa in position 7 is Ile or Val
  Variant (8)..(8): Xaa in position 8 is Ala, Ile, Leu or Val
  Variant (9)..(9): Xaa in position 9 is any amino acid
  Variant (11)..(11): Xaa in position 11 is Ala, Gly, Ile, Leu or Val
  Variant (13)..(13): Xaa in position 13 is Ala, Ser or Thr
  Variant (14)..(14): Xaa in position 14 is Asp or Val
  Variant (15)..(15): Xaa in position 15 is Asp or Asn
  Variant (17)..(17): Xaa in position 17 is Ala or Ser
  Variant (18)..(18): Xaa in position 18 is Ala or Pro
  Variant (19)..(19): Xaa in position 19 is Ile or Val
  Variant (27)..(27): Xaa in position 27 is Ile or Val
  Variant (28)..(28): Xaa in position 28 is Lys or Arg
  Variant (30)..(30): Xaa in position 30 is Ala, Pro or Ser
  Variant (32)..(32): Xaa in position 32 is Gly, Ser or Thr
  Variant (34)..(34): Xaa in position 34 is any amino acid
  Variant (35)..(35): Xaa in position 35 is any or no amino acid
  Variant (37)..(37): Xaa in position 37 is any or no amino acid
  Variant (41)..(41): Xaa in position 41 is Gly or Asn
IPXDGXXXXGXAXXXEXXXTGESAPVXXEXGXDXXSXVTGX

SEQ ID NO: 347 - protein, 27 aa, Artificial sequence
  protein pattern
  Variant (3)..(3): Xaa in position 3 is Phe, Ile, Leu or Val
  Variant (10)..(10): Xaa in position 10 is any amino acid
  Variant (14)..(14): Xaa in position 14 is Ile, Leu, Met or Val
  Variant (19)..(19): Xaa in position 19 is Ala, Gly or Ser
  Variant (20)..(20): Xaa in position 20 is Lys or Arg
  Variant (21)..(21): Xaa in position 21 is Ala, Gln or Thr
  Variant (22)..(22): Xaa in position 22 is Gln or Arg
  Variant (24)..(24): Xaa in position 24 is Ala, Asp, Glu, Gly or Asn
  Variant (25)..(25): Xaa in position 25 is Ala, Ser or Thr
  Variant (27)..(27): Xaa in position 27 is Lys or Arg
LWXTVLFANXAEAXAEGRXXXXAXXLX

SEQ ID NO: 348 - protein, 26 aa, Artificial sequence
  protein pattern
  Variant (4)..(4): Xaa in position 4 is Ile or Val
  Variant (11)..(12): Xaa in position 11 to 12 is any amino acid
  Variant (23)..(23): Xaa in position 23 is any amino acid
GRAXEAAGDVXXLLLDKTGTITXGNR

SEQ ID NO: 349 - protein, 57 aa, Artificial sequence
  protein pattern
  Variant (2)..(3): Xaa in position 2 to 3 is any amino acid
  Variant (6)..(6): Xaa in position 6 is Ile, Leu or Val
  Variant (8)..(8): Xaa in position 8 is any amino acid
  Variant (10)..(10): Xaa in position 10 is any amino acid
  Variant (11)..(11): Xaa in position 11 is Ser or Thr
  Variant (13)..(13): Xaa in position 13 is any amino acid
  Variant (16)..(16): Xaa in position 16 is Ile, Met or Val
  Variant (17)..(17): Xaa in position 17 is Leu, Met or Val
  Variant (19)..(19): Xaa in position 19 is Ala or Thr
  Variant (20)..(21): Xaa in position 20 to 21 is Ile or Val
  Variant (22)..(22): Xaa in position 22 is Phe or Tyr
  Variant (25)..(25): Xaa in position 25 is Ile, Leu or Val
  Variant (26)..(26): Xaa in position 26 is Ile or Val
  Variant (28)..(28): Xaa in position 28 is Ile, Leu, Pro or Val
  Variant (29)..(29): Xaa in position 29 is any amino acid
  Variant (31)..(31): Xaa in position 31 is Ile or Val
  Variant (34)..(34): Xaa in position 34 is Ala or Ser
  Variant (36)..(36): Xaa in position 36 is Lys or Arg
  Variant (38)..(38): Xaa in position 38 is Ala, Ile or Val
  Variant (39)..(43): Xaa in position 39 to 43 is any amino acid
  Variant (44)..(44): Xaa in position 44 is Ala, Asp, Gly, Asn, Pro, Ser or Thr
  Variant (45)..(45): Xaa in position 45 is Ala or Thr
  Variant (46)..(46): Xaa in position 46 is Ala, Asp, Glu, Gly or Ser
  Variant (47)..(48): Xaa in position 47 to 48 is any amino acid
  Variant (50)..(51): Xaa in position 50 to 51 is any amino acid
  Variant (53)..(53): Xaa in position 53 is Leu or Met
  Variant (54)..(54): Xaa in position 54 is any amino acid
  Variant (55)..(55): Xaa in position 55 is Ile or Val
LXXLNXMXLXXPXSAXXSXXXXNAXXIXXLXPLXLXGXXXXXXXXXXXLXXNXXXYG

SEQ ID NO: 350 - protein, 29 aa, Artificial sequence
  protein pattern
  Variant (2)..(2): Xaa in position 2 is any amino acid
  Variant (3)..(3): Xaa in position 3 is Ala, Ser or Thr
  Variant (5)..(5): Xaa in position 5 is Ile, Leu or Val
  Variant (7)..(7): Xaa in position 7 is Lys or Arg
  Variant (10)..(10): Xaa in position 10 is any amino acid
  Variant (11)..(11): Xaa in position 11 is Leu or Met
  Variant (14)..(14): Xaa in position 14 is Gly, Asn or Ser
  Variant (16)..(16): Xaa in position 16 is any amino acid
  Variant (18)..(18): Xaa in position 18 is any or no amino acid
  Variant (20)..(20): Xaa in position 20 is any or no amino acid
  Variant (25)..(25): Xaa in position 25 is Ile, Leu or Val
  Variant (28)..(28): Xaa in position 28 is any amino acid
GXXFXDXMIXXVEXAXRXKXTPNEXALXI

SEQ ID NO: 351 - protein, 27 aa, Artificial sequence
  protein pattern
  Variant (2)..(2): Xaa in position 2 is any amino acid
  Variant (3)..(3): Xaa in position 3 is Ala, Ile, Leu or Val
  Variant (5)..(8): Xaa in position 5 to 8 is any or no amino acid
  Variant (10)..(10): Xaa in position 10 is Ala, Cys or Thr
  Variant (12)..(12): Xaa in position 12 is Ala, Ile or Val
  Variant (18)..(18): Xaa in position 18 is Ala or Gly
  Variant (22)..(22): Xaa in position 22 is Ala or Ser
  Variant (25)..(25): Xaa in position 25 is Ile or Val
VXXLXXXXVXLXPTTIGXLLSXIGXAG

SEQ ID NO: 352 - protein, 26 aa, Artificial sequence
  protein pattern
  Variant (2)..(2): Xaa in position 2 is any amino acid
  Variant (3)..(3): Xaa in position 3 is any or no amino acid
  Variant (5)..(5): Xaa in position 5 is any or no amino acid
  Variant (7)..(7): Xaa in position 7 is any amino acid
  Variant (8)..(8): Xaa in position 8 is any or no amino acid
  Variant (10)..(10): Xaa in position 10 is Ala or Ser
  Variant (12)..(12): Xaa in position 12 is Ile or Leu
  Variant (15)..(15): Xaa in position 15 is Glu, Pro or Thr
  Variant (17)..(17): Xaa in position 17 is Ala or Pro
  Variant (18)..(18): Xaa in position 18 is Glu or Gly
  Variant (20)..(20): Xaa in position 20 is Lys or Arg
  Variant (22)..(22): Xaa in position 22 is Ile or Val
  Variant (24)..(25): Xaa in position 24 to 25 is any amino acid
  Variant (26)..(26): Xaa in position 26 is Ala or Val
AXXAXAXXLXSXADXTXXGXSXVXXX

SEQ ID NO: 353 - protein, 22 aa, Artificial sequence
  protein pattern
  Variant (2)..(2): Xaa in position 2 is Ala, Ile or Val
  Variant (3)..(3): Xaa in position 3 is Ile or Val
  Variant (4)..(4): Xaa in position 4 is any amino acid
  Variant (8)..(8): Xaa in position 8 is Ile or Val
  Variant (11)..(11): Xaa in position 11 is any or no amino acid
  Variant (13)..(14): Xaa in position 13 to 14 is any amino acid
  Variant (15)..(15): Xaa in position 15 is any or no amino acid
  Variant (19)..(19): Xaa in position 19 is any amino acid
  Variant (20)..(20): Xaa in position 20 is Asp, Glu, Gln, Arg or Ser
  Variant (21)..(21): Xaa in position 21 is Phe, Leu or Met
GXXXLKDXVKXGXXXERFXXXR

SEQ ID NO: 354 - protein, 16 aa, Artificial sequence
  protein pattern
  Variant (3)..(3): Xaa in position 3 is any amino acid
  Variant (5)..(8): Xaa in position 5 to 8 is any amino acid
  Variant (9)..(9): Xaa in position 9 is Lys or Arg
  Variant (14)..(14): Xaa in position 14 is Phe or Leu
  Variant (15)..(15): Xaa in position 15 is any amino acid
KLXPXXXXXNPVMXXV

SEQ ID NO: 355 - protein, 11 aa, Artificial sequence
  protein pattern
  Variant (2)..(2): Xaa in position 2 is Ser or Thr
  Variant (4)..(4): Xaa in position 4 is any amino acid
  Variant (5)..(5): Xaa in position 5 is Ser or Thr
  Variant (10)..(10): Xaa in position 10 is Ile, Leu or Val
  Variant (11)..(11): Xaa in position 11 is Asp or Asn
FXAXXRMSGXX

SEQ ID NO: 356 - protein, 19 aa, Artificial sequence
  protein pattern
  Variant (4)..(4): Xaa in position 4 is Ile, Leu, Met or Val
  Variant (5)..(6): Xaa in position 5 to 6 is Ala, Ile, Leu or Val
  Variant (9)..(9): Xaa in position 9 is Ala, Ile, Leu, Pro or Val
  Variant (10)..(10): Xaa in position 10 is any amino acid
  Variant (13)..(13): Xaa in position 13 is any amino acid
  Variant (14)..(14): Xaa in position 14 is Ile or Val
  Variant (16)..(16): Xaa in position 16 is Ile, Leu, Met or Val
  Variant (17)..(17): Xaa in position 17 is any amino acid
  Variant (18)..(18): Xaa in position 18 is Ile, Leu or Val
  Variant (19)..(19): Xaa in position 19 is Ala, Gly, Ser, Thr or Val
LGGXXXPFXXIKXXDXXXX

SEQ ID NO: 357 - protein, 16 aa, Artificial sequence
  protein pattern
  Variant (2)..(2): Xaa in position 2 is Ser or Thr
  Variant (3)..(3): Xaa in position 3 is Ile, Leu or Val
  Variant (4)..(4): Xaa in position 4 is any amino acid
  Variant (5)..(5): Xaa in position 5 is Phe, Leu or Met
  Variant (6)..(6): Xaa in position 6 is Ile, Leu or Val
  Variant (7)..(7): Xaa in position 7 is any amino acid
  Variant (8)..(8): Xaa in position 8 is Ala or Val
  Variant (9)..(10): Xaa in position 9 to 10 is any amino acid
  Variant (11)..(11): Xaa in position 11 is Cys, Ser or Thr
  Variant (13)..(13): Xaa in position 13 is any amino acid
  Variant (15)..(15): Xaa in position 15 is any amino acid
  Variant (16)..(16): Xaa in position 16 is Ala, Ser or Thr
LXXXXXXXXXXLXPXX

SEQ ID NO: 358 - DNA, 381 bp, Escherichia coli K12
  CDS (1)..(381): transl_table=11
atgaaaatgacaaaactggccacattatttctgactgccactctaagccttgccagcggtgccgcactggctgccgatagcggagcgcaaactaataacggccaggcaaacgccgcagctgatgcgggccaggtagcccctgacgcccgtgaaaatgtcgcgccaaataacgtcgacaataacggggtaaataccggttctggcggcacaatgctgcattcggatggttcttcaatgaacaatgacggaatgaccaaagatgaagagcacaagaacaccatgtgcaaagatggtcgctgtccggatatcaataaaaaggtacaaaccggtgatggcatcaataatgatgtcgataccaaaaccgacggtaccacgcagtaa

SEQ ID NO: 359 - protein, 126 aa, Escherichia coli K12
MKMTKLATLFLTATLSLASGAALAADSGAQTNNGQANAAADAGQVAPDARENVAPNNVDNNGVNTGSGGTMLHSDGSSMNNDGMTKDEEHKNTMCKDGRCPDINKKVQTGDGINNDVDTKTDGTTQ

SEQ ID NO: 360 - DNA, 387 bp, Salmonella typhi
  CDS (1)..(387): transl_table=11
atgaaaatgacaaaactgactacgcttttactcaccgctaccctcggccttgccagcggcgcagcgttagctgctgaatctaacgcgcagtccagtaatggccaggcgaactcggcggcaaatgccggtcaggttgccccggacgcccgccagaatgtggcgccgaatgatgtgaataacaacgacatcaataccaacggcaatactaacagcacgatgcagcatcctgacggttcaaccatgaatcatgacggaatgaccaaggatgaagagcataaaaataccatgtgtaaagatggtcgctgcccggatattaataaaaaagtggaaaccggtaatggcgtcaataatgacgtgaataccaaaaccgacggtaccacgcagtaa

SEQ ID NO: 361 - protein, 128 aa, Salmonella typhi
MKMTKLTTLLLTATLGLASGAALAAESNAQSSNGQANSAANAGQVAPDARQNVAPNDVNNNDINTNGNTNSTMQHPDGSTMNHDGMTKDEEHKNTMCKDGRCPDINKKVETGNGVNNDVNTKTDGTTQ

SEQ ID NO: 362 - DNA, 25 bp, Artificial sequence
  primer
atgaaaatgacaaaactggccacat

SEQ ID NO: 363 - DNA, 20 bp, Artificial sequence
  primer
ttactgcgtggtaccgtcgg

SEQ ID NO: 364 - protein, 128 aa, Artificial sequence
  consensus sequence
  Variant (7)..(7): Xaa in position 7 is any amino acid
  Variant (10)..(10): Xaa in position 10 is any amino acid
  Variant (16)..(16): Xaa in position 16 is any amino acid
  Variant (26)..(26): Xaa in position 26 is any amino acid
  Variant (28)..(28): Xaa in position 28 is any amino acid
  Variant (31)..(32): Xaa in position 31 to 32 is any amino acid
  Variant (38)..(38): Xaa in position 38 is any amino acid
  Variant (41)..(41): Xaa in position 41 is any amino acid
  Variant (51)..(51): Xaa in position 51 is any amino acid
  Variant (57)..(57): Xaa in position 57 is any amino acid
  Variant (59)..(59): Xaa in position 59 is any amino acid
  Variant (62)..(63): Xaa in position 62 to 63 is any amino acid
  Variant (66)..(69): Xaa in position 66 to 69 is any amino acid
  Variant (70)..(71): Xaa in position 70 to 71 is any or no amino acid
  Variant (74)..(74): Xaa in position 74 is any amino acid
  Variant (76)..(76): Xaa in position 76 is any amino acid
  Variant (80)..(80): Xaa in position 80 is any amino acid
  Variant (83)..(83): Xaa in position 83 is any amino acid
  Variant (110)..(110): Xaa in position 110 is any amino acid
  Variant (113)..(113): Xaa in position 113 is any amino acid
  Variant (115)..(115): Xaa in position 115 is any amino acid
  Variant (120)..(120): Xaa in position 120 is any amino acid
MKMTKLXTLXLTATLXLASGAALAAXSXAQXXNGQANXAAXAGQVAPDARXNVAPNXVXNNXXNTXXXXXXTMXHXDGSXMNXDGMTKDEEHKNTMCKDGRCPDINKKVXTGXGXNNDVXTKTDGTTQ

SEQ ID NO: 365 - protein, 38 aa, Artificial sequence
  protein pattern
  Variant (2)..(2): Xaa in position 2 is any amino acid
  Variant (4)..(4): Xaa in position 4 is Pro or Ser
  Variant (8)..(8): Xaa in position 8 is Ser or Thr
  Variant (11)..(11): Xaa in position 11 is any amino acid
  Variant (38)..(38): Xaa in position 38 is Glu or Gln
MXHXDGSXMNXDGMTKDEEHKNTMCKDGRCPDINKKVX

SEQ ID NO: 366 - protein, 55 aa, Artificial sequence
  protein pattern
  Variant (4)..(4): Xaa in position 4 is Ala or Thr
  Variant (7)..(7): Xaa in position 7 is Phe or Leu
  Variant (13)..(13): Xaa in position 13 is Gly or Ser
  Variant (23)..(23): Xaa in position 23 is Asp or Glu
  Variant (25)..(25): Xaa in position 25 is Gly or Asn
  Variant (28)..(28): Xaa in position 28 is Ser or Thr
  Variant (29)..(29): Xaa in position 29 is Asn or Ser
  Variant (35)..(35): Xaa in position 35 is Ala or Ser
  Variant (38)..(38): Xaa in position 38 is Asp or Asn
  Variant (48)..(48): Xaa in position 48 is Glu or Gln
  Variant (54)..(54): Xaa in position 54 is Asp or Asn
TKLXTLXLTATLXLASGAALAAXSXAQXXNGQANXAAXAGQVAPDARXNVAPNXV

SEQ ID NO: 367 - DNA, 888 bp, Escherichia coli K12
  CDS (1)..(888): transl_table=11
atgcctggttcattacgtaaaatgccggtctggttaccaatagtcatattgctcgttgccatggcgtctattcagggtggagcctcgttagctaagtcactttttcctctggtgggcgcaccgggtgtcactgcgctgcgtctggcattaggaacgctgatcctcatcgcgttctttaagccatggcgactgcgctttgccaaagagcaacggttaccgctgttgttttacggcgtttcgctgggtgggatgaattatcttttttatctttctattcagacagtaccgctgggtattgcggtggcgctggagttcaccggaccactggcggtggcgctgttctcttctcgtcgcccggtagatttcgtctgggttgtgctggcggttcttggtctgtggttcctgctaccgctggggcaagacgtttcccatgtcgatttaaccggctgtgcgctggcactgggggccggggcttgttgggctatttacattttaagtgggcaacgcgcaggagcggaacatggccctgcgacggtggcaattggttcgttgattgcagcgttaattttcgtgccaattggagcgcttcaggctggtgaagcactctggcactggtcggttattccattgggtctggctgtcgctattctctcgaccgctctgccttattcgctggaaatgattgccctcacccgtttgccaacacggacatttggtacgctgatgagcatggaaccggcgctggctgccgtttccgggatgattttcctcggagaaacactgacacccatacagctactggcgctcggcgctatcatcgccgcttcaatggggtctacgctgacagtacgcaaagagagcaaaataaaagaattagacattaattaa

SEQ ID NO: 368 - protein, 295 aa, Escherichia coli K12
MPGSLRKMPVWLPIVILLVAMASIQGGASLAKSLFPLVGAPGVTALRLALGTLILIAFFKPWRLRFAKEQRLPLLFYGVSLGGMNYLFYLSIQTVPLGIAVALEFTGPLAVALFSSRRPVDFVWVVLAVLGLWFLLPLGQDVSHVDLTGCALALGAGACWAIYILSGQRAGAEHGPATVAIGSLIAALIFVPIGALQAGEALWHWSVIPLGLAVAILSTALPYSLEMIALTRLPTRTFGTLMSMEPALAAVSGMIFLGETLTPIQLLALGAIIAASMGSTLTVRKESKIKELDIN

SEQ ID NO: 369 - DNA, 873 bp, Mesorhizobium loti MAFF303099
  CDS (1)..(873): transl_table=11
atgccggttgccaatcgcgaagcggcacccttgcccgtcgtggcgctgatgggggccatggtgtcgatccagatcggcgccaccttcgcaaaaaccctgttcccgcagatcggtgcgcaaggcacgacgacgctgcggctggtcatcggcgcgctgatgctgatcgcggtgctgcggccctggcagatgcggccgtcgcgcgccacattgccgtggctggtcgcctatggggtgacgctctgcgcgctcaacctgctgttctacgcagcccttgccaggatcccgctcggcgtcgccgtggcgctcgaattttccgggccgctgctggtggcgacgctgacgtcgcggcgcgccagcgattttgcctggatcgcgcttgcgctggccggcatcatcctgttgtcgcccttcatccattcgctgcagcctctcgatccgaccggggtgatgctggcgctggcggcgggcggcttctgggcgctctacatcgtgctggcgcaaaaggcgggggcggagcttggcacccgcaccaccgcctatggcatggcgatcgccgccgtgctggtgctgcccttcggcattgcgcaggcgggtaccgggctgctggcgccatcgatcctggtcagtgcgctgctcgtcggcctgttttccagcgcgctgccgttcttcctggagatggtggcgctgacccgcatgccggcccgcatctacggcacgctgacctgcctggagccggggctcggcgcgctagccggcttcctgttcctgcacgaaagcctgaccccgccgcaactggcgggcatcgccgccgtcatcgtcgcggccgccggcacggcgctgacctcgaagccgccggtgccggcgccggaataa

SEQ ID NO: 370 - protein, 290 aa, Mesorhizobium loti MAFF303099
MPVANREAAPLPVVALMGAMVSIQIGATFAKTLFPQIGAQGTTTLRLVIGALMLIAVLRPWQMRPSRATLPWLVAYGVTLCALNLLFYAALARIPLGVAVALEFSGPLLVATLTSRRASDFAWIALALAGIILLSPFIHSLQPLDPTGVMLALAAGGFWALYIVLAQKAGAELGTRTTAYGMAIAAVLVLPFGIAQAGTGLLAPSILVSALLVGLFSSALPFFLEMVALTRMPARIYGTLTCLEPGLGALAGFLFLHESLTPPQLAGIAAVIVAAAGTALTSKPPVPAPE

SEQ ID NO: 371 - DNA, 879 bp, Vibrio cholerae O1 biovar eltor str. N16961
  CDS (1)..(879): transl_table=11
atgccaacaataaaatctcctttactcattgctattcttagcttgctcgccgctatgatcaccatccaatccggagcatcgattgcgaaacagttgtttccactggtcggcccgggcggtaccgtagcgctacgcatcagcctctctgcgctgattttaatgctgattttccgcccttggcgtgcacgcctcagctggccacaatggcgctctatgtgcatttatggtgcaagtttgggtgggatgcagctgagtttttacttcgctatcgaacgtattccactgggtattggggtagcgttagaattttcaggcccactgctgctcgccttactctcctctaagcgtaagaaagatctgatatgggttgcgttggctattcttggtattgtgttcttattaccggatatgaacggcgttgatgcgttagatccaattggcgttgcgctcgcattaattgctggcggtttttgggctggctacatctggttcggacaacgtgctggcagcgtaggctcaggcggtatgacggtttcgattgggatgctggttgccgcagtcatctatttcccaatcgccactcaattggccgaagcctcgatttttagctggtcgattctgccgatggcactgctggtcgccgtaatgtcgagtgccctaccttatagccttgagatggtggcactcagccgactctctacacagcatttcagtgtattaatgagcttagagcctgcgattgccgcgatggcggggttagccattttgggtgaaactctacaatggagccagtggctggcgatttttatgatcattactgcgtccatgggctctaccctgtccgcggcgaaatcaccgactaaagtgactcaagagtaa

SEQ ID NO: 372 - protein, 292 aa, Vibrio cholerae O1 biovar eltor str. N16961
MPTIKSPLLIAILSLLAAMITIQSGASIAKQLFPLVGPGGTVALRISLSALILMLIFRPWRARLSWPQWRSMCIYGASLGGMQLSFYFAIERIPLGIGVALEFSGPLLLALLSSKRKKDLIWVALAILGIVFLLPDMNGVDALDPIGVALALIAGGFWAGYIWFGQRAGSVGSGGMTVSIGMLVAAVIYFPIATQLAEASIFSWSILPMALLVAVMSSALPYSLEMVALSRLSTQHFSVLMSLEPAIAAMAGLAILGETLQWSQWLAIFMIITASMGSTLSAAKSPTKVTQE

SEQ ID NO: 373 - DNA, 894 bp, Pseudomonas aeruginosa PAO1
  CDS (1)..(894): transl_table=11
atgacctccacctcccgcggcctcgccggaacgctgttgccggtcggcctgctattgatcgccatggcctcgatccagagcggcgcctccctggcgaaaagcatgttccccctggtcggcgcccagggcaccacggccctaaggctgttcttcgccgcgctgatcctgctgctgctcctgcgtccctggcgcaagcgcctgagcctgcaatcgctgcgctcggtggtggtctacggcatcgccctgggcggcatgaacctgctgttctatctctcggtgcgcaccgtgccgctgggcatcgcggtggccctggagttcaccgggccgctgctggtggcgatcctctcctcgcggcgcctgctggacttcctctggatcggcctggcggtgttcggcatctggctgttgctgccgctgggcaacagcgccgagccgctcgacctggtcggcgccgcctatgccctcggtgccggcgtgtgctgggcgctgtacatcctcttcggccagcgcgccggcgccgaccatggcgcccagggcgccgcgctgggggtgctggtggcggcgatcctggttgtgccgatcggcgtcgcccacgccggcgccgacctcctcgacccggcgctgatcccgttggcgctgggcgtcgcggtgctctccacggccttgccctacaccctggaaatggtcgcgctgacccgcctgccggcgcgcaccttcggcaccctgatgagcatcgagccggccttcggcgcgctctccgggctgctgttcctcggcgagcggctgagcccgacccaatggctggccatcggcgcgatcatcctcgcctcggtcggcactaccctcagcgtcaagtcgcgtggcgccgccccggcgctaccggccaaggactga

SEQ ID NO: 374 - protein, 297 aa, Pseudomonas aeruginosa PAO1
MTSTSRGLAGTLLPVGLLLIAMASIQSGASLAKSMFPLVGAQGTTALRLFFAALILLLLLRPWRKRLSLQSLRSVVVYGIALGGMNLLFYLSVRTVPLGIAVALEFTGPLLVAILSSRRLLDFLWIGLAVFGIWLLLPLGNSAEPLDLVGAAYALGAGVCWALYILFGQRAGADHGAQGAALGVLVAAILVVPIGVAHAGADLLDPALIPLALGVAVLSTALPYTLEMVALTRLPARTFGTLMSIEPAFGALSGLLFLGERLSPTQWLAIGAIILASVGTTLSVKSRGAAPALPAKD

SEQ ID NO: 375 - DNA, 909 bp, Deinococcus radiodurans R1
  CDS (1)..(909): transl_table=11
  misc_feature (624)..(624): r is g or a
ttgacattccgcgacctatgctgggcggtaatgcccaggccccgtctgcccgccgtttctgtgccgcccttgcccgcgctgctgctgtccatgctgagtgttcaggggggcgcggccttcgccaagtcgctgtttccggcgctggggtcggcgggcaccacggcggtgcgggtcacgctggcggcgctcctcctgctgctcgtttttcgtccgaatctgcgcgccctgacccgcaacgactggcgggccatcgtgccctacggagccgcgctggggctgatgaacctgagcttttatttcgcactcgagcggctgccgctgggtctcgccgtcacgctggaattcgtggggccgctgctgctctcactctttctctcgcgccgggtgaccgatgtgggctgggtgctgctcgccgcgctgggcattgtcctgatcgcgccggtgggggagagcgccgggcatctcgacctgacgggcgcggggctggcgctgctcgccggggcgttctgggccgcctacatcgtgaccgggggcgcggtggggcggcgggtgccgggcacgacgggcgtggtggcgggcatgttggtggcggcgctggtcgtgctgccgttcggggcggcgcargcgagcgtggtgctgatgcggcccggcttgctgctcgcggggctggcggtggcgctgctctcgtccgcgctgccgtactcgctggaaatgatcgcgctgcgggccattccgccgcacatcttcggcgtgctgatgagcctcgaaccggccattgccgcgctgagcgggtggctgctgctgcacgaggcgctgacctcccggcagtggctggcgctgctgtgcgtggcggcggcgagtgcgggcatctcgctgacggcccggcgtccggcgagggcagaagtctga

SEQ ID NO: 376 - protein, 302 aa, Deinococcus radiodurans R1
MTFRDLCWAVMPRPRLPAVSVPPLPALLLSMLSVQGGAAFAKSLFPALGSAGTTAVRVTLAALLLLLVFRPNLRALTRNDWRAIVPYGAALGLMNLSFYFALERLPLGLAVTLEFVGPLLLSLFLSRRVTDVGWVLLAALGIVLIAPVGESAGHLDLTGAGLALLAGAFWAAYIVTGGAVGRRVPGTTGVVAGMLVAALVVLPFGAAQASVVLMRPGLLLAGLAVALLSSALPYSLEMIALRAIPPHIFGVLMSLEPAIAALSGWLLLHEALTSRQWLALLCVAAASAGISLTARRPARAEV

SEQ ID NO: 377 - DNA, 888 bp, Salmonella enterica subsp. enterica serovar Typhi str. CT18
  CDS (1)..(888): transl_table=11
atgccggggtcaacacgtaaactaccagtctggttgcccattttggttttgctcattgccatgtcctctattcagagtggcgcttcactggcaaaatcgttatttcctcttgttggcgcgccgggtgtaacggcgcttcgtctggcgttgggaacgcttatccttatcgcctttttcaaaccctggcgtttgcgttttgccaaagagcagcggctgcctttactgttttatggtctgtcgctgggcgggatgaactatctattctatctgtcgattcagacggtgccgttgggtattgcggtcgcgctggaatttaccggccctctggcggtcgcgctgttttcatcccggcgtccggtagattttatttgggtcgtactggctgtgcttggactctggttcctgctgccattaggacaagatatgtctcacgtcgatcttaccggggccgcgttagcgctcggcgctggcgcctgttgggctgtctatattcttaccggccagcgagcaggcgcggaacatggtccggccacggtggcggtaggctcgctgattaccgccatcattttcgtgccgattggcgcagttcaggctggcgatgcgctatggcactggtcgattcttcccttagggttagcggtcgctgtgctttctacggcgctgccttattcactggaaatgattgcgctgacgcgcctgccaactcgcaccttcggtacgctgatgagcatggaacccgtgctggccgccatttccgggatgatttttctgggcgaaacgcttacgggcatacaaatcctggccctgtgcgccatcattgccgcctcaatgggttctaccctaacgattcgccgcgaaccgcaaattaaacaagttgacgtaaaatag

SEQ ID NO: 378 - protein, 295 aa, Salmonella enterica subsp. enterica serovar Typhi str. CT18
MPGSTRKLPVWLPILVLLIAMSSIQSGASLAKSLFPLVGAPGVTALRLALGTLILIAFFKPWRLRFAKEQRLPLLFYGLSLGGMNYLFYLSIQTVPLGIAVALEFTGPLAVALFSSRRPVDFIWVVLAVLGLWFLLPLGQDMSHVDLTGAALALGAGACWAVYILTGQRAGAEHGPATVAVGSLITAIIFVPIGAVQAGDALWHWSILPLGLAVAVLSTALPYSLEMIALTRLPTRTFGTLMSMEPVLAAISGMIFLGETLTGIQILALCAIIAASMGSTLTIRREPQIKQVDVK

SEQ ID NO: 379 - DNA, 888 bp, Yersinia pestis KIM
  CDS (1)..(888): transl_table=11
atgtcgttgtctccttcttctaaaaactcactgccattactccccattttgttgctcgtgatcgccatgatctcaatacaaagtggtgcatcactggcaaaaagcttattcccactggtcggtgcacaaggtattacctcgctgcggctcggcatcggtacacttattctgtttgttatttttaaaccttggcggatgcggtttgctgcaggcagccgtttacccctattaatttatggggtggcattaggtgggatgaacttcttgttctacatgtcgttaaaaacggtgccattaggcatcgctgtagcactggaattcacagggcctctggccgtcgctatgttttcttcccggcgtgcggtagattttatctgggtggggctcgccattctggggttatggttcctgttaccactggggcataacattggcaccattgatttatttggtgcagcctgtgctttaggtgcaggggcctgctgggcaatctatatcatttcgggtcaaaaggccggaggtgaccatggcccagggaccgtcgcggtcggctcgttgattgcggccttgattttctgcccaattggggtggcctataacggcatggcactgttcgatccggcgatcttgcccattgcactggccgtcgccattttgtctactgcattaccttactcactcgaaatggtcgcgttaactcgccttcctgcccggacatttggcacattaatgagtctggaacctgcattagccgcaatttctggcctggtgttcttaaatgagcatctgaccttggtgcaatggctcgcgttagcatcaattatcagtgcctccgttggtgccagcctgaccataaaacctaaaccacaacttgaccaggtcacctga

SEQ ID NO: 380 - protein, 295 aa, Yersinia pestis KIM
MSLSPSSKNSLPLLPILLLVIAMISIQSGASLAKSLFPLVGAQGITSLRLGIGTLILFVIFKPWRMRFAAGSRLPLLIYGVALGGMNFLFYMSLKTVPLGIAVALEFTGPLAVAMFSSRRAVDFIWVGLAILGLWFLLPLGHNIGTIDLFGAACALGAGACWAIYIISGQKAGGDHGPGTVAVGSLIAALIFCPIGVAYNGMALFDPAILPIALAVAILSTALPYSLEMVALTRLPARTFGTLMSLEPALAAISGLVFLNEHLTLVQWLALASIISASVGASLTIKPKPQLDQVT

SEQ ID NO: 381 - DNA, 888 bp, Shigella flexneri 2a str. 301
  CDS (1)..(888): transl_table=11
atgcctggttcattacgtaaaatgccggtctggttaccaatagtcatattgctcgttgccatggcgtctattcagggtggagcctcgttagctaagtcactttttcctctggtgagcgcaccgggtgtcactgcgctgcgtctggcattaggaacgctgatcctcatcgcgttctttaagccatggcgactgcgctttgccaaagagcaacggttaccgctgttgttttacggcgtttcgctgggtgggatgaattatcttttttatctttctattcagacagtaccgctgggtattgcggtggcgctggagttcaccggaccactggcggtggcgctgttctcttctcgtcgcccggtagatttcgtctgggttgtgctggcggttcttggtctgtggttcctgctaccgctggggcaagacgtttcccatgtcgatttaaccggctgtgcgctggcactgggggccggggcttgttgggctatttacattttaagtgggcaacgcgcaggagcggaacatggccctgcgacggtagcaattggttcgttgattgcagcgttaattttcgtgccaattggagcgcttcaggctggtgaagcactctggcactggtcggttattccattgggtctggctgtcgttattctctcgaccgctctgccttattcgctggaaatgattgccctcacccgtttgccaacacggacatttggtacgctgatgagcatggaaccggcgctggctgccgtttccgggatgattttcctcggagaaacactgacacccatacagctgctggcgctcggcgctatcatcgccgcttcaatggggtctacgctgacagtacgcaaagagagcaaaataaaagaattagacattaattaa

SEQ ID NO: 382 - protein, 295 aa, Shigella flexneri 2a str. 301
MPGSLRKMPVWLPIVILLVAMASIQGGASLAKSLFPLVSAPGVTALRLALGTLILIAFFKPWRLRFAKEQRLPLLFYGVSLGGMNYLFYLSIQTVPLGIAVALEFTGPLAVALFSSRRPVDFVWVVLAVLGLWFLLPLGQDVSHVDLTGCALALGAGACWAIYILSGQRAGAEHGPATVAIGSLIAALIFVPIGALQAGEALWHWSVIPLGLAVVILSTALPYSLEMIALTRLPTRTFGTLMSMEPALAAVSGMIFLGETLTPIQLLALGAIIAASMGSTLTVRKESKIKELDIN

SEQ ID NO: 383 - DNA, 888 bp, Pseudomonas putida KT2440
  CDS (1)..(888): transl_table=11
atgaacacccaaccccgcagcctggccgccaccctcttcccgatcggcctactgcttatcgccatggcatcgattcagtccggcgcctccctggccaaaagcatgttcccgatcgtcggcgcacaaggcactaccaccctgcgcctgatcttcgccagcatcatcatgctgcttatattgcgcccgtggcgggtacgcatgaccgccaacacgttgcgcaatgtggtcatctacggcatggcactgggcggcatgaacttcctcttctatatggccctgcaaacggtaccaatcggtatcgccgtcgccctggaattcaccggcccgttggccgtggcgatcttctcctcgcgccgagcgatcgatttcctgtggattgccctggccatcgcaggcctgctgctgttgctgccggcaggtcacagcggccaggcactcgacccagtgggcgccgcctatgcgctgggggcgggtgtgtgctgggcgctgtacatcctgttcgggcaacgtgcaggggccgagcacggcatccagagcgcggccctgggggtggtggtagcggccctgttcgtcgcccccatcggtatcgcccacgccggtagcgctctgctcacacctgccgtgatccccatggcgtttgccgttgcaatactgtccaccgccctgccatacagcctggaaatggttgccctcacgcggattccggcgcgcacgttcggcaccctgatgagcatcgaaccggcatttggcgcattgtccggcctgcttttcctcggcgaggtgctgacgctcactcaatggctggcgattctggcaatcattaccgcctcggtcggcaccaccctgtccatgcgcaaggcgcccagcccggccatcgcagcagactga

SEQ ID NO: 384 - protein, 295 aa, Pseudomonas putida KT2440
MNTQPRSLAATLFPIGLLLIAMASIQSGASLAKSMFPIVGAQGTTTLRLIFASIIMLLILRPWRVRMTANTLRNVVIYGMALGGMNFLFYMALQTVPIGIAVALEFTGPLAVAIFSSRRAIDFLWIALAIAGLLLLLPAGHSGQALDPVGAAYALGAGVCWALYILFGQRAGAEHGIQSAALGVVVAALFVAPIGIAHAGSALLTPAVIPMAFAVAILSTALPYSLEMVALTRIPARTFGTLMSIEPAFGALSGLLFLGEVLTLTQWLAILAIITASVGTTLSMRKAPSPAIAAD

SEQ ID NO: 385 - DNA, 867 bp, Bordetella parapertussis 12822
  CDS (1)..(867): transl_table=11
atgaatcgccccaccccgcgcgccgggtccgccctgcttcccattgttctgctcctggtcgccatggcgtcgctgcaaagcggcgcctcgctggccaagacgctgtttccggcggtgggggcccagggcacggccgccctgcgcctgggtttttccgcgctgatcctgctgccgctgctgcggccctggcggctgcgcctggacgcggccggctggcgcgtggtggtcctgtacggcctggcgctgggcggcatgaacctgctgttctacctgtcgctgcgcaccattccgctgggcatcgccgtggcgctggagttcaccggaccgctggcggtggccgtgctggcctcgcggcgctggcacgactttgcctggatcggcctggccgccggcggcctgttgctgctgatcccccatggcgcggccgccgggccgctggacccgaccggcgtggcctgcgcgctggcggccggcgcctgctgggcgctgtacatcgtgttcggccagcgcgccggcctgcgccacggcacccgcacggtggcgctggcggccaccgtcgccgcggccgcggtgctgcctttcggactggcgcacgccggcgcggcgctgttctcgccggccatcattccgctgggcctggccgtggccattctttccagcgcactgccctatgcgctggaaatgcaggtgctcacgcgcctgccggcgcgcacgttcggcaccctgctcagcctggagccggtattcggcgccctgtccggcctgctcttcctcggcgagacgctcaacgccacccaatggctggcggtggccgccatcgtcgcggcctcggccggcatcaccgtcaccggccggcggcgcggctga

SEQ ID NO: 386 - protein, 288 aa, Bordetella parapertussis 12822
MNRPTPRAGSALLPIVLLLVAMASLQSGASLAKTLFPAVGAQGTAALRLGFSALILLPLLRPWRLRLDAAGWRVVVLYGLALGGMNLLFYLSLRTIPLGIAVALEFTGPLAVAVLASRRWHDFAWIGLAAGGLLLLIPHGAAAGPLDPTGVACALAAGACWALYIVFGQRAGLRHGTRTVALAATVAAAAVLPFGLAHAGAALFSPAIIPLGLAVAILSSALPYALEMQVLTRLPARTFGTLLSLEPVFGALSGLLFLGETLNATQWLAVAAIVAASAGITVTGRRRG

SEQ ID NO: 387 - DNA, 804 bp, Bordetella bronchiseptica RB50
  CDS (1)..(804): transl_table=11
atggcgtcgctgcaaggcggcgcctcgctggccaagacgctgtttccggcggtgggggcccagggcacggccgccctgcgcctgggtttttccgcgctgatcctgctgccgctgctgcggccctggcggctgcgcctggacgcggccggctggcgcgtggtggtcctgtacggcctggcgctgggcggcatgaacctgctgttctacctgtcgctgcgcaccattccgctgggcatcgccgtggcgctggagttcaccggaccgctggcggtggccgtgctggcctcgcggcgctggcacgactttgcctggatcggcctggccgccggcggcctgttgctgctgatcccccatggcgcggccgccgggccgctggacccgaccggcgtggcctgcgcgctggcggccggcgcctgctgggcgctgtacatcgtgttcggccagcgcgccggcctgcgccacggcacccgcacggtggcgctggcggccaccgtcgccgcggccgcggtgctgcctttcggactggcgcacgccggcgcggcgctgttctcgccggccatcattccgctgggcctggccgtggccattctttccagcgcactgccctatgcgctggaaatgcaggtgctcacgcgcctgccggcgcgcacgttcggcaccctgctcagcctggagccggtattcggcgccctgtccggcctgctcttcctcggcgagacgctcaacgccacccaatggctggcggtggccgccatcgtcgcggcctcgaccggcatcaccgtcaccggccggcggcgcggctga

SEQ ID NO: 388 - protein, 267 aa, Bordetella bronchiseptica RB50
MASLQGGASLAKTLFPAVGAQGTAALRLGFSALILLPLLRPWRLRLDAAGWRVVVLYGLALGGMNLLFYLSLRTIPLGIAVALEFTGPLAVAVLASRRWHDFAWIGLAAGGLLLLIPHGAAAGPLDPTGVACALAAGACWALYIVFGQRAGLRHGTRTVALAATVAAAAVLPFGLAHAGAALFSPAIIPLGLAVAILSSALPYALEMQVLTRLPARTFGTLLSLEPVFGALSGLLFLGETLNATQWLAVAAIVAASTGITVTGRRRG

SEQ ID NO: 389 - DNA, 894 bp, Photorhabdus luminescens subsp. laumondii TTO1
  CDS (1)..(894): transl_table=11
atgtctccttccaagctccaaaagagtgcctttccattaatacctgtaatactgttactactggctatgacatcaattcagggcggtgcttctcttgccaaaacgctgtttccggtcatcggtgcaccgggtgttaccgcactgcgcctaggtcttggaactctcattctgtttattatttttaaaccctggcgcctgcgttttagccgaaaatccatcatgccactgcttacatatggtattgctcttggcgcgatgaattatacattctatatggcactgacaactattcctttaggtattgccgtggcccttgaatttaccggcccattggctgtagctatgttttcatcacgccgaccaatagattttctttgggtggcattggttatcgccggcttagctttcctactccccattggcaataataatattaatagtttagatcctatagggattatttatgcactcagcgcaggtgtttgctgggcactgtatattattttcggccaacgcgccggtgcaggtcatggagcagcaacggtgtctattggttcatttatcgctgctatgatatttttccctgtcggtttaatacaaacggggccagaactattatttgatatgtcaattctccctctggcactggcaattgcgattctgtctactgcattcccatatacactagaaatgattgccctaacccgtttacctgcacaaacatttggtactctaatgagtcttgaacccgcactgggtgcgctatctggtattgtgtttctgaatgaacatttaactataacgcaatggctggcgctgttctgtattatttttgcctccatcggttctacatcaacaataaaaagaaaacctaaaatcaccgaagttgattaa

SEQ ID NO: 390 - protein, 297 aa, Photorhabdus luminescens subsp. laumondii TTO1
MSPSKLQKSAFPLIPVILLLLAMTSIQGGASLAKTLFPVIGAPGVTALRLGLGTLILFIIFKPWRLRFSRKSIMPLLTYGIALGAMNYTFYMALTTIPLGIAVALEFTGPLAVAMFSSRRPIDFLWVALVIAGLAFLLPIGNNNINSLDPIGIIYALSAGVCWALYIIFGQRAGAGHGAATVSIGSFIAAMIFFPVGLIQTGPELLFDMSILPLALAIAILSTAFPYTLEMIALTRLPAQTFGTLMSLEPALGALSGIVFLNEHLTITQWLALFCIIFASIGSTSTIKRKPKITEVD

SEQ ID NO: 391 - DNA, 858 bp, Bdellovibrio bacteriovorus HD100
  CDS (1)..(858): transl_table=11
gtgacggagagtacccgagtgcaaccgctgtataaatccatctatctcattttgatcgccatgctttccattcagtttggcgcctcggttgctaaaggtcttttcccggtggcgggcccggcgggcacaacggccctgagggtgttcatttccgcgctgatattggttctggtgatgcgcccgtggcgggaaaaattcacagcctccggtcttcggcgaattgccgcctatggtatttcgctggggctgatgaatctgctgttctatttcgctcttgagcgcattcccctgggaatcgcggtggccttggagttcaccgggcctttaaccgtggcgttgctttcctccaaacgagttttggatctggtgtgggcggtgcttgccgggttgggaatatacctgattctgcctttgtctgaagtcagtcaggcattggatatggtcggcgtattgttggcattgggcgcgggcttcttttgggcactttacatcgtgtttggcaaggcgacggggaaagaaaactcctcttcagccacttctgccgtcggaatgtgttttgctgcggctgtggctttcccggtgggcctctacacgaactttgaacaagtggtggatccttcgctttggatgatgggttttttgattgcgattctttcaagcgcactgccgtactcacttgaaatgaaagccatgcaaaacatgccggcaaagacttttggaattctgatgagcttagaacccgcttttgcaacgttgatcggcatcttgttcttaagtgaatccctgatgccatcccagtgggtggccatcggctgcattatggcggcctcggcaggaagcacgatcaccgcccgctaa

SEQ ID NO: 392 - protein, 285 aa, Bdellovibrio bacteriovorus HD100
MTESTRVQPLYKSIYLILIAMLSIQFGASVAKGLFPVAGPAGTTALRVFISALILVLVMRPWREKFTASGLRRIAAYGISLGLMNLLFYFALERIPLGIAVALEFTGPLTVALLSSKRVLDLVWAVLAGLGIYLILPLSEVSQALDMVGVLLALGAGFFWALYIVFGKATGKENSSSATSAVGMCFAAAVAFPVGLYTNFEQVVDPSLWMMGFLIAILSSALPYSLEMKAMQNMPAKTFGILMSLEPAFATLIGILFLSESLMPSQWVAIGCIMAASAGSTITAR

SEQ ID NO: 393 - DNA, 888 bp, Erwinia carotovora subsp. atroseptica SCRI1043
  CDS (1)..(888): transl_table=11
atgaccttattttcccaccgctcgtcttcattcgtccctgtgttgctcatcattatctcgatgctttctatccaaagcggagccgctctggcaaaaagtctgtttccgctcatcggggcaacgggcgtcacagcattgcgtctgggaattgggacgatcattctgtgtatcatcttcaagccgtggcgtatgcgctttagcagtaaccgcctaccgctgctggtttatggcattacgctgggtggcatgaactttttgttctacctctcattgcaaacggtgccgctcggcattgctgtcgcactggaattcaccggtccgcttgccgttgctatgttagcctcacgtagacctattgattttctatgggtttttctggctgttgcggggctgtggttcttattgccactgggtcacaatatcggcaatgttgacttgaccggtgccgcttgcgccgtgggtgcaggcgcctgctgggcgctctatattctatttggacaaaaagcgggggcaaatcatgggccaggcaccgtcgccgtcggatcctgtattgcggcgctgatcttctgccctatcggtgtgtattacgcggagagcacgctgttttcgttctcgatactcccactcggcattgccgtcgccatcctatccaccgcactgccttattctctggagatggtggccttaacccgtctgcccgccagaacgttcagcacgctgatgagcatggagcccgctattgccgccttatctggcatcctcttcctcggtgagcatctggcattcatacagtggatggcgctgatgtttattatcattgcgtcaataggtgcaacgttgacaataaaatcagcgggcgcgaccaaagcgacaactcaagcagaatga

SEQ ID NO: 394 - protein, 295 aa, Erwinia carotovora subsp. atroseptica SCRI1043
MTLFSHRSSSFVPVLLIIISMLSIQSGAALAKSLFPLIGATGVTALRLGIGTIILCIIFKPWRMRFSSNRLPLLVYGITLGGMNFLFYLSLQTVPLGIAVALEFTGPLAVAMLASRRPIDFLWVFLAVAGLWFLLPLGHNIGNVDLTGAACAVGAGACWALYILFGQKAGANHGPGTVAVGSCIAALIFCPIGVYYAESTLFSFSILPLGIAVAILSTALPYSLEMVALTRLPARTFSTLMSMEPAIAALSGILFLGEHLAFIQWMALMFIIIASIGATLTIKSAGATKATTQAE

SEQ ID NO: 395 - DNA, 888 bp, Pseudomonas syringae pv. syringae B728a
  CDS (1)..(888): transl_table=11
atgtctgagaaatcccgcaacatagcctctgccctgttccctctgggactgctgatgatcgccatggtctccattcaaagcggcgcgtcgctggcaaagagtcttttccctgtcgtgggcgcgcaaggcaccacaacactcaggctggtattcgccagccttatcctggttgccgtcctgcgcccgtggcgggcgaatctgactgcaaagtcgttacgcactgtggtgatctacggcgttgcgctgggctgcatgaaccttctcttctatatgtcgttgcagacagtacccctgggaattgcagtagcccttgagttcaccggtccgctggcggtggctttgctgtcctcccgcaagcccatcgattttctctgggtgactctggcagtcattggcttgctgctgttgatccctctggggacctcatctgccgcaattgatctgctcggtgccggctacgccttgggcgccggtgtgtgctgggccgcgtacatcgtgttcggtcacaaggccggcgccgacaacggtgtgcagacagcagcgctcggcgtcgtgattgccgcgctctttatagggccgataggcgtgatacacgcaggctctgcgttactggatatttcactgatacccgcagcattgggtgtcgccatcctctcgactgccctgccctatagcctggagatgattgccctgacgcgcatgtcggcgcgtacatttggcacactggcaagcctggaacccgtcttcgctgcgctttcaggcctgatgtttcttcatgaaagcctttcactgactcaatggctggcgatcggcgcaatcatcttcgcgtccatcggtgcaacccttggctcggcaaacagcaaacctcaactggtgccggccgactga

SEQ ID NO: 396 - protein, 295 aa, Pseudomonas syringae pv. syringae B728a
MSEKSRNIASALFPLGLLMIAMVSIQSGASLAKSLFPVVGAQGTTTLRLVFASLILVAVLRPWRANLTAKSLRTVVIYGVALGCMNLLFYMSLQTVPLGIAVALEFTGPLAVALLSSRKPIDFLWVTLAVIGLLLLIPLGTSSAAIDLLGAGYALGAGVCWAAYIVFGHKAGADNGVQTAALGVVIAALFIGPIGVIHAGSALLDISLIPAALGVAILSTALPYSLEMIALTRMSARTFGTLASLEPVFAALSGLMFLHESLSLTQWLAIGAIIFASIGATLGSANSKPQLVPAD

SEQ ID NO: 397 - DNA, 846 bp, Pseudomonas fluorescens Pf-5
  CDS (1)..(846): transl_table=11
gtggggctgctgcttattgccatggcctcgattcagtcaggagcctcactggccaagagcatgttcccaatcgttggcgcacaaggaaccacaaccctgcggctgattttcgccagcatcatcatgctgcttctattaagaccctggcgcgccaagttcaccaccaacaccctgcgcaccgtgatcatctacggcatggccctgggcggcatgaacttcctcttctatatgtccctcaggagtgtccctctgggcatcgccgtcgccctcgagttcacaggccccctcgcagtagccatctatgcgtcacgcaaggccatagacttcctgtggatcgctctggcgatcgtcgggctgctactgcttattcccaccggagccacagaaacagccatcgacctggtcggtgcaggttatgcactgggggccggggtctgctgggcgctgtacatactcttcggacagaaggccggagccgagaacggcattcagaccgccgccctgggcgtcatgattgctgctctctttgttgcacccataggcatagtccatgccggcgccgcactactgactccctccctgatcccggttgccctgggagtcgccatcttgtccacagccctcccctatagcctggagatggttgccctgactcgcatgccagcccggaccttcggcaccctgatgagtatcgagcccgctttcggcgcgctttcgggcctgttgttcctccacgagtacctgtccctgtcccagtggacggcaatcgcttgcatcatcctggcttccgtaggcgccaccatgaccatgcgccgcgaggccaaaccaatagttgcagttgattga

SEQ ID NO: 398 - protein, 281 aa, Pseudomonas fluorescens Pf-5
MGLLLIAMASIQSGASLAKSMFPIVGAQGTTTLRLIFASIIMLLLLRPWRAKFTTNTLRTVIIYGMALGGMNFLFYMSLRSVPLGIAVALEFTGPLAVAIYASRKAIDFLWIALAIVGLLLLIPTGATETAIDLVGAGYALGAGVCWALYILFGQKAGAENGIQTAALGVMIAALFVAPIGIVHAGAALLTPSLIPVALGVAILSTALPYSLEMVALTRMPARTFGTLMSIEPAFGALSGLLFLHEYLSLSQWTAIACIILASVGATMTMRREAKPIVAVD

SEQ ID NO: 399 - DNA, 1116 bp, Pseudomonas syringae pv. phaseolicola 1448A
  CDS (1)..(1116): transl_table=11
ttgatctacaaggttttttcgtttccgtctgcgccggaagtggggcgaattatagacagatcacagagggcgtcaaccgttaatttcaaaatcaccgaaattgcccgtttcgtgattacctatatagaaggaaaagcaaagattgcgcaatatattgcccatgcatcgattgttgcgcatcatgttcgattatcagtgcccggatcacacccaggatatacaaccaaaatgtctgagaaaccccacactatagcgtccgcccttttccccctagggctgctgatgatcgccatgatctccattcaaagcggcgcgtcactggcaaagagtcttttccccgtagtaggcgcgcaaggcaccacgaccttgaggctggtatttgcgagccttatccttatcgccatcctgcgcccatggcgagcgaatctgaccgcaaaatcgctacgcactgtggtgatctacggcattgcgctgggcagcatgaacctccttttctatatgtcgttgcagactgtgcctttgggaatcgcggtcgcgctggagttcaccggtccactggctgtagctctgctgtcttcgcgcaagcccatcgattttctatgggtttctctggcagtcatcggcttattgctattgatccccctcggggcctcgaacgaagcgattgatctgctcggcgctgcgtatgccctgggggccggagtgtgctgggccgcttatacagtgttcgggcataaagcaggtgcagacaacggcgtacagaccgccgcgcttggcgtaatgattgccgcactcttcatcggacctgtcggcgtgatacacgcaggctctgcattatttgacatttcattggtaccggcagcgctgggtgtcgccattctgtcgaccgccctgccctacagcctggaaatgatcgctctgacgcgaatgtcggcacgcacatttggcacactggcaagcctggagcctgtcttcgcagcgctgtcaggtctggtgtttcttcacgagagcctttcgctgacccaatggctggcaattggcgcaatcatcttcgcatccatcggtgccacccttggttctgcaaacacaaaacctcaattggtccctgccgactga

SEQ ID NO: 400 - protein, 371 aa, Pseudomonas syringae pv. phaseolicola 1448A
MIYKVFSFPSAPEVGRIIDRSQRASTVNFKITEIARFVITYIEGKAKIAQYIAHASIVAHHVRLSVPGSHPGYTTKMSEKPHTIASALFPLGLLMIAMISIQSGASLAKSLFPVVGAQGTTTLRLVFASLILIAILRPWRANLTAKSLRTVVIYGIALGSMNLLFYMSLQTVPLGIAVALEFTGPLAVALLSSRKPIDFLWVSLAVIGLLLLIPLGASNEAIDLLGAAYALGAGVCWAAYTVFGHKAGADNGVQTAALGVMIAALFIGPVGVIHAGSALFDISLVPAALGVAILSTALPYSLEMIALTRMSARTFGTLASLEPVFAALSGLVFLHESLSLTQWLAIGAIIFASIGATLGSANTKPQLVPAD

SEQ ID NO: 401 - DNA, 858 bp, Ralstonia eutropha JMP134
  CDS (1)..(858): transl_table=11
ttgcggcaaagcgccacccttctcgccgtcgtggcgctgaccggctcgatggcctccctgtgcatcggcacctcgttcgccaagtcgctgtttgcggcgctgggtgcgcagggcacgaccgcattgcgcgtgagcttttcggcattgatcctgctcgcggtgtggcgaccgtggcggatgccgctgtccggcgccaatgccagggccattgcgctctatggtgccgcgctcggcgccaccaacctgctgttctatatgtcgctgcgcaccattccgctggggctggcgattgcgatcgaattcaccggaccgctcaccgtggcggtgctgtcgtcgcggcgtgccatcgatttcctgtggatcgcgttcgcggtcaccgggctgctgttgctgctgccgctgggcgaagcgtccacgcatctggatccggtcggcatgggcttcgcgctcgcggcgggggttggctgggcgctctacatcatcttcggccagcgcgcgggcaatgcccacggcggccaggccacatcgctcggtctgaccatggcggcgctggtcgtgctgccgttcggcctggcccacgccggcacggccatgttcagcccgccgctgctgctcgcggggctggccgtgggcgtgttgtccagcgcgattccctattcacttgaaatggtcgcgctcaagcgcctgccgcgacggacgttcggcatcctgctcagcatggagcccgccatgggcgcgctggccgggctggcgttcctgcatgagcaactcagcatgatccagtggctagcaattgccagcatcatcgtggcctcgatcggttgcacggctaccgcgcggggcaaggcggcggcctga

SEQ ID NO: 402 - protein, 285 aa, Ralstonia eutropha JMP134
MRQSATLLAVVALTGSMASLCIGTSFAKSLFAALGAQGTTALRVSFSALILLAVWRPWRMPLSGANARAIALYGAALGATNLLFYMSLRTIPLGLAIAIEFTGPLTVAVLSSRRAIDFLWIAFAVTGLLLLLPLGEASTHLDPVGMGFALAAGVGWALYIIFGQRAGNAHGGQATSLGLTMAALVVLPFGLAHAGTAMFSPPLLLAGLAVGVLSSAIPYSLEMVALKRLPRRTFGILLSMEPAMGALAGLAFLHEQLSMIQWLAIASIIVASIGCTATARGKAAA

SEQ ID NO: 403 - DNA, 888 bp, Pseudomonas fluorescens PfO-1
  CDS (1)..(888): transl_table=11
atgaacgaccagcctcgcagccttgcctcaaccttgtttccggttggccttctattaatagccatggcatcgattcagtccggcgcctcactggccaaaagcatgttccccatcgttggcgctcaaggtactacaacactgcgcctcatcttcgccagcgtgatcatgctggtattgctcaaaccctggagagcgaagctgacggccaagtcactgcgcacggtgattgtctatggaatggcgctaggaggcatgaacttcctcttctatatgtcgttacgcactgttccgctcggcatcgcagttgccctggagttcaccggccctctcgcggtcgccatctatgcctcgcgtcgcgcgatcgactttctctggattgcccttgcagccattgggttgctgttgcttatacccacaggcgctacgacatcaggtatcgatctggtcggtgcaggctatgcgctgggagctggcttttgctgggcgctgtacattctgtttggccagaaggccggcgcagataacggtgtgaccaccgcggcgcttggcgtgatgatcgcagccctgttcgtcgcccccatcggtatcgtccacgctggcagcgcattgctgactcccgcattgatcccgatcgctattggcgtggcgatcctgtccactgccctgccttacactctggaaatggtcgccctcacccgcatgcccgcccgcaccttcggcacactgatgagtattgaaccggcctttggagcgctgtcgggcctgctattccttcaggaatacctctctctgtcacaatggatggcgatcctgtgcattattctggcctccgtcggtgcaaccatgaccatgggcaacactgccaaacccgccatcgcggcggattga

SEQ ID NO: 404 - protein, 295 aa, Pseudomonas fluorescens PfO-1
MNDQPRSLASTLFPVGLLLIAMASIQSGASLAKSMFPIVGAQGTTTLRLIFASVIMLVLLKPWRAKLTAKSLRTVIVYGMALGGMNFLFYMSLRTVPLGIAVALEFTGPLAVAIYASRRAIDFLWIALAAIGLLLLIPTGATTSGIDLVGAGYALGAGFCWALYILFGQKAGADNGVTTAALGVMIAALFVAPIGIVHAGSALLTPALIPIAIGVAILSTALPYTLEMVALTRMPARTFGTLMSIEPAFGALSGLLFLQEYLSLSQWMAILCIILASVGATMTMGNTAKPAIAAD

SEQ ID NO: 405 - DNA, 867 bp, Ralstonia metallidurans CH34
  CDS (1)..(867): transl_table=11
ttgcctctctcgcgcataaaacaaagcgacagcctgctggctgtgctggccctgatcggctcgatggcgtcgctctgcatcggcacatcatttgccaaaagcctgtttgcgtcgatcggcgcacagggcaccaccgcgctgcgagtgagctttgcggcggtaatcctgatctgcgtctggcgcccctggcgttttccgctctccggcaagaatgcccgcgccatcgccctttatggcgccgcgctgggcgggaccaacctgctgttctacatgtcgttgcggacgatcccgctcgggctggcgatcgccatcgaattcaccggtccgctggcggttgccgtgctttcgtcacgccgcgcgatcgactttctgtggattggctgcgcggtcaccggactgattctgctgctgccgcttggcgaagccgccacgcacctcgaccccgtaggcattggcttcgccctcgccgcaggtgtgggctgggcgctgtatatcgtgttcggccagatggcgggcaacgcccatggcggccaggccacgtccctggggatgaccatggcggcattggtcgccttgccattcggactgggccacgccggactggagatgttcagcccggctcttctgctttccggcttggcggtcggcattctttccagcgcgatcccgtattcgctggaaatggtagccctcaagcggctcccccggcgcacgttcggcatcttgttgagtctggagccagccatgggcgccctggcgggcctggcattcctgaacgaacaactgacgccgattcagtgggtagcgattgccgcgatcatcgtcgcgtcgattggttgtacggctacgtcgaaaagcaagcgttaa

SEQ ID NO: 406 - protein, 288 aa, Ralstonia metallidurans CH34
MPLSRIKQSDSLLAVLALIGSMASLCIGTSFAKSLFASIGAQGTTALRVSFAAVILICVWRPWRFPLSGKNARAIALYGAALGGTNLLFYMSLRTIPLGLAIAIEFTGPLAVAVLSSRRAIDFLWIGCAVTGLILLLPLGEAATHLDPVGIGFALAAGVGWALYIVFGQMAGNAHGGQATSLGMTMAALVALPFGLGHAGLEMFSPALLLSGLAVGILSSAIPYSLEMVALKRLPRRTFGILLSLEPAMGALAGLAFLNEQLTPIQWVAIAAIIVASIGCTATSKSKR

SEQ ID NO: 407 - DNA, 888 bp, Myxococcus xanthus DK 1622
  CDS (1)..(888): transl_table=11
atgtctcgagtcttgacgaagccggggccggtcacggtggcggtcctgacgttgctcgtcgcgatggcctccatccagacgggcgcttcgctggccaagcaagtcttccccgtcttgggcgcggcgggggccacggcgcttcgcgtgttcttcgcggcgctcatcctggcggcggtgttccggccctggcggcagcggctcacccgcaaggacttgcgggccgtggccatctacggcgcggcgctgggcgggatgaacctgaccttctacctggcgctggagcgcatcccgctgggcatcgccgtcgccatcgagttcaccgggccgctcgccctggccatcttctccacgcgccgggcgctcgacttcgtgtgggcgctgctggccgtggcaggcatcctgctgattctgccgctgtcggagacgtcgcggtcgctggactggatgggcgtcttctgggcactggtggccgccacctgctgggcgctgtacatcctcttcggtcagcgggccggaggcaccgtccacggcggcacggcggcgtcgctggggatgtgcgtcgcggcgctgctcgtcatgcccttcggggtcgcgcacgccggcatgaagctgctggacgtgtcgctgcttcccatcatcctgtgcgtggccgtgctgtcgagcgcgctgccgtactcgttggagatgtatgccctcaaggcgctccccacgcgcacgttcggcatcctgatgagcctggagccggcgctggccgccgtgtccgggctgctgctgctggatgagcggctgtcgctggtgcagtgggcggccatcggctgcatcatcctggcgtccgtgggcagctccgcgacgtcgcgcaagcccgttgaagccgtcgccgcgagctga

SEQ ID NO: 408 - protein, 295 aa, Myxococcus xanthus DK 1622
MSRVLTKPGPVTVAVLTLLVAMASIQTGASLAKQVFPVLGAAGATALRVFFAALILAAVFRPWRQRLTRKDLRAVAIYGAALGGMNLTFYLALERIPLGIAVAIEFTGPLALAIFSTRRALDFVWALLAVAGILLILPLSETSRSLDWMGVFWALVAATCWALYILFGQRAGGTVHGGTAASLGMCVAALLVMPFGVAHAGMKLLDVSLLPIILCVAVLSSALPYSLEMYALKALPTRTFGILMSLEPALAAVSGLLLLDERLSLVQWAAIGCIILASVGSSATSRKPVEAVAAS

SEQ ID NO: 409 - DNA, 894 bp, symbiont bacterium of Paederus fuscipes
  CDS (1)..(894): transl_table=11
atgactacttctccgcgtggcctcgccgcgatgctattgccggttggtctgctgctagtggccatggcttctattcaaagcggcgcttctctggcgaaaagcttgttccccttggttggcgcccagggtgccaccgctttacggctgctcttcgcagcgctgattctgtcggttctcctgcgtccgtggcgtttgcgcttcaacctgaattcgttgcgctcagtggtgatctatggcatcgccttgggaggtatgaatctgatgttctacctttcggtacgtacggtgccgctgggcgttgcggtggcgctggagttcaccgggccgctgctggtagcgatcttctcctcgagaaggctgatcgactttctctggatcggtctggcggtgttcggcctgtggctacttctgccgttgggcaggagtgctgagccggtcgatccggttggcgccacctatgcgctgagcgctggtgtatgctgggcgctgtatatattattcggtcagcgggctggagcggactatggcacccagggtgcggcgctaggggtgctggtggcggcgttctgtgtggtaccggtcggcattgtccatgctggagcggcactgctcgatccggtgctcatccctgtggcgttggaggtggctatcctttccaccgctttgccttacagtttagaaatggttgcgctaactcgcttgccggcacatacttttggcatcctgatgagtgtcgaaccggccttcggtgcactttctgggctactgttcctcggcgagcacttgatcgctagccaatggctggcgatcagcgtcatcatccttgcctcggcgggcactaccttgagtatcaagtcgcgcagcaatattccggagctatcggccaaagactga

SEQ ID NO: 410 - protein, 297 aa, symbiont bacterium of Paederus fuscipes
MTTSPRGLAAMLLPVGLLLVAMASIQSGASLAKSLFPLVGAQGATALRLLFAALILSVLLRPWRLRFNLNSLRSVVIYGIALGGMNLMFYLSVRTVPLGVAVALEFTGPLLVAIFSSRRLIDFLWIGLAVFGLWLLLPLGRSAEPVDPVGATYALSAGVCWALYILFGQRAGADYGTQGAALGVLVAAFCVVPVGIVHAGAALLDPVLIPVALEVAILSTALPYSLEMVALTRLPAHTFGILMSVEPAFGALSGLLFLGEHLIASQWLAISVIILASAGTTLSIKSRSNIPELSAKD

SEQ ID NO: 411 - DNA, 888 bp, Salmonella typhimurium
  CDS (1)..(888): transl_table=11
atgccggggtcaacacgtaaactaccagtctggttgcccattttggttttgctcattgccatgtcctctattcagagtggcgcttcactggcgaaatcgttatttcctcttgtcggcgcgccgggcgtaacggcgcttcgtctggcgttgggaacgcttatccttatcgcctttttcaaaccctggcgtttgcgttttgccaaagagcagcggctgcctttattgttttatggtctgtcgctgggcgggatgaactatctattctatctgtcgattcagacggtgccgttgggtattgcggtcgcgctggaatttaccggtcctctggcggtcgcgctgttttcatcccggcggccggtagattttatttgggtcgtactggctgtgcttgggctctggttcctgctgccattaggacaagatatgtctcacgtcgatcttaccggggccgcgttggcgctcggcgctggcgcctgttgggctgtctatattcttaccggccagcgagcaggcgcggaacatggtccggccacggtggcggtaggctcgctgattgccgccatcattttcgtgccgattggcgcagttcaggctggcgacgcgctatggcactggtcgattcttcccttagggttagcggtcgctgtgctttctacggcgctgccttattcactggaaatgattgcgctgacgcgcctgccaacccgcaccttcggtacgctgatgagcatggaacccgcgctggccgccgtttccgggatgatttttctgggcgaaacgcttacgggcatacaaatcctggccctgtgcgccatcattgccgcctcaatgggttctaccctaacgattcgacgcgaaccgcaaattaaacaagttgacgtaaaatag

SEQ ID NO: 412 - protein, 295 aa, Salmonella typhimurium
MPGSTRKLPVWLPILVLLIAMSSIQSGASLAKSLFPLVGAPGVTALRLALGTLILIAFFKPWRLRFAKEQRLPLLFYGLSLGGMNYLFYLSIQTVPLGIAVALEFTGPLAVALFSSRRPVDFIWVVLAVLGLWFLLPLGQDMSHVDLTGAALALGAGACWAVYILTGQRAGAEHGPATVAVGSLIAAIIFVPIGAVQAGDALWHWSILPLGLAVAVLSTALPYSLEMIALTRLPTRTFGTLMSMEPALAAVSGMIFLGETLTGIQILALCAIIAASMGSTLTIRREPQIKQVDVK

SEQ ID NO: 413 - DNA, 25 bp, Artificial sequence
  primer
atgcctggttcattacgtaaaatgc

SEQ ID NO: 414 - DNA, 28 bp, Artificial sequence
  primer
ttaattaatgtctaattcttttattttg

SEQ ID NO: 415 - protein, 267 aa, Artificial sequence
  consensus sequence
  Variant (2)..(4): Xaa in position 2 to 4 is any amino acid
  Variant (6)..(6): Xaa in position 6 is any amino acid
  Variant (8)..(8): Xaa in position 8 is any amino acid
  Variant (10)..(10): Xaa in position 10 is any amino acid
  Variant (14)..(14): Xaa in position 14 is any amino acid
  Variant (17)..(18): Xaa in position 17 to 18 is any amino acid
  Variant (21)..(22): Xaa in position 21 to 22 is any amino acid
  Variant (25)..(25): Xaa in position 25 is any amino acid
  Variant (27)..(27): Xaa in position 27 is any amino acid
  Variant (29)..(29): Xaa in position 29 is any amino acid
  Variant (32)..(37): Xaa in position 32 to 37 is any amino acid
  Variant (40)..(44): Xaa in position 40 to 44 is any amino acid
  Variant (48)..(59): Xaa in position 48 to 59 is any amino acid
  Variant (60)..(60): Xaa in position 60 is any or no amino acid
  Variant (63)..(64): Xaa in position 63 to 64 is any amino acid
  Variant (67)..(67): Xaa in position 67 is any amino acid
  Variant (70)..(71): Xaa in position 70 to 71 is any amino acid
  Variant (74)..(79): Xaa in position 74 to 79 is any amino acid
  Variant (83)..(83): Xaa in position 83 is any amino acid
  Variant (94)..(94): Xaa in position 94 is any amino acid
  Variant (97)..(99): Xaa in position 97 to 99 is any amino acid
  Variant (103)..(104): Xaa in position 103 to 104 is any amino acid
  Variant (107)..(107): Xaa in position 107 is any amino acid
  Variant (109)..(110): Xaa in position 109 to 110 is any amino acid
  Variant (113)..(114): Xaa in position 113 to 114 is any amino acid
  Variant (116)..(118): Xaa in position 116 to 118 is any amino acid
  Variant (120)..(120): Xaa in position 120 is any amino acid
  Variant (122)..(122): Xaa in position 122 is any amino acid
  Variant (124)..(129): Xaa in position 124 to 129 is any amino acid
  Variant (130)..(130): Xaa in position 130 is any or no amino acid
  Variant (132)..(133): Xaa in position 132 to 133 is any amino acid
  Variant (135)..(137): Xaa in position 135 to 137 is any amino acid
  Variant (140)..(140): Xaa in position 140 is any amino acid
  Variant (143)..(144): Xaa in position 143 to 144 is any amino acid
  Variant (147)..(147): Xaa in position 147 is any amino acid
  Variant (150)..(151): Xaa in position 150 to 151 is any amino acid
  Variant (154)..(154): Xaa in position 154 is any amino acid
  Variant (157)..(159): Xaa in position 157 to 159 is any amino acid
  Variant (160)..(160): Xaa in position 160 is any or no amino acid
  Variant (162)..(167): Xaa in position 162 to 167 is any amino acid
  Variant (169)..(171): Xaa in position 169 to 171 is any amino acid
  Variant (174)..(177): Xaa in position 174 to 177 is any amino acid
  Variant (179)..(179): Xaa in position 179 is any amino acid
  Variant (181)..(183): Xaa in position 181 to 183 is any amino acid
  Variant (186)..(187): Xaa in position 186 to 187 is any amino acid
  Variant (188)..(188): Xaa in position 188 is any or no amino acid
  Variant (190)..(198): Xaa in position 190 to 198 is any amino acid
  Variant (200)..(200): Xaa in position 200 is any amino acid
  Variant (203)..(203): Xaa in position 203 is any amino acid
  Variant (206)..(206): Xaa in position 206 is any amino acid
  Variant (211)..(211): Xaa in position 211 is any amino acid
  Variant (215)..(215): Xaa in position 215 is any amino acid
  Variant (218)..(218): Xaa in position 218 is any amino acid
  Variant (220)..(220): Xaa in position 220 is any amino acid
  Variant (222)..(223): Xaa in position 222 to 223 is any amino acid
  Variant (227)..(227): Xaa in position 227 is any amino acid
  Variant (229)..(229): Xaa in position 229 is any amino acid
  Variant (231)..(231): Xaa in position 231 is any amino acid
  Variant (234)..(236): Xaa in position 234 to 236 is any amino acid
  Variant (238)..(239): Xaa in position 238 to 239 is any amino acid
  Variant (241)..(242): Xaa in position 241 to 242 is any amino acid
  Variant (245)..(245): Xaa in position 245 is any amino acid
  Variant (247)..(247): Xaa in position 247 is any amino acid
  Variant (249)..(251): Xaa in position 249 to 251 is any amino acid
  Variant (253)..(254): Xaa in position 253 to 254 is any amino acid
  Variant (256)..(258): Xaa in position 256 to 258 is any amino acid
  Variant (261)..(261): Xaa in position 261 is any amino acid
  Variant (264)..(264): Xaa in position 264 is any amino acid
  Variant (266)..(266): Xaa in position 266 is any amino acid
LXXXMXSXQXGASXAKXXFPXXGAXGXTXLRXXXXXXILXXXXXPWRXXXXXXXXXXXXXYGXXLGXMNXXFYXXXXXXPLGXAVALEFTGPLXVAXXXSRRXXDFXWXXLAXXGXXXLXPXGXXXXXXXDXXGXXXALXAGXXWAXYIXXGQXAGXXXXGXXXXXXGXXXAAXXXXPXGXXXAGXXXLXXXXXXXXXLXVAXLSXALPYXLEMXALXRXPXXTFGXLXSXEPXXXAXXGXXFLXEXLXXXQXXAXXXIIXASXGXT

SEQ ID NO: 416 - protein, 62 aa, Artificial sequence
  protein pattern
  Variant (3)..(3): Xaa in position 3 is any amino acid
  Variant (4)..(4): Xaa in position 4 is Ala, Ser or Thr
  Variant (7)..(7): Xaa in position 7 is any amino acid
  Variant (10)..(11): Xaa in position 10 to 11 is any or no amino acid
  Variant (13)..(14): Xaa in position 13 to 14 is any or no amino acid
  Variant (16)..(16): Xaa in position 16 is Phe, Leu or Met
  Variant (17)..(17): Xaa in position 17 is Ala or Ser
  Variant (18)..(18): Xaa in position 18 is Ile, Leu or Val
  Variant (19)..(20): Xaa in position 19 to 20 is any amino acid
  Variant (21)..(21): Xaa in position 21 is Ile, Leu or Val
  Variant (23)..(23): Xaa in position 23 is Ile or Leu
  Variant (25)..(25): Xaa in position 25 is Ile, Leu or Val
  Variant (28)..(28): Xaa in position 28 is Ala or Thr
  Variant (29)..(29): Xaa in position 29 is Ile or Leu
  Variant (32)..(32): Xaa in position 32 is Thr or Val
  Variant (36)..(36): Xaa in position 36 is any amino acid
  Variant (37)..(37): Xaa in position 37 is Leu or Val
  Variant (38)..(38): Xaa in position 38 is Ala or Ser
  Variant (39)..(39): Xaa in position 39 is Ile, Leu, Met or Val
  Variant (40)..(41): Xaa in position 40 to 41 is any amino acid
  Variant (42)..(42): Xaa in position 42 is Ser or Thr
  Variant (43)..(44): Xaa in position 43 to 44 is Lys or Arg
  Variant (45)..(46): Xaa in position 45 to 46 is any amino acid
  Variant (48)..(48): Xaa in position 48 is Phe, Leu or Val
  Variant (49)..(49): Xaa in position 49 is Ala, Gly, Ile, Leu or Val
  Variant (51)..(51): Xaa in position 51 is Ala, Ile or Val
  Variant (52)..(52): Xaa in position 52 is any amino acid
  Variant (54)..(54): Xaa in position 54 is Ala or Val
  Variant (55)..(55): Xaa in position 55 is Ala, Gly, Ile or Val
  Variant (56)..(56): Xaa in position 56 is any amino acid
  Variant (58)..(58): Xaa in position 58 is Ile or Leu
  Variant (59)..(59): Xaa in position 59 is any amino acid
  Variant (60)..(60): Xaa in position 60 is Phe or Leu
  Variant (61)..(61): Xaa in position 61 is Ile or Leu
  Variant (62)..(62): Xaa in position 62 is Ala, Ile or Leu
YGXXLGXMNXXFXXYXXXXXXPXGXAVXXEFXGPLXXXXXXXXXXXDXXWXXLXXXGXXXXX

SEQ ID NO: 417 - protein, 58 aa, Artificial sequence
  protein pattern
  Variant (2)..(3): Xaa in position 2 to 3 is any amino acid
  Variant (5)..(5): Xaa in position 5 is any amino acid
  Variant (7)..(7): Xaa in position 7 is Phe or Leu
  Variant (10)..(10): Xaa in position 10 is Ala, Ser or Thr
  Variant (14)..(14): Xaa in position 14 is any amino acid
  Variant (15)..(15): Xaa in position 15 is Ala or Val
  Variant (16)..(16): Xaa in position 16 is Leu or Met
  Variant (17)..(18): Xaa in position 17 to 18 is any amino acid
  Variant (19)..(19): Xaa in position 19 is Ile, Leu or Met
  Variant (20)..(20): Xaa in position 20 is Pro or Ser
  Variant (21)..(21): Xaa in position 21 is Ala, Pro or Thr
  Variant (22)..(23): Xaa in position 22 to 23 is any amino acid
  Variant (25)..(25): Xaa in position 25 is Gly or Ser
  Variant (26)..(26): Xaa in position 26 is any amino acid
  Variant (28)..(28): Xaa in position 28 is any amino acid
  Variant (30)..(30): Xaa in position 30 is Ile, Leu, Met or Val
  Variant (33)..(33): Xaa in position 33 is Ala or Val
  Variant (34)..(34): Xaa in position 34 is Phe, Ile or Leu
  Variant (35)..(35): Xaa in position 35 is Ala or Gly
  Variant (36)..(36): Xaa in position 36 is Ala or Thr
  Variant (37)..(37): Xaa in position 37 is Ile, Leu, Met or Val
  Variant (38)..(38): Xaa in position 38 is any amino acid
  Variant (40)..(41): Xaa in position 40 to 41 is any amino acid
  Variant (42)..(42): Xaa in position 42 is Phe, Ile or Leu
  Variant (44)..(44): Xaa in position 44 is any amino acid
  Variant (46)..(46): Xaa in position 46 is any amino acid
  Variant (48)..(50): Xaa in position 48 to 50 is any amino acid
  Variant (52)..(53): Xaa in position 52 to 53 is any amino acid
  Variant (55)..(55): Xaa in position 55 is Ile, Leu or Val
  Variant (56)..(57): Xaa in position 56 to 57 is any amino acid
  Variant (58)..(58): Xaa in position 58 is Ile or Val
AXXSXAXPYXLEMXXXXXXXXXXFXXLXSXEPXXXXXXGXXXLXEXLXXXQXXAXXXX

SEQ ID NO: 418 - protein, 39 aa, Artificial sequence
  protein pattern
  Variant (2)..(2): Xaa in position 2 is any amino acid
  Variant (4)..(4): Xaa in position 4 is any amino acid
  Variant (7)..(7): Xaa in position 7 is Ala, Ser or Thr
  Variant (8)..(8): Xaa in position 8 is Phe, Leu or Val
  Variant (11)..(11): Xaa in position 11 is Gly, Gln, Ser or Thr
  Variant (12)..(12): Xaa in position 12 is Leu, Met or Val
  Variant (15)..(15): Xaa in position 15 is any amino acid
  Variant (16)..(16): Xaa in position 16 is Ala, Ile, Leu or Val
  Variant (18)..(18): Xaa in position 18 is Ala, Pro or Ser
  Variant (19)..(19): Xaa in position 19 is any amino acid
  Variant (21)..(21): Xaa in position 21 is any amino acid
  Variant (22)..(22): Xaa in position 22 is Ala or Thr
  Variant (23)..(23): Xaa in position 23 is Ala, Ser or Thr
  Variant (24)..(24): Xaa in position 24 is Leu or Val
  Variant (26)..(26): Xaa in position 26 is Leu or Val
  Variant (27)..(27): Xaa in position 27 is any amino acid
  Variant (28)..(28): Xaa in position 28 is Phe, Ile or Leu
  Variant (29)..(29): Xaa in position 29 is Ala, Gly or Ser
  Variant (30)..(30): Xaa in position 30 is Ala, Ser or Thr
  Variant (31)..(31): Xaa in position 31 is Ile, Leu or Val
  Variant (32)..(32): Xaa in position 32 is Ile, Leu or Met
  Variant (33)..(33): Xaa in position 33 is Leu or Met
  Variant (34)..(34): Xaa in position 34 is any amino acid
  Variant (35)..(35): Xaa in position 35 is Ala, Ile, Leu, Pro or Val
  Variant (36)..(36): Xaa in position 36 is Phe, Ile, Leu or Val
  Variant (37)..(37): Xaa in position 37 is Phe, Leu or Met
  Variant (38)..(38): Xaa in position 38 is Lys or Arg
SXQXGAXXAKXXFPXXGXXGXXXXRXXXXXXXXXXXXXP

SEQ ID NO: 419 - protein, 27 aa, Artificial sequence
  protein pattern
  Variant (2)..(2): Xaa in position 2 is Leu or Pro
  Variant (3)..(3): Xaa in position 3 is any amino acid
  Variant (5)..(7): Xaa in position 5 to 7 is any amino acid
  Variant (9)..(9): Xaa in position 9 is Leu or Val
  Variant (10)..(10): Xaa in position 10 is any amino acid
  Variant (13)..(14): Xaa in position 13 to 14 is any amino acid
  Variant (17)..(17): Xaa in position 17 is Ala, Gly, Ile, Leu or Val
  Variant (20)..(21): Xaa in position 20 to 21 is any amino acid
  Variant (23)..(23): Xaa in position 23 is any amino acid
  Variant (24)..(24): Xaa in position 24 is any or no amino acid
  Variant (26)..(26): Xaa in position 26 is any or no amino acid
DXXGXXXAXXAGXXWAXYIXXGXXAXG

SEQ ID NO: 420 - DNA, 1209 bp, Escherichia coli K12
  CDS (1)..(1209): transl_table=11
atgaccgtaaattcttcacgtaatgcattgaaacgccgaacctgggcgctgtttatgttcttctttttgccaggcctgttaatggcgtcctgggcaacccgtacgcctgctatccgcgatattctctctgtctcgatcgctgaaatgggcggtgttctctttggtctgtcgatcggttcgatgagcggtattctctgctcggcgtggttagtgaaacgctttgggacacgtaatgtcatcctggtcacgatgtcctgcgcattgatcgggatgatgatattaagtctggcactctggctgacatcgcccctgctctttgccgttggtctcggcgtctttggggcaagttttggttctgcggaagtggcgataaacgttgaaggtgctgccgttgagcgagaaatgaataagacggttttgccgatgatgcacggtttttatagcctgggcacgctggcaggcgcaggtgtcgggatggcactgacggcctttggcgttccggcaacggtgcacattttattggcggcgctggtaggtatcgcacctatttatatcgccattcaggcaatccctgacggtacgggcaaaaatgctgccgatggcacccagcatggcgaaaaaggcgtacctttttatcgcgatatccagttgctgctgataggtgttgtggtgctggcgatggcctttgccgaaggttctgccaacgactggttacccttattaatggttgacggtcacggttttagccctacttccggctcgctgatttatgccggttttaccctggggatgaccgttggacgcttcaccggcggttggttcatcgaccgttacagtcgcgttgccgtggttcgggccagtgcactaatgggggcgttgggtattgggctgattatttttgtcgatagcgcctgggtcgctggggtgtctgttgtactctggggactgggtgcctcgctgggcttcccgctgaccatttctgccgccagcgataccggccccgatgcaccaacccgcgtcagtgtggtagcaacgaccggttatctggctttcctcgtcgggccgccgctgctgggctatctcggcgaacattatggattacgtagtgcaatgctggttgtactggcgctggttattctcgcggctattgtcgcgaaagccgtcgccaaacccgataccaaaacgcagacggcgatggagaatagttga

SEQ ID NO: 421 - protein, 402 aa, Escherichia coli K12
MTVNSSRNALKRRTWALFMFFFLPGLLMASWATRTPAIRDILSVSIAEMGGVLFGLSIGSMSGILCSAWLVKRFGTRNVILVTMSCALIGMMILSLALWLTSPLLFAVGLGVFGASFGSAEVAINVEGAAVEREMNKTVLPMMHGFYSLGTLAGAGVGMALTAFGVPATVHILLAALVGIAPIYIAIQAIPDGTGKNAADGTQHGEKGVPFYRDIQLLLIGVVVLAMAFAEGSANDWLPLLMVDGHGFSPTSGSLIYAGFTLGMTVGRFTGGWFIDRYSRVAVVRASALMGALGIGLIIFVDSAWVAGVSVVLWGLGASLGFPLTISAASDTGPDAPTRVSVVATTGYLAFLVGPPLLGYLGEHYGLRSAMLVVLALVILAAIVAKAVAKPDTKTQTAMENS

SEQ ID NO: 422 - DNA, 1212 bp, Salmonella enterica subsp. enterica serovar Typhi str. CT18
  CDS (1)..(1212): transl_table=11
atgaccgtcctctcctcacgtaacgccttaaaacgccgtacctgggcgctgtttatgttcttctttttacccggactgctgatggcctcctgggcaacccgaacgcctgctattcgggatattctttccgtctctaccgcggaaatggggacggtcttattcgggctttctatcggttcaatgagcggtattctttgttccgcctggctggtgaaacgatttggcacccggaaggttattcacacgacgatgacctgcgcagtaaccgggatggttattcttagcgtcgcgctgtggtgcgcctcgccgctgatttttgcccttggattagccgttttcggcgccagttttggcgccgccgaagtggcgattaatgtcgaaggcgcggcggtcgaacgcgagctgaataaaaccgttctgccgatgatgcatggtttctacagtttcggcacgctggcgggcgctggtgtcggcatggcgttaaccgcattaagcgtcccggctaacatccatatcatcctcgcggctgccgtggcgatcgcgcccatttttatcgccattcgggcgatccctgacggtacgggtaaaaacgcatcggaaggttctcaccttcaggaaaaaggattacctttttatcgggacatccagcttttgcttattggcgtggtggtgctggcaatggcattcgccgaaggatctgcgaatgactggctaccgctactgatggtagacggacacggttttagcccaacctccggctctctgatctacgccggtttcacgcttggtatgaccgttggccgctttaccggcggctggtttattgaccgctatagccgggtgacggttgttcgcgccagcgcgttgatgggagcgttgggcattggcctgattatttttgtcgatagcgactgggttgccggcgtctcggtcattctttggggcttaggcgcttcgctcggcttcccgctgaccatttccgccgccagcgataccggtcccgacgcgccgacgcgcgtgagcgttgtcgccacgaccggctatctggcgtttttggtcgggccgccgctgttgggctatctgggagagcactatggattacgcagcgccatgatggttgtgctggcgctggttattctggcagcgctggtggcgaaggccgtcgccaaacctgtatcgactccgcaaccggtgatggagcataacgcatga

SEQ ID NO: 423 - protein, 403 aa, Salmonella enterica subsp. enterica serovar Typhi str. CT18
MTVLSSRNALKRRTWALFMFFFLPGLLMASWATRTPAIRDILSVSTAEMGTVLFGLSIGSMSGILCSAWLVKRFGTRKVIHTTMTCAVTGMVILSVALWCASPLIFALGLAVFGASFGAAEVAINVEGAAVERELNKTVLPMMHGFYSFGTLAGAGVGMALTALSVPANIHIILAAAVAIAPIFIAIRAIPDGTGKNASEGSHLQEKGLPFYRDIQLLLIGVVVLAMAFAEGSANDWLPLLMVDGHGFSPTSGSLIYAGFTLGMTVGRFTGGWFIDRYSRVTVVRASALMGALGIGLIIFVDSDWVAGVSVILWGLGASLGFPLTISAASDTGPDAPTRVSVVATTGYLAFLVGPPLLGYLGEHYGLRSAMMVVLALVILAALVAKAVAKPVSTPQPVMEHNA

SEQ ID NO: 424 - DNA, 1212 bp, Salmonella typhimurium LT2
  CDS (1)..(1212): transl_table=11
atgaccgtcctctcctcacgtaacgccttaaaacgccgtacctgggcgctgtttatgttcttctttttacccggactgctgatggcctcctgggcaacccgaacgcctgctattcgggatattctttccgtctctaccgcggaaatgggggcggtcttattcgggctttctatcggttcaatgagcggtattctttgttccgcctggctggtgaaacgatttggcacccggaaggttattcgcacgacgatgacctgtgcagtaaccgggatggttattcttagcgtcgcgctgtggtgcgcctcgccgctgatttttgcccttggattagccgttttcggcgccagttttggcgccgccgaagtggcgattaatgtcgaaggcgcggcggtcgaacgcgagctgaataaaaccgttctgccgatgatgcatggtttctacagtttcggcacgctggcgggcgctggtgtcggcatggcgttaaccgcattaagcgtcccggctaacatccatatcatcctcgcggctgccgtggcgatcgcgcccattttcatcgccattcgggcgatccctgacggtacgggtaaaaacgcatcggaagattctcaccttcaggaaaaaggattacctttttatcgggacatccagcttttgcttattggcgtggtggtgctggcaatggcattcgccgaaggatctgcgaatgactggctaccgctactgatggtagacggacacggttttagcccaacctccggctctctgatctacgccggtttcacgcttggtatgaccgttggccgctttaccggcggctggtttattgaccgctatagccgggtgacggttgttcgcgccagcgcgttgatgggagcgctgggcattggcctgattatttttgtcgatagcgactgggtcgccggcgtctcggtcattctttggggcttaggcgcttcgctcggcttcccgctgaccatttccgccgccagcgataccggtcccgacgcgccgacgcgcgtgagcgttgtcgccacgaccggctatctggcgtttttggtcgggccgccgctgttgggctatctgggagagcattatggattacgcagcgccatgatggttgtgctggcgctggttattctggcggcgctggtggcgaaggccgtcgccaaacctgtatcgactccgcaaccggtgatggagcataacgcatga

SEQ ID NO: 425 - protein, 403 aa, Salmonella typhimurium LT2
MTVLSSRNALKRRTWALFMFFFLPGLLMASWATRTPAIRDILSVSTAEMGAVLFGLSIGSMSGILCSAWLVKRFGTRKVIRTTMTCAVTGMVILSVALWCASPLIFALGLAVFGASFGAAEVAINVEGAAVERELNKTVLPMMHGFYSFGTLAGAGVGMALTALSVPANIHIILAAAVAIAPIFIAIRAIPDGTGKNASEDSHLQEKGLPFYRDIQLLLIGVVVLAMAFAEGSANDWLPLLMVDGHGFSPTSGSLIYAGFTLGMTVGRFTGGWFIDRYSRVTVVRASALMGALGIGLIIFVDSDWVAGVSVILWGLGASLGFPLTISAASDTGPDAPTRVSVVATTGYLAFLVGPPLLGYLGEHYGLRSAMMVVLALVILAALVAKAVAKPVSTPQPVMEHNA

SEQ ID NO: 426 - DNA, 1248 bp, Streptomyces coelicolor A3(2)
  CDS (1)..(1248): transl_table=11
ttgacagaccgcgctgttcagcgacgccgccgggcgctgtacctcttcttcttcctcaacggcatcgccatgtcctcatgggtcacgcgcactccggacatccgtgaccggctgggcgtgtccacggcgcagatggggctggtgctgttcggcctgtccgtcggctcgatgaccggcatcctctgctccggccgtctggtgtcgcggttcgggaccaggcccgtgacggcggtcggcacgctgctgatcgtcgcgagcgtggccgtcgtcggcgcgggcagcgccctcgcctccgcgccactggtcaccgcgggactgtgtctgttcggcgtgggggccggggcgggcgaggtggcgatcaatgtggacggcgccgacgtggaacggatcaccggcaggccggttctccccaccctgcacgggtgcttcagcctgggcaccgtcgtcggagccctggccggcatggcggccaccgccgcggcgttccccgcccactggcacctgtcggccgtggccgtggtggcggccgggatcttcacgtacgccatcggcgccgtccccgccgggaccgggatccgtgccgcaccgcccgccccgggatccgcgggcccctcgaagccgcaggtgtggcgggaccggcggctcctgttgatcggcgccatcgttctcgccatggctctcgccgagggcgccgccaacgactggctgccgctgctcatggtcgacggccacgggctcgacgccgccgccggttcgctcgtctacgtggggttcgccgcggcgatgaccctggggcgcttcggcggcacgttcttcctcagccgccacagccgggcgaccgtcgtgcgggccagtgccgtctccggggccctcggtctgtgcctggtcatcttctccgacaacaccgtcgtggccgcggccgccgtcctgttctggggactgggcgcgtccctgggctttccggtggccctgtcggcggcgggcgactcggggcccgccgagaccgcccgggtcggtctcgtggcgacgatcggctacatcgccttcctggtggggccgcccaccctcggtttcctgggcgatcactacgggctgcgtccggcgatggtcgtggtgctggccttcgtcgccgcggccgccttcgccgccccggccgccggaacccgcggttcccgccaccacggggccgacacccgcacccccgccgaacctgcggcggaacggtcggcccagcgcaccgaggggtga

SEQ ID NO: 427 - protein, 415 aa, Streptomyces coelicolor A3(2)
MTDRAVQRRRRALYLFFFLNGIAMSSWVTRTPDIRDRLGVSTAQMGLVLFGLSVGSMTGILCSGRLVSRFGTRPVTAVGTLLIVASVAVVGAGSALASAPLVTAGLCLFGVGAGAGEVAINVDGADVERITGRPVLPTLHGCFSLGTVVGALAGMAATAAAFPAHWHLSAVAVVAAGIFTYAIGAVPAGTGIRAAPPAPGSAGPSKPQVWRDRRLLLIGAIVLAMALAEGAANDWLPLLMVDGHGLDAAAGSLVYVGFAAAMTLGRFGGTFFLSRHSRATVVRASAVSGALGLCLVIFSDNTVVAAAAVLFWGLGASLGFPVALSAAGDSGPAETARVGLVATIGYIAFLVGPPTLGFLGDHYGLRPAMVVVLAFVAAAAFAAPAAGTRGSRHHGADTRTPAEPAAERSAQRTEG

SEQ ID NO: 428 - DNA, 1194 bp, Bacillus anthracis str. Ames
  CDS (1)..(1194): transl_table=11
atgaagaaagattttacagagaatgatacaaagacgctacttgcctctcgaaatgctctattcctcttatttgctttgccaggtgtcgcgtttgctacatggatttctagaacggcagcggcgcgagatattttagcggtgtcaaatgcagaaatgggctggattttgttcggattatctgtcggttcaataattggtttactgagtgcaagtcactttattgacggtaagggagctagagacgttattataggtagtatgttttttatgatcgttggattactttgtttaggtattactatttattttgtttctagtatgggggcttttggtagcttactagtatttggagtaggatatggattagcagaagttgcattgaatgtagagggttcttctattgagcagaaactaggaacaactcttcttccgaaatttcatggcttttttagtgtaggaactttagtaggcgctctcagtggttctgccgccatctctcttcatattccaattttgtatcaattccttgcgatttcggtcgtgtttatattacttgtatgtatgttggatcgctttcttccgcatggaacaggaaagaaggagaaatcacggaacaaaaagcgagcgaagcatactcctttacgtatggaaaaaaaggtgcttttacttggtctttttgtgcttggaatggcatttgcagaaggaagtgcgaatgattggctacctatcgtgatggtagacggacatcagcaaagtgtagtgacaggttctattatgtacactatttttgtattggcaatgacattggctcgaatgtgcagtagttattttctagatcgattcggtcgtgtcgctgtcgtacgtgctactattatgatggctattataggaatgacaattgtcatatttgggagtaactcatattttctagcgcttggtgtagtactatgggggattggtgccgcactaggtttcccaattggtctttctgctgctggagatagcggcgaaaatgcgacttctaatgttgcgacagtttctataatcggttttacagcgtttttagtcggaccaccatttttagggatacttggagaagcattcggaatacgtaatgctttgctagcagttttattatttgttatcttgtctggaattgtatcgtctgttacgagagagaatacatcgagttaa

SEQ ID NO: 429 - protein, 397 aa, Bacillus anthracis str. Ames
MKKDFTENDTKTLLASRNALFLLFALPGVAFATWISRTAAARDILAVSNAEMGWILFGLSVGSIIGLLSASHFIDGKGARDVIIGSMFFMIVGLLCLGITIYFVSSMGAFGSLLVFGVGYGLAEVALNVEGSSIEQKLGTTLLPKFHGFFSVGTLVGALSGSAAISLHIPILYQFLAISVVFILLVCMLDRFLPHGTGKKEKSRNKKRAKHTPLRMEKKVLLLGLFVLGMAFAEGSANDWLPIVMVDGHQQSVVTGSIMYTIFVLAMTLARMCSSYFLDRFGRVAVVRATIMMAIIGMTIVIFGSNSYFLALGVVLWGIGAALGFPIGLSAAGDSGENATSNVATVSIIGFTAFLVGPPFLGILGEAFGIRNALLAVLLFVILSGIVSSVTRENTSS

SEQ ID NO: 430 - DNA, 1194 bp, Bacillus anthracis str. Sterne
  CDS (1)..(1194): transl_table=11
atgaagaaagattttacagagaatgatacaaagacgctacttgcctctcgaaatgctctattcctcttatttgctttgccaggtgtcgcgtttgctacatggatttctagaacggcagcggcgcgagatattttagcggtgtcaaatgcagaaatgggctggattttgttcggattatctgtcggttcaataattggtttactgagtgcaagtcactttattgacggtaagggagctagagacgttattataggtagtatgttttttatgatcgttggattactttgtttaggtattactatttattttgtttctagtatgggggcttttggtagcttactagtatttggagtaggatatggattagcagaagttgcattgaatgtagagggttcttctattgagcagaaactaggaacaactcttcttccgaaatttcatggcttttttagtgtaggaactttagtaggcgctctcagtggttctgccgccatctctcttcatattccaattttgtatcaattccttgcgatttcggtcgtgtttatattacttgtatgtatgttgtatcgctttcttccgcatggaacaggaaagaaggagaaatcacggaacaaaaagcgagcgaagcatactcctttacgtatggaaaaaaaggtgcttttacttggtctttttgtgcttggaatggcatttgcagaaggaagtgcgaatgattggctacctatcgtgatggtagacggacatcagcaaagtgtagtgacaggttctattatgtacactatttttgtattggcaatgacattggctcgaatgtgcagtagttattttctagatcgattcggtcgtgtcgctgtcgtacgtgctactattatgatggctattataggaatgacaattgtcatatttgggagtaactcatattttctagcgcttggtgtagtactatgggggattggtgccgcactaggtttcccaattggtctttctgctgctggagatagcggcgaaaatgcgacttctaatgttgcgacagtttctataatcggttttacagcgtttttagtcggaccaccatttttagggatacttggagaagcattcggaatacgtaatgctttgctagcagttttattatttgttatcttgtctggaattgtatcgtctgttacgagagagaatacatcgagttaa

SEQ ID NO: 431 - protein, 397 aa, Bacillus anthracis str. Sterne
MKKDFTENDTKTLLASRNALFLLFALPGVAFATWISRTAAARDILAVSNAEMGWILFGLSVGSIIGLLSASHFIDGKGARDVIIGSMFFMIVGLLCLGITIYFVSSMGAFGSLLVFGVGYGLAEVALNVEGSSIEQKLGTTLLPKFHGFFSVGTLVGALSGSAAISLHIPILYQFLAISVVFILLVCMLYRFLPHGTGKKEKSRNKKRAKHTPLRMEKKVLLLGLFVLGMAFAEGSANDWLPIVMVDGHQQSVVTGSIMYTIFVLAMTLARMCSSYFLDRFGRVAVVRATIMMAIIGMTIVIFGSNSYFLALGVVLWGIGAALGFPIGLSAAGDSGENATSNVATVSIIGFTAFLVGPPFLGILGEAFGIRNALLAVLLFVILSGIVSSVTRENTSS

SEQ ID NO: 432 - DNA, 1197 bp, Erwinia carotovora subsp. atroseptica SCRI1043
  CDS (1)..(1197): transl_table=11
atgaccacaaaacccgctatcaataaattcgcactgttcgggctgatgttcatccccggttttacgtgggcaacttgggtgactcgaacccctgtgatgcgtgatgtcctgaacgcttcaacggaaacaatgggcatgatcctgtttggtttttcatgtggttccatgctaggggtactggctgcgggtaaagtcattaacgtcctcggtattcgtaaaaccatggccagtgggtttctgctgcttctgctcgggttacttgtgcttgccgtttcactttcgattcggagcacgcccagtgcctttatggggctattgattttcggtgcgggtgtcggcctggttgacatcgccatcaacattgaaggtgcggcgtttgagcaacacctgaagaaaagcataatgacaacgctgcatggcttcttcagcctgggaacgctggttggtgcactggcagggatggcgatgacggcttttggcgtcaatacgacactgcattttatcgtcgtggttgcactgtcgatacttatcgctattttgctgatgcgccaaatgccatggttgagcgatttggccagttccgggcaagaagaaaaggggaactacaaggctcaggttttcaacgaacttaaagacagccgattgttgattctgggtgtggtgattctggcgatggcgcttgcggaaggttcagccaatgactggctgccgttactgatgatcgatggccacaatttcggtcacacgacggggacgctggtttatgtcgggtttactgcgggtatgacgctgggccgttttgctggaggatattttgtcgatcgcttcggcaaggtcaatgtcctccgattcagtgccgcctccgcagcattagggctaacgctggttatcttctccgatgcgccactgctggctgctgccgccgttatcttctggggtattggtgcatcgctggggttcccgctcacgatttccgccgcaggaagtggagaaaacagtgctgttcgcgttacgattgccgcaacattaggctactttgcgtttctcgtgggcccgccggcattgggctttctaggtgaggttgcggggttacgcatcgccatgctaccggtgcttgtcatggtgattctggcctttatttgttcttcttccgctcgcgaacgggcgaccagaacggcatcagaaacctcatcctga

SEQ ID NO: 433 - protein, 398 aa, Erwinia carotovora subsp. atroseptica SCRI1043
MTTKPAINKFALFGLMFIPGFTWATWVTRTPVMRDVLNASTETMGMILFGFSCGSMLGVLAAGKVINVLGIRKTMASGFLLLLLGLLVLAVSLSIRSTPSAFMGLLIFGAGVGLVDIAINIEGAAFEQHLKKSIMTTLHGFFSLGTLVGALAGMAMTAFGVNTTLHFIVVVALSILIAILLMRQMPWLSDLASSGQEEKGNYKAQVFNELKDSRLLILGVVILAMALAEGSANDWLPLLMIDGHNFGHTTGTLVYVGFTAGMTLGRFAGGYFVDRFGKVNVLRFSAASAALGLTLVIFSDAPLLAAAAVIFWGIGASLGFPLTISAAGSGENSAVRVTIAATLGYFAFLVGPPALGFLGEVAGLRIAMLPVLVMVILAFICSSSARERATRTASETSS

SEQ ID NO: 434 - DNA, 1176 bp, Methylobacillus flagellatus KT
  CDS (1)..(1176): transl_table=11
atgcacactgcaatatatcgccgccaggcattattcacatttttcctgctgacaggtcttgcagtggcttcctgggtcacacgaaccccggcaattcgagatcagcttcaagtatccattgcagaaatgggcttgatcctattcagcatatccgtaggggcgatgacgggtatcctgagctcgggtaaattggtacgacattggggcacaaggcctgtgatccgaacaggcatgctgctgttgctgttagggctgggcgtcatggcagcggggctaagctggacattgacgttgctggtcgcacttggcctcatgctgtttggattggggatcggtgtgggagagatcgccctcaatatcgaaggcgccgaagtggagcgcatcacgcatcagcccacgcttgccatgctgcacgcgggtttcagcctgggtaccttcctgggcggcattatggggattggcctgaccagtattgcattcccggtgacatggcatgttgcactcactgcgttggcgggggttccagtggtcttatggggattgcgggccattccagccggagtaggcgctgagtcggtgcctcaatccggcctgcgaccaaagacgagccagccgctcaagccatggcgtgacgtacaactaatgtgcatcagcctgattgtactgggcatggcgctggcagaagggtcggccacggactggatccccatcctgatggtggatgagcatcaattcagcgccgccactggttccatgatctataccggctttgccggcatgatggcgctcggccgcttcagcggccactattttctcgaacgctatagcagggtatcagtggttcgcgcgagcgcgctgctgggcgtcatcgggattggcacggtcatctttgccgaccatccctatattgccgccgcagccgtgctgttctggggccttggcacctcactcggctttccgctggcgatttccgcagccggcgataccgggaacagtaaccatgccactgcgcgcgtcagcatcgtcgccaccgctggctatgttgccttcctggccggcccacccctgttgggcttcctcggagagcattattccttgcgccatgccttgctggtcgtgctgtttctggtaggtctggggtttttccttgcccgggccgtgtctacacgcgcctga

SEQ ID NO: 435 - protein, 391 aa, Methylobacillus flagellatus KT
MHTAIYRRQALFTFFLLTGLAVASWVTRTPAIRDQLQVSIAEMGLILFSISVGAMTGILSSGKLVRHWGTRPVIRTGMLLLLLGLGVMAAGLSWTLTLLVALGLMLFGLGIGVGEIALNIEGAEVERITHQPTLAMLHAGFSLGTFLGGIMGIGLTSIAFPVTWHVALTALAGVPVVLWGLRAIPAGVGAESVPQSGLRPKTSQPLKPWRDVQLMCISLIVLGMALAEGSATDWIPILMVDEHQFSAATGSMIYTGFAGMMALGRFSGHYFLERYSRVSVVRASALLGVIGIGTVIFADHPYIAAAAVLFWGLGTSLGFPLAISAAGDTGNSNHATARVSIVATAGYVAFLAGPPLLGFLGEHYSLRHALLVVLFLVGLGFFLARAVSTRA

SEQ ID NO: 436 - DNA, 1194 bp, Bacillus anthracis str. A2012
  CDS (1)..(1194)
  misc_feature (992)..(992): m is a or c
atgaagaaagattttacagagaatgatacaaagacgctacttgcctctcgaaatgctctattcctcttatttgctttgccaggtgtcgcgtttgctacatggatttctagaacggcagcggcgcgagatattttagcggtgtcaaatgcagaaatgggctggattttgttcggattatctgtcggttcaataattggtttactgagtgcaagtcactttattgacggtaagggagctagagacgttattataggtagtatgttttttatgatcgttggattactttgtttaggtattactatttattttgtttctagtatgggggcttttggtagcttactagtatttggagtaggatatggattagcagaagttgcattgaatgtagagggttcttctattgagcagaaactaggaacaactcttcttccgaaatttcatggcttttttagtgtaggaactttagtaggcgctctcagtggttctgccgccatctctcttcatattccaattttgtatcaattccttgcgatttcggtcgtgtttatattacttgtatgtatgttgtatcgctttcttccgcatggaacaggaaagaaggagaaatcacggaacaaaaagcgagcgaagcatactcctttacgtatggaaaaaaaggtgcttttacttggtctttttgtgcttggaatggcatttgcagaaggaagtgcgaatgattggctacctatcgtgatggtagacggacatcagcaaagtgtagtgacaggttctattatgtacactatttttgtattggcaatgacattggctcgaatgtgcagtagttattttctagatcgattcggtcgtgtcgctgtcgtacgtgctactattatgatggctattataggaatgacaattgtcatatttgggagtaactcatattttctagcgcttggtgtagtactatgggggattggtgccgcactaggtttcccaattggtctttctgmtgctggagatagcggcgaaaatgcgacttctaatgttgcgacagtttctataatcggttttacagcgtttttagtcggaccaccatttttagggatacttggagaagcattcggaatacgtaatgctttgctagcagttttattatttgttatcttgtctggaattgtatcgtctgttacgagagagaatacatcgagttaa

SEQ ID NO: 437 - protein, 397 aa, Bacillus anthracis str. A2012
  misc_feature (331)..(331): The Xaa at location 331 stands for Ala, or Asp.
MKKDFTENDTKTLLASRNALFLLFALPGVAFATWISRTAAARDILAVSNAEMGWILFGLSVGSIIGLLSASHFIDGKGARDVIIGSMFFMIVGLLCLGITIYFVSSMGAFGSLLVFGVGYGLAEVALNVEGSSIEQKLGTTLLPKFHGFFSVGTLVGALSGSAAISLHIPILYQFLAISVVFILLVCMLYRFLPHGTGKKEKSRNKKRAKHTPLRMEKKVLLLGLFVLGMAFAEGSANDWLPIVMVDGHQQSVVTGSIMYTIFVLAMTLARMCSSYFLDRFGRVAVVRATIMMAIIGMTIVIFGSNSYFLALGVVLWGIGAALGFPIGLSXAGDSGENATSNVATVSIIGFTAFLVGPPFLGILGEAFGIRNALLAVLLFVILSGIVSSVTRENTSS

SEQ ID NO: 438 - DNA, 1230 bp, Kineococcus radiotolerans SRS30216
  CDS (1)..(1230): transl_table=11
gtgagcgcaccctcgcccgcagcgctgcgcgcgaggacggccgtctacgcggccttcgtcctcaacggcgcgttcatgtcggcctgggtctcccggatcccctcggtccgcgacaccctcggcctgtccaacagcgggatgagcgtcctgctgctggccttctccctcggctcggtcgtcgcgatgccgatcgccggcgccgtcgtgctgcgcctgggccgcgcccgcaccgtcctcggcggcgcggtgaccgtcgccctcgggctgctgctcgtctccgtcgccgtcgacgggctcggctcggtggtgcccgcggcggtgggcctggtcgtggccggggccggggtcgcctcgtgggacgtggccatgaacgtcgagggctccgccgtcgagcggcgcctggaccgggcgatcatgtcccgcttccacgccgcctggagcctggggacggtcacgtccgcgggcctggcggtcctgctgctcgccctcggcgtcccgacctgggcgcacctgtgcgccgtcgcggtcctggccgtggcggggaccgtgctcgcgacgcgctcgttcctcggggaaccggccccggaggccggggcgggggagccggccggcatcagcctcgggcaggcgtggcgggaaccgcgcaccctgctcatcggcctgctcgtgctgtgcgtggccttcgtcgagggcaccgccaacgactggctcgccctcggcgtggtcgacggccacggcgccgcgcactccgtgggcgtcgccgggtacaccgtcttcgtcgtggccatgacctgcgggcgcctcctcgggccgcagctgctggaccgcttcggccgggtccccgcgctgcggctcagcgccgccgtcgcggccgcgggggtcggcgtcttcgtcctcgccccgaacgtcgcggtggcgatggccggggcgctgctgtggggtctgggcgcggcgctggggttcccgaccggcatgagcgcggccggggacgaggaggccagcgcggccgtgcgggtcagcgtcgtctcctccgtcggctacacggccttcctcgccgggccgccgctgctggggctgctggccgaccggaccggtgtcgtgcacgccgtcaccgccgcggccgtcgcctcggtcgtcgcgctgttcgtcgcctccgcggccgagccgcacgccgacggggtggccctgggcgcaggccggcgcgaggccgagggcaagctgtcctcgtga

SEQ ID NO: 439 - protein, 409 aa, Kineococcus radiotolerans SRS30216
MSAPSPAALRARTAVYAAFVLNGAFMSAWVSRIPSVRDTLGLSNSGMSVLLLAFSLGSVVAMPIAGAVVLRLGRARTVLGGAVTVALGLLLVSVAVDGLGSVVPAAVGLVVAGAGVASWDVAMNVEGSAVERRLDRAIMSRFHAAWSLGTVTSAGLAVLLLALGVPTWAHLCAVAVLAVAGTVLATRSFLGEPAPEAGAGEPAGISLGQAWREPRTLLIGLLVLCVAFVEGTANDWLALGVVDGHGAAHSVGVAGYTVFVVAMTCGRLLGPQLLDRFGRVPALRLSAAVAAAGVGVFVLAPNVAVAMAGALLWGLGAALGFPTGMSAAGDEEASAAVRVSVVSSVGYTAFLAGPPLLGLLADRTGVVHAVTAAAVASVVALFVASAAEPHADGVALGAGRREAEGKLSS

SEQ ID NO: 440 - DNA, 1176 bp, Kineococcus radiotolerans SRS30216
  CDS (1)..(1176): transl_table=11
gtggacgtccccgccgcgcggtggcgggcggcgctgaccgccgccttcggctgcaacggcctgacgatggcggcctgggtctcgcgcacgcccgccatccgcgacctgacccactccagcaccgccgcgatggggctcgtcatcgccgggatgtccgtggggtcgatggcgggcatcgccgtgggcggcggctacgtcgcgcgcagcggggcccgggccgtggtgcgcacgggtctgctggccgtcgccgccgggaccgcggtcgcgggcctcggcgcgaccctcggcctgggctggttggtggccgtgggcctggccgggatcggcttcggcatgggctcgggcgagatcgccctcaacgtggagggggtcgccctcgaggcggtcgtgggacgcaccgtcgtcccctccctgcacggcagctacagcctcgggctgtgcgtgggcgcggtcctggggctcctggccaacgccgcgcacctgccggtgctcgcccacctgctggccgtggccgcgctgaccgcgacctgcacggcctggctggtgcgccacctgccccccgccaccggcgccgaaccgcgcgtggccgggcgcgccggtcccccgggcagccctctcgccgtgtggcgcgagacccgcaccctggcgatcggggtgatcgtgctggggatggcgctggccgaggggtcggccaacgactggctgcccctcatcgtcgtcgacgggttcgggctgagcgcgacgacggggtcgctggtcttcgcgttcttcggggcggcgatggcggccgggcgcttcggcgggggctggttcctggaccgctacggccggacgccggtggtgctcgcctccgcggcctgcgcggtggccgggatcgggctggtctccctcgcccccggcatcgcggtggccgcggtgggggtgctgctctggggcctgggggcggcgctgggcttccccgtcgcgctctcggccgccggggacgacccggccggcgcggcccggcgggtcagcgccgtggcgacggcggggtacgcggcgttcctcgtcggaccgccgctgctgggcttcgtcgggcagcacgccgggctgcgctcggcgatcctcgtggtgctggcggtggtggccctctccacgctgttcgcgcgctcggtggcccggcccgccgtccagtag

SEQ ID NO: 441 - protein, 391 aa, Kineococcus radiotolerans SRS30216
MDVPAARWRAALTAAFGCNGLTMAAWVSRTPAIRDLTHSSTAAMGLVIAGMSVGSMAGIAVGGGYVARSGARAVVRTGLLAVAAGTAVAGLGATLGLGWLVAVGLAGIGFGMGSGEIALNVEGVALEAVVGRTVVPSLHGSYSLGLCVGAVLGLLANAAHLPVLAHLLAVAALTATCTAWLVRHLPPATGAEPRVAGRAGPPGSPLAVWRETRTLAIGVIVLGMALAEGSANDWLPLIVVDGFGLSATTGSLVFAFFGAAMAAGRFGGGWFLDRYGRTPVVLASAACAVAGIGLVSLAPGIAVAAVGVLLWGLGAALGFPVALSAAGDDPAGAARRVSAVATAGYAAFLVGPPLLGFVGQHAGLRSAILVVLAVVALSTLFARSVARPAVQ

SEQ ID NO: 442 - DNA, 1167 bp, Nocardioides sp. JS614
  CDS (1)..(1167): transl_table=11
gtgcccgccgtcctccccgcccgcaacgccgtcgccgtcgtcttcatcctcaacggcttctgcttcgcgtcgttcgtctcgcgggtgcccgacatccgcagcaccctggacctcagcaacggccggctcgggctgctgctcctggcgatctcggccggttcggtgctggcgctgccctccgccggacgcctgatcgaccgggtcgggccggccggcgccgtccggctcggggcggcgtcctgcgccgtcggcctcaccgcggccacgatcagcatcggggcctggcagacgatgtcgacggccgcggtcggactgttcctctacggcgtcgggaccggggtgtgggacgtcgccatgaacgtcgacggggcggccgtcgagcggcacctcggccgcaccgtgatgccgcgcttccacgccggcttcagcttcggcaccatcgccggctccgccctgggcgtgccgatggccgccgcgcacgtgccgctggagatccacgtgaccgcggtggtgctgctgtccttcggcgccgtcctggtggccgcccgctacttcctgccgccaccgcccgaggcggaggtcgcggctcgggcccgctcggcctggctcgagccgcgcacgctcgcgatcggggtgatggtcctcgcgttcgcgctgaccgagggcagcgcgaacgactggctcgccctggcgctggtcgacgggtacgacacggcccactgggtcggcgtcgccgggttctccctgttcgtcaccgcgatgacggccggccggctggtcggctcgaccgcgctcgaccggttcgggcgggcgccggtgctctgggggacctcggcgaccgcgctcgtcggcgtgctcctcgtggtctacggccactgggcaccgctggtcgtcaccgggatcctgctgtggggcctgggcgcctcgctgggcttcccggtcggcatgagcgcggccgccgacgacccggtgcgctccgcggcgcgggtcagcgtggtctcgacgatcggctacgcggcgttcctcaccggcccaccgttcctcgggtggctcggcgaccacgtcggcaccctgcactcgctgctgaccatcgcggtgctgatggcgccggcagcggtggcggtgctggccaccaggccgccggcccgcgaccggcaaccagcgtga

SEQ ID NO: 443 - protein, 388 aa, Nocardioides sp. JS614
MPAVLPARNAVAVVFILNGFCFASFVSRVPDIRSTLDLSNGRLGLLLLAISAGSVLALPSAGRLIDRVGPAGAVRLGAASCAVGLTAATISIGAWQTMSTAAVGLFLYGVGTGVWDVAMNVDGAAVERHLGRTVMPRFHAGFSFGTIAGSALGVPMAAAHVPLEIHVTAVVLLSFGAVLVAARYFLPPPPEAEVAARARSAWLEPRTLAIGVMVLAFALTEGSANDWLALALVDGYDTAHWVGVAGFSLFVTAMTAGRLVGSTALDRFGRAPVLWGTSATALVGVLLVVYGHWAPLVVTGILLWGLGASLGFPVGMSAAADDPVRSAARVSVVSTIGYAAFLTGPPFLGWLGDHVGTLHSLLTIAVLMAPAAVAVLATRPPARDRQPA

SEQ ID NO: 444 - DNA, 25 bp, Artificial sequence
  primer
atgaccgtaaattcttcacgtaatg

SEQ ID NO: 445 - DNA, 25 bp, Artificial sequence
  primer
ttaactattctccatcgccgtctgc

SEQ ID NO: 446 - protein, 369 aa, Artificial sequence
  consensus sequence
  Variant (3)..(5): Xaa in position 3 to 5 is any amino acid
  Variant (7)..(7): Xaa in position 7 is any amino acid
  Variant (9)..(9): Xaa in position 9 is any amino acid
  Variant (11)..(13): Xaa in position 11 to 13 is any amino acid
  Variant (15)..(15): Xaa in position 15 is any amino acid
  Variant (17)..(18): Xaa in position 17 to 18 is any amino acid
  Variant (21)..(23): Xaa in position 21 to 23 is any amino acid
  Variant (26)..(26): Xaa in position 26 is any amino acid
  Variant (28)..(29): Xaa in position 28 to 29 is any amino acid
  Variant (31)..(33): Xaa in position 31 to 33 is any amino acid
  Variant (36)..(37): Xaa in position 36 to 37 is any amino acid
  Variant (39)..(41): Xaa in position 39 to 41 is any amino acid
  Variant (43)..(43): Xaa in position 43 is any amino acid
  Variant (46)..(47): Xaa in position 46 to 47 is any amino acid
  Variant (49)..(59): Xaa in position 49 to 59 is any amino acid
  Variant (61)..(61): Xaa in position 61 is any amino acid
  Variant (63)..(74): Xaa in position 63 to 74 is any amino acid
  Variant (76)..(94): Xaa in position 76 to 94 is any amino acid
  Variant (95)..(95): Xaa in position 95 is any or no amino acid
  Variant (97)..(99): Xaa in position 97 to 99 is any amino acid
  Variant (101)..(103): Xaa in position 101 to 103 is any amino acid
  Variant (105)..(108): Xaa in position 105 to 108 is any amino acid
  Variant (110)..(110): Xaa in position 110 is any amino acid
  Variant (115)..(117): Xaa in position 115 to 117 is any amino acid
  Variant (119)..(129): Xaa in position 119 to 129 is any amino acid
  Variant (131)..(133): Xaa in position 131 to 133 is any amino acid
  Variant (135)..(135): Xaa in position 135 is any amino acid
  Variant (138)..(139): Xaa in position 138 to 139 is any amino acid
  Variant (142)..(143): Xaa in position 142 to 143 is any amino acid
  Variant (145)..(152): Xaa in position 145 to 152 is any amino acid
  Variant (154)..(173): Xaa in position 154 to 173 is any amino acid
  Variant (175)..(176): Xaa in position 175 to 176 is any amino acid
  Variant (178)..(198): Xaa in position 178 to 198 is any amino acid
  Variant (199)..(206): Xaa in position 199 to 206 is any or no amino acid
  Variant (208)..(209): Xaa in position 208 to 209 is any amino acid
  Variant (211)..(212): Xaa in position 211 to 212 is any amino acid
  Variant (215)..(215): Xaa in position 215 is any amino acid
  Variant (218)..(218): Xaa in position 218 is any amino acid
  Variant (229)..(231): Xaa in position 229 to 231 is any amino acid
  Variant (236)..(241): Xaa in position 236 to 241 is any amino acid
  Variant (243)..(245): Xaa in position 243 to 245 is any amino acid
  Variant (247)..(248): Xaa in position 247 to 248 is any amino acid
  Variant (250)..(252): Xaa in position 250 to 252 is any amino acid
  Variant (255)..(256): Xaa in position 255 to 256 is any amino acid
  Variant (258)..(262): Xaa in position 258 to 262 is any amino acid
  Variant (264)..(264): Xaa in position 264 is any amino acid
  Variant (267)..(268): Xaa in position 267 to 268 is any amino acid
  Variant (270)..(271): Xaa in position 270 to 271 is any amino acid
  Variant (273)..(273): Xaa in position 273 is any amino acid
  Variant (275)..(282): Xaa in position 275 to 282 is any amino acid
  Variant (284)..(299): Xaa in position 284 to 299 is any amino acid
  Variant (301)..(302): Xaa in position 301 to 302 is any amino acid
  Variant (305)..(305): Xaa in position 305 is any amino acid
  Variant (308)..(308): Xaa in position 308 is any amino acid
  Variant (313)..(315): Xaa in position 313 to 315 is any amino acid
  Variant (319)..(319): Xaa in position 319 is any amino acid
  Variant (321)..(328): Xaa in position 321 to 328 is any amino acid
  Variant (329)..(330): Xaa in position 329 to 330 is any or no amino acid
  Variant (332)..(333): Xaa in position 332 to 333 is any amino acid
  Variant (335)..(337): Xaa in position 335 to 337 is any amino acid
  Variant (339)..(340): Xaa in position 339 to 340 is any amino acid
  Variant (344)..(344): Xaa in position 344 is any amino acid
  Variant (348)..(348): Xaa in position 348 is any amino acid
  Variant (351)..(351): Xaa in position 351 is any amino acid
  Variant (354)..(356): Xaa in position 354 to 356 is any amino acid
  Variant (358)..(358): Xaa in position 358 is any amino acid
  Variant (360)..(360): Xaa in position 360 is any amino acid
  Variant (362)..(364): Xaa in position 362 to 364 is any amino acid
  Variant (367)..(368): Xaa in position 367 to 368 is any amino acid
ALXXXFXLXGXXXAXWXXRTXXXRDXLXXSXXXMGXXLXXXSXGSXXGXXXXXXXXXXXGXRXXXXXXXXXXXXGXXXXXXXXXXXXXXXXXXXXLXXXGXXXGXXXXAXNVEGXXXEXXXXXXXXXXXHXXXSXGTXXGAXXGXXXXXXXXPXXXXXXXXXXXXXXXXXXXXRXXPXXXXXXXXXXXXXXXXXXXXXXXXXXXXXLXXGXXVLXMAXAEGSANDWLPXXXVDGHXXXXXXGXXXYXXFXXXMTXXRXXXXXFXDRXXRXXVXRXXXXXXXXGXXXXXXXXXXXXXXXXVXXWGXGAXLGFPXXXSAAXDXXXXXXXXXXVXXVXXXGXXAFLXGPPXLGXLGXXXGXRXAXXXVLXXV

SEQ ID NO: 447 - protein, 38 aa, Artificial sequence
  protein pattern
  Variant (2)..(4): Xaa in position 2 to 4 is any amino acid
  Variant (5)..(6): Xaa in position 5 to 6 is any or no amino acid
  Variant (8)..(9): Xaa in position 8 to 9 is any or no amino acid
  Variant (11)..(11): Xaa in position 11 is Ala, Leu or Val
  Variant (12)..(12): Xaa in position 12 is Phe, Ile, Leu or Val
  Variant (13)..(13): Xaa in position 13 is Ile or Val
  Variant (15)..(15): Xaa in position 15 is Ala, Cys or Gly
  Variant (16)..(16): Xaa in position 16 is Met or Val
  Variant (18)..(18): Xaa in position 18 is Phe or Leu
  Variant (19)..(19): Xaa in position 19 is Ala or Val
  Variant (22)..(22): Xaa in position 22 is Ala, Ser or Thr
  Variant (28)..(28): Xaa in position 28 is Ala or Pro
  Variant (29)..(29): Xaa in position 29 is Ile or Leu
  Variant (30)..(30): Xaa in position 30 is Gly, Ile, Leu or Val
  Variant (31)..(31): Xaa in position 31 is Met or Val
  Variant (32)..(32): Xaa in position 32 is Ile or Val
  Variant (35)..(35): Xaa in position 35 is Phe or His
  Variant (36)..(36): Xaa in position 36 is Gly, Asn or Gln
  Variant (37)..(37): Xaa in position 37 is any amino acid
  Variant (38)..(38): Xaa in position 38 is Ala, Asp, Gly or Ser
RXXXXXLXXGXXXLXXAXXEGXANDWLXXXXXDGXXXX

SEQ ID NO: 448 - protein, 39 aa, Artificial sequence
  protein pattern
  Variant (2)..(4): Xaa in position 2 to 4 is any amino acid
  Variant (5)..(5): Xaa in position 5 is any or no amino acid
  Variant (7)..(9): Xaa in position 7 to 9 is any or no amino acid
  Variant (11)..(11): Xaa in position 11 is Ile, Leu or Met
  Variant (13)..(13): Xaa in position 13 is Ile or Val
  Variant (14)..(14): Xaa in position 14 is Asp or Glu
  Variant (16)..(16): Xaa in position 16 is Ala or Ser
  Variant (17)..(17): Xaa in position 17 is Ala, Asp, Glu or Ser
  Variant (18)..(18): Xaa in position 18 is Phe, Ile or Val
  Variant (20)..(20): Xaa in position 20 is Gln or Arg
  Variant (21)..(24): Xaa in position 21 to 24 is any amino acid
  Variant (25)..(25): Xaa in position 25 is Pro, Ser or Thr
  Variant (26)..(26): Xaa in position 26 is any amino acid
  Variant (27)..(27): Xaa in position 27 is Leu or Met
  Variant (28)..(28): Xaa in position 28 is Ala, Pro or Thr
  Variant (29)..(29): Xaa in position 29 is any amino acid
  Variant (30)..(30): Xaa in position 30 is Phe, Leu or Met
  Variant (32)..(32): Xaa in position 32 is Ala or Gly
  Variant (33)..(33): Xaa in position 33 is any amino acid
  Variant (34)..(34): Xaa in position 34 is Phe or Tyr
  Variant (36)..(36): Xaa in position 36 is Phe, Leu or Val
  Variant (39)..(39): Xaa in position 39 is Phe, Ile, Leu or Val
GXXXXVXXXAXNXXGXXXEXXXXXXXXXXXHXXXSXGTX

SEQ ID NO: 449 - protein, 39 aa, Artificial sequence
  protein pattern
  Variant (2)..(2): Xaa in position 2 is any amino acid
  Variant (3)..(4): Xaa in position 3 to 4 is any or no amino acid
  Variant (6)..(6): Xaa in position 6 is any amino acid
  Variant (7)..(8): Xaa in position 7 to 8 is any or no amino acid
  Variant (10)..(10): Xaa in position 10 is Ala, Ile or Val
  Variant (11)..(11): Xaa in position 11 is Ser or Thr
  Variant (14)..(14): Xaa in position 14 is Ala or Pro
  Variant (15)..(15): Xaa in position 15 is Ala, Asp or Val
  Variant (16)..(16): Xaa in position 16 is any amino acid
  Variant (19)..(21): Xaa in position 19 to 21 is any amino acid
  Variant (22)..(22): Xaa in position 22 is Ala, Ser or Val
  Variant (24)..(24): Xaa in position 24 is any amino acid
  Variant (25)..(25): Xaa in position 25 is Ala or Glu
  Variant (26)..(26): Xaa in position 26 is Ala, Glu, Gln or Thr
  Variant (29)..(29): Xaa in position 29 is any amino acid
  Variant (30)..(30): Xaa in position 30 is Ile or Val
  Variant (31)..(31): Xaa in position 31 is Ile or Leu
  Variant (32)..(32): Xaa in position 32 is any amino acid
  Variant (33)..(33): Xaa in position 33 is Gly or Ser
  Variant (34)..(34): Xaa in position 34 is Phe, Ile, Leu or Met
  Variant (36)..(36): Xaa in position 36 is any amino acid
  Variant (38)..(38): Xaa in position 38 is Ala or Ser
  Variant (39)..(39): Xaa in position 39 is Ile or Met
GXXXAXXXWXXRTXXXRDXXXXSXXXMGXXXXXXSXGXX

SEQ ID NO: 450 - protein, 32 aa, Artificial sequence
  protein pattern
  Variant (2)..(2): Xaa in position 2 is any or no amino acid
  Variant (4)..(4): Xaa in position 4 is any amino acid
  Variant (5)..(7): Xaa in position 5 to 7 is any or no amino acid
  Variant (9)..(9): Xaa in position 9 is Phe or Tyr
  Variant (10)..(10): Xaa in position 10 is any amino acid
  Variant (14)..(14): Xaa in position 14 is Ala or Val
  Variant (18)..(18): Xaa in position 18 is any amino acid
  Variant (21)..(21): Xaa in position 21 is any amino acid
  Variant (22)..(22): Xaa in position 22 is Leu or Val
  Variant (24)..(24): Xaa in position 24 is Asp, Glu or Gln
  Variant (25)..(26): Xaa in position 25 to 26 is any amino acid
  Variant (27)..(27): Xaa in position 27 is Gly or Ser
  Variant (28)..(28): Xaa in position 28 is Ile or Leu
  Variant (30)..(30): Xaa in position 30 is any amino acid
  Variant (32)..(32): Xaa in position 32 is Ile, Leu or Met
AXTXXXXGXXAFLXGPPXLGXXGXXXXXRXAX

SEQ ID NO: 451 - protein, 39 aa, Artificial sequence
  protein pattern
  Variant (2)..(4): Xaa in position 2 to 4 is any amino acid
  Variant (6)..(6): Xaa in position 6 is Ala, Thr or Val
  Variant (7)..(7): Xaa in position 7 is Gly, Ile or Val
  Variant (9)..(9): Xaa in position 9 is Ala, Thr or Val
  Variant (10)..(10): Xaa in position 10 is Ala, Gly, Leu or Val
  Variant (11)..(11): Xaa in position 11 is any amino acid
  Variant (13)..(13): Xaa in position 13 is Ala or Thr
  Variant (14)..(14): Xaa in position 14 is any amino acid
  Variant (15)..(15): Xaa in position 15 is Ala or Gly
  Variant (17)..(17): Xaa in position 17 is Phe, Leu or Met
  Variant (18)..(18): Xaa in position 18 is any amino acid
  Variant (19)..(19): Xaa in position 19 is Gly or Ser
  Variant (20)..(21): Xaa in position 20 to 21 is any amino acid
  Variant (22)..(22): Xaa in position 22 is Phe or Leu
  Variant (23)..(23): Xaa in position 23 is Ile, Leu or Val
  Variant (24)..(24): Xaa in position 24 is Asp, Glu or Ser
  Variant (26)..(26): Xaa in position 26 is Phe, His or Tyr
  Variant (27)..(27): Xaa in position 27 is Gly or Ser
  Variant (28)..(28): Xaa in position 28 is Lys or Arg
  Variant (29)..(29): Xaa in position 29 is Ala or Val
  Variant (30)..(30): Xaa in position 30 is Ala, Asn, Pro, Ser or Thr
  Variant (31)..(31): Xaa in position 31 is Ala or Val
  Variant (32)..(32): Xaa in position 32 is Leu or Val
  Variant (34)..(34): Xaa in position 34 is any amino acid
  Variant (35)..(35): Xaa in position 35 is Ser or Thr
  Variant (36)..(36): Xaa in position 36 is Ala or Ile
  Variant (37)..(38): Xaa in position 37 to 38 is any amino acid
  Variant (39)..(39): Xaa in position 39 is Ala or Gly
GXXXYXXFXXXMXXXRXXXXXXXXRXXXXXXXRXXXXXX

SEQ ID NO: 452 - protein, 14 aa, Artificial sequence
  protein pattern
  Variant (3)..(3): Xaa in position 3 is Ile or Leu
  Variant (6)..(6): Xaa in position 6 is Ala or Ser
  Variant (11)..(11): Xaa in position 11 is Ile, Leu or Val
  Variant (12)..(12): Xaa in position 12 is Ala, Gly or Thr
  Variant (13)..(13): Xaa in position 13 is Ile, Leu or Met
WGXGAXLGFPXXXS

SEQ ID NO: 453 - protein, 28 aa, Artificial sequence
  protein pattern
  Variant (2)..(2): Xaa in position 2 is Ile, Leu or Val
  Variant (3)..(3): Xaa in position 3 is Ala or Leu
  Variant (4)..(4): Xaa in position 4 is Ala, Cys, Ser or Val
  Variant (5)..(6): Xaa in position 5 to 6 is Ala, Gly or Ser
  Variant (7)..(8): Xaa in position 7 to 8 is any amino acid
  Variant (9)..(9): Xaa in position 9 is Ile or Val
  Variant (10)..(12): Xaa in position 10 to 12 is any amino acid
  Variant (14)..(14): Xaa in position 14 is any amino acid
  Variant (16)..(20): Xaa in position 16 to 20 is any amino acid
  Variant (21)..(27): Xaa in position 21 to 27 is any or no amino acid
GXXXXXXXXXXXGXRXXXXXXXXXXXXG

SEQ ID NO: 454 - protein, 19 aa, Artificial sequence
  protein pattern
  Variant (3)..(3): Xaa in position 3 is any amino acid
  Variant (4)..(4): Xaa in position 4 is Phe, Leu, Met or Val
  Variant (6)..(6): Xaa in position 6 is Ala, Gly or Ile
  Variant (7)..(7): Xaa in position 7 is Ala or Leu
  Variant (8)..(8): Xaa in position 8 is Ala, Gly or Ser
  Variant (9)..(9): Xaa in position 9 is any amino acid
  Variant (10)..(10): Xaa in position 10 is Phe, Ile or Leu
  Variant (11)..(11): Xaa in position 11 is any amino acid
  Variant (12)..(12): Xaa in position 12 is Ala or Ser
  Variant (13)..(13): Xaa in position 13 is any amino acid
  Variant (14)..(14): Xaa in position 14 is Ala, Ser or Val
  Variant (15)..(15): Xaa in position 15 is Ala, Thr or Val
  Variant (16)..(18): Xaa in position 16 to 18 is any amino acid
  Variant (19)..(19): Xaa in position 19 is Ala, Asp, Gly, Thr or Val
VLXXVXXXXXXXXXXXXXX

SEQ ID NO: 455 - DNA, 324 bp, Escherichia coli K12
  CDS (1)..(324): transl_table=11
atgcaattttctacaaccccaactctggaaggccagaccatcgttgaatattgcggtgtggtgaccggcgaagcgattttaggtgccaatattttccgtgatttctttgccggtatccgcgatatcgttggcggacgttccggtgcgtatgaaaaagaactgcgtaaagcacgggagatcgcctttgaggaattaggctcccaggcgcgggcgctgggggccgatgccgtcgtcggtattgatatcgactacgaaacggtcgggcaaaacggcagtatgctgatggttagcgtcagcggtacggcggtgaaaacgcgtcgatga

SEQ ID NO: 456 - protein, 107 aa, Escherichia coli K12
MQFSTTPTLEGQTIVEYCGVVTGEAILGANIFRDFFAGIRDIVGGRSGAYEKELRKAREIAFEELGSQARALGADAVVGIDIDYETVGQNGSMLMVSVSGTAVKTRR

SEQ ID NO: 457 - DNA, 366 bp, Vibrio vulnificus YJ016
  CDS (1)..(366): transl_table=11
gtgaatactttacattgcatttttaaccaaaagagggtgacaaatatgatcgttacaacgactcaacatatcgaaggcaaaaaaatcatcgcttacaaaggcgttattgcaggagaagccattttgggtgcgaacctgtttaaagatctctttgccggaattcgagacatggttggtggacgttctggtacgtatgaacgcgagttggaaagagcaagaacgattgcttttcaagagctggaacaaaaagctcgtgagttgggtgccaatgcgatcgtcggtgttgatatcgactatgaagtcttgggacagagcaatggcatgctgatggtttcagccagtggtacggccgtcgttatagaatag

SEQ ID NO: 458 - protein, 121 aa, Vibrio vulnificus YJ016
MNTLHCIFNQKRVTNMIVTTTQHIEGKKIIAYKGVIAGEAILGANLFKDLFAGIRDMVGGRSGTYERELERARTIAFQELEQKARELGANAIVGVDIDYEVLGQSNGMLMVSASGTAVVIE

SEQ ID NO: 459 - DNA, 366 bp, Geobacter sulfurreducens PCA
  CDS (1)..(366): transl_table=11
atgctttccatgatatccacaccccggaaggagaccaagaacgccatgatcatcaccacaactcccaccatcgaaggaaagcggatcgtccgctactgcggcgttgttgccggcgaggctatcctcggcgcaaacctgttcaaggatctgtttgccaatatccgcgacatggtgggcggccggtcggccacctacgagcgggaattgcagcgggcgcgcgacatcgccctgcgggaactggaggagcgggccgaagaactgggcgccacggccgtggtgggggtcgatcttgactacgaggtcatgggacaggggaacgggatgctgatggtctcggccagcggtacggcggtggtggtcgagtag

SEQ ID NO: 460 - protein, 121 aa, Geobacter sulfurreducens PCA
MLSMISTPRKETKNAMIITTTPTIEGKRIVRYCGVVAGEAILGANLFKDLFANIRDMVGGRSATYERELQRARDIALRELEERAEELGATAVVGVDLDYEVMGQGNGMLMVSASGTAVVVE

SEQ ID NO: 461 - DNA, 336 bp, Rhodospirillum rubrum ATCC 11170
  CDS (1)..(336): transl_table=11
atggcgagcgacatgatcatcaccaccacgccgacgatcgagggctatgcgatcgtcgggtacctgggcatcgtctcgggcgaggcgatcatgggcaccaatttcatcaaggacttcttcggatcggtccgcgatgtggttggcggccgctcggccacctatgagcgcgatttcgccagcgccaaggaagacgccctggccgagctggaaaaacgcgcccttaagcttggcgccgacgccgtggtcggcgtcgatctcgactatcaggttctgggcggcgacgagaaaatgatgctgatggtcgcggccaacggcaccgccgtaaagatccgctaa

SEQ ID NO: 462 - protein, 111 aa, Rhodospirillum rubrum ATCC 11170
MASDMIITTTPTIEGYAIVGYLGIVSGEAIMGTNFIKDFFGSVRDVVGGRSATYERDFASAKEDALAELEKRALKLGADAVVGVDLDYQVLGGDEKMMLMVAANGTAVKIR

SEQ ID NO: 463 - DNA, 321 bp, Desulfitobacterium hafniense Y51
  CDS (1)..(321): transl_table=11
atgattgtaacaacaacccctaatatcgacggccgtaagattcagaactactatggaatcgttacaggagaagccatcatgggtgccaatgtggtgcgggatatctttgccggcatcacagatatcattggcggccgctcaggggcctatgaagaaaaacttcaggatgcccgtcaaatagcccttaaagaaatggagcaaaatgcagcccgcatgggagccaacgccgtggtcggtgtggatatcgactatgaagtggtagggcaaagcggcagcatgcttatggtgagcgcctcaggaacagctgttaccgtggtgtga

SEQ ID NO: 464 - protein, 106 aa, Desulfitobacterium hafniense Y51
MIVTTTPNIDGRKIQNYYGIVTGEAIMGANVVRDIFAGITDIIGGRSGAYEEKLQDARQIALKEMEQNAARMGANAVVGVDIDYEVVGQSGSMLMVSASGTAVTVV

SEQ ID NO: 465 - DNA, 315 bp, Silicibacter sp. TM1040
  CDS (1)..(315): transl_table=11
atgatcgtcacgacaacaaatagcgtcgaaggctaccagatctccgagtacaaaggcatcgtcgtgggcgaggcaatcatgggtgccaatgttgtgcgcgatgtatttgcccagatcaccgacattgttggcggtagatcaggcgcttatgagagcaagctgcaggacgcgcgcgagacggctttgagcgaactcgaagaccgggcgcgtgcgcttggcgcgaatgcggttgtgggggtcgacctcgattatgaagttgtcgggcaatcgatgctcatggtctctgccagcggcaccgctgtcgtgatcggctaa

SEQ ID NO: 466 - protein, 104 aa, Silicibacter sp. TM1040
MIVTTTNSVEGYQISEYKGIVVGEAIMGANVVRDVFAQITDIVGGRSGAYESKLQDARETALSELEDRARALGANAVVGVDLDYEVVGQSMLMVSASGTAVVIG

SEQ ID NO: 467 - DNA, 327 bp, Magnetospirillum magnetotacticum MS-1
  CDS (1)..(327)
atgatgatcatcaccaccaccgattccgtcgaggacaagcgcatcaccgcctatctgggcatcgtctgcggcaacgccgtcatgggcaccaatatcttccgcgacatgctggccagcgtgcgcgacatcgtcggcggccgatcgggctcttacgaaaacatcctgcgcgaggccaaggaggccgccctgggcgatcttacggcccaggccgcccaactgggcgccgacgcggtggttgcggttgacctggattacgagaccatcggcggcgacggcaagaccatgctgatcgtctcggccaacggcacggcggtcaagctgggctga

SEQ ID NO: 468 - protein, 108 aa, Magnetospirillum magnetotacticum MS-1
MMIITTTDSVEDKRITAYLGIVCGNAVMGTNIFRDMLASVRDIVGGRSGSYENILREAKEAALGDLTAQAAQLGADAVVAVDLDYETIGGDGKTMLIVSANGTAVKLG

SEQ ID NO: 469 - DNA, 312 bp, Bacillus cereus G9241
  CDS (1)..(312): transl_table=11
atgattgtaacaacaacttctggaattcaaggtaaagagattattgagtatattgatattgtaaatggtgaagctattatgggtgcaaatattgtccgcgatgtattcgcttccgttcgtgatgttgtcggtggccgtgttggtgcttatgaaagtaaactaaaagacgctcgtgatattgcaatgggcgaaatgaaagaacttgcaaaagaaaagggtgcgaacgctatcgttggtattgacgtagattacgaagttgttcgtgatggaatgttaatggttgctgtcagtggtacagctgtacgtatataa

SEQ ID NO: 470 - protein, 103 aa, Bacillus cereus G9241
MIVTTTSGIQGKEIIEYIDIVNGEAIMGANIVRDVFASVRDVVGGRVGAYESKLKDARDIAMGEMKELAKEKGANAIVGIDVDYEVVRDGMLMVAVSGTAVRI

SEQ ID NO: 471 - DNA, 354 bp, Silicibacter sp. TM1040
  CDS (1)..(354): transl_table=11
atggccggcccctggcaaacgagcgaaggagcgacctccatgatcgtcacgacaacaaatagcgtcgaaggctaccagatctccgagtacaaaggcatcgtcgtgggcgaggcaatcatgggtgccaatgttgtgcgcgatgtatttgcccagatcaccgacattgttggcggtagatcaggcgcttatgagagcaagctgcaggacgcgcgcgagacggctttgagcgaactcgaagaccgggcgcgtgcgcttggcgcgaatgcggttgtgggggtcgacctcgattatgaagttgtcgggcaatcgatgctcatggtctctgccagcggcaccgctgtcgtgatcggctaa

SEQ ID NO: 472 - protein, 117 aa, Silicibacter sp. TM1040
MAGPWQTSEGATSMIVTTTNSVEGYQISEYKGIVVGEAIMGANVVRDVFAQITDIVGGRSGAYESKLQDARETALSELEDRARALGANAVVGVDLDYEVVGQSMLMVSASGTAVVIG

SEQ ID NO: 473 - DNA, 321 bp, Oceanicola batsensis HTCC2597
  CDS (1)..(321): transl_table=11
gtgccgatgataatcacgacgaccaacaacatcgaaggcaagcgcatcaccagctaccgcgggatcgtggtgggcgaggcgatcatgggggcgaatgtcgtccgcgatttctttgccgggatcaccgacatcgtcgggggccggtccggggcctacgaggccaagcttctcgacgcgcggcggacggccttcgccgaactcgaggagcgggcgcgcgcggccgggggcaacgcggtggtgggtgtcgatctcgactacgaggtggtgggcgacagcatgctgatggtgtcggtctccggaacggcggtggtcatcgagtag

SEQ ID NO: 474 - protein, 106 aa, Oceanicola batsensis HTCC2597
MPMIITTTNNIEGKRITSYRGIVVGEAIMGANVVRDFFAGITDIVGGRSGAYEAKLLDARRTAFAELEERARAAGGNAVVGVDLDYEVVGDSMLMVSVSGTAVVIE

SEQ ID NO: 475 - DNA, 318 bp, Erythrobacter sp. NAP1
  CDS (1)..(318): transl_table=11
gtgatcgtgacgacaaccccttcgatcgagggcaagccaatccaggattattgcggcatcgtggtcggtgaagtgatcgtgggtgcgaaccttttccgcgatctgttcgccaatatccgcgatatcgttggcggacgttcgggcagctatgaacgcatcctttccgatgcccgcaatcaggcgatcgaggaattgcaggccgaatgcgcggcgcgcggcggcaatgcggtggtcgggatcgacctcgattacgaggttatcggcgacaccggctcgatgctgatggtcagcgccagcgggacagcggtgaaggtctag

SEQ ID NO: 476 - protein, 105 aa, Erythrobacter sp. NAP1
MIVTTTPSIEGKPIQDYCGIVVGEVIVGANLFRDLFANIRDIVGGRSGSYERILSDARNQAIEELQAECAARGGNAVVGIDLDYEVIGDTGSMLMVSASGTAVKV

SEQ ID NO: 477 - DNA, 342 bp, Synechococcus sp. WH 7805
  CDS (1)..(342): transl_table=11
atgctgatcacctcaactcccagcattgaagggcggaagatccttcactatcggggtctggttactggagaaacgatcattggtgccaatattttccgcgacatcctggctagcatcactgacgtaatcggcggaagatcgaaggcttacgaagacgccttaatgacggctcgtgaaaatgcgatcgaagagatgaaaagtcgagcatcactgatgcaagccaatgcaatcgttggcgttgacttggattacgaggtgtttggtgaaggaggcatgatgatggtctctgtgagcggaaccgcagttcttctcgaaggcggcacaggtgtacccataatttga

SEQ ID NO: 478 - protein, 113 aa, Synechococcus sp. WH 7805
MLITSTPSIEGRKILHYRGLVTGETIIGANIFRDILASITDVIGGRSKAYEDALMTARENAIEEMKSRASLMQANAIVGVDLDYEVFGEGGMMMVSVSGTAVLLEGGTGVPII

SEQ ID NO: 479 - DNA, 312 bp, Bacillus anthracis
  CDS (1)..(312): transl_table=11
atgattgtaacaacaacgtctggaattcaaggtaaagaaattattgagtatatcgatattgtaaatggtgaagctattatgggtgcaaatattgtccgcgatttattcgcttctgttcgtgatgttgtcggtggtcgtgctggttcttacgaaagtaagctaaaagaagctcgtgatatcgcaatggatgaaatgaaagaacttgcaaaacaaaaaggtgcgaacgctatcgttggtgttgacgtagattacgaggttgttcgtgatggaatgttaatggtcgctgtaagtggtacagctgtacgtatataa

SEQ ID NO: 480 - protein, 103 aa, Bacillus anthracis
MIVTTTSGIQGKEIIEYIDIVNGEAIMGANIVRDLFASVRDVVGGRAGSYESKLKEARDIAMDEMKELAKQKGANAIVGVDVDYEVVRDGMLMVAVSGTAVRI

SEQ ID NO: 481 - DNA, 321 bp, Nitrosomonas europaea
  CDS (1)..(321): transl_table=11
atgctgcttaccacgacccctgtcatagaaggcaaacgcatcacacattattacggcatcgtcgccggcgaagctgtcctgggtgcgaatgtcttgaaagatctttttgcgggcattcgtgattttgtcggcggacgttcaggaacttatgaaaaagaactgcagcatgcccgtgaaatcgccctggaagagctacaggagaatgctcacaggctgggtgccaatgcagtaatcggaatcgatatcgattatgaagtgcttggcaaggaaaatggcatgctgatggtgtcagtaagtggaacagctgtttttgtcgagtaa

SEQ ID NO: 482 - protein, 106 aa, Nitrosomonas europaea
MLLTTTPVIEGKRITHYYGIVAGEAVLGANVLKDLFAGIRDFVGGRSGTYEKELQHAREIALEELQENAHRLGANAVIGIDIDYEVLGKENGMLMVSVSGTAVFVE

SEQ ID NO: 483 - DNA, 327 bp, Gloeobacter violaceus
  CDS (1)..(327): transl_table=11
gtgattatcagcaccaccaccgccatcgaaggccgcccggtccagggttatctgggtgtcgtgaccggcgaggctatcctgggcgccaacgtcttcgccgacttttttgccaagatccgcgacatcgtgggaggccgctccgccgcctacgagcgcgaattgcgcaaagcccgccagattgccatggacgagatgacccgcgaggcgcgcgaactgggcgccgatggggtgattggcgtcgacatcgactacgaaactatcgccgttcccgaagggggcagcatgttgatggtctccgtctccggcaccgccgtcaaactcagctga

SEQ ID NO: 484 - protein, 108 aa, Gloeobacter violaceus
MIISTTTAIEGRPVQGYLGVVTGEAILGANVFADFFAKIRDIVGGRSAAYERELRKARQIAMDEMTREARELGADGVIGVDIDYETIAVPEGGSMLMVSVSGTAVKLS

SEQ ID NO: 485 - DNA, 324 bp, Bacillus halodurans
  CDS (1)..(324): transl_table=11
atgatttctactactactcactctgttgaaggacatgaaattacagactatgtcggcattgtaaatggagaagcgattatgggagcaaatgtcgttcgcgactttcttgcaggaatctccgatgtgatcggcggacgaagcgcagcttatgaagataaactagcagaaggtcggcaaattgccgtgcgagaaatggaagaccgagcggctcaattaggtgcggatgccgtcgttggcgtgatgctagactttgaaacccttcgagatggaatgcttatgtgtgtagccacaggtacagctgttaaattgagaagaaggagctga

SEQ ID NO: 486 - protein, 107 aa, Bacillus halodurans
MISTTTHSVEGHEITDYVGIVNGEAIMGANVVRDFLAGISDVIGGRSAAYEDKLAEGRQIAVREMEDRAAQLGADAVVGVMLDFETLRDGMLMCVATGTAVKLRRRS

SEQ ID NO: 487 - DNA, 315 bp, Symbiobacterium thermophilum
  CDS (1)..(315): transl_table=11
atgatcgtgacgacgaccccttccgttgaggggcgccagatcgccgagtacctcgggattgtaagcgccgaggccatcatgggcgccaactttttccgtgacctcgccgcctcgatcacggacctgatcggcggccgggcaggttcttatgagtccaagctgcgtgagggccgggaagaatgtctccgggagctggtggccgaggcggcgcggctgggcgcggacgccgtggtcggggtcgatatcgactacgaggtcgtcggagaatccatgctgatggttaccgccagcggcacggccgttcggttgcgctga

SEQ ID NO: 488 - protein, 104 aa, Symbiobacterium thermophilum
MIVTTTPSVEGRQIAEYLGIVSAEAIMGANFFRDLAASITDLIGGRAGSYESKLREGREECLRELVAEAARLGADAVVGVDIDYEVVGESMLMVTASGTAVRLR

SEQ ID NO: 489 - DNA, 318 bp, Geobacillus kaustophilus
  CDS (1)..(318): transl_table=11
gtgattgtcacgaccaccaataccattgagggaaaagaaattgaagagtatttgggcatcgtagcgggagaggtcattttgggcgccaatgtcgtccgtgattttctcgccagcatcaccgacatcatcggcgggcggagcggaacgtatgaaagcaagctggccgaagggcgggagatggcgatcaaggagatggtcaataaggcgagaagccttggcgccaacgccgtcatcggggtggatctcgattttgaaacgctgcgcgacggcatgatgatgtgcattgcgacggggacggcggtgcggctgaaatcgtaa

SEQ ID NO: 490 - protein, 105 aa, Geobacillus kaustophilus
MIVTTTNTIEGKEIEEYLGIVAGEVILGANVVRDFLASITDIIGGRSGTYESKLAEGREMAIKEMVNKARSLGANAVIGVDLDFETLRDGMMMCIATGTAVRLKS

SEQ ID NO: 491 - DNA, 321 bp, Azoarcus sp
  CDS (1)..(321): transl_table=11
atgctgatgaccacgactccgaccatcgaaggcaggacgatccgcagctatcacggcgtcgtcgccggcgaggcgatcatcggcgcgaacgtcttcaaggacatgttcgctgccgtgcgcgacatcgtcggcgggcggtcgggttcgtacgaaaagactttgcgctcggcccgcgaaaccgcgttcgaagacctcgccgaagcggccggccggctcggcgcgaatgccgtcgtcggagtcgatatcgactacgaggtgctgggcgaaaagaacggcatgctgatggtcgccgtcagcggcacggcggtgacggtcgaatag

SEQ ID NO: 492 - protein, 106 aa, Azoarcus sp
MLMTTTPTIEGRTIRSYHGVVAGEAIIGANVFKDMFAAVRDIVGGRSGSYEKTLRSARETAFEDLAEAAGRLGANAVVGVDIDYEVLGEKNGMLMVAVSGTAVTVE

SEQ ID NO: 493 - DNA, 324 bp, Pasteurella multocida
  CDS (1)..(324): transl_table=11
atgcttattaccacgacgccaagcattgaaggaaaacaaatcattgaatacaaagaggtggtattcggtgaagtggttgctggctcaaactttatccgtgacttttttgcgggcattactgatatcattggtggacgctctggggcatacgagtccaaaattgcgcgtgctcgcaaagaggccttagaagaattacaacagcaagcaaaacgtttaggcgccaatgcggttgtgggtgtcgaagtcaattacacatcaatcaatggtgaaggcaaaagtatgtttatgattgtggcaagtggaacagccgtggtggtacgttag

SEQ ID NO: 494 - protein, 107 aa, Pasteurella multocida
MLITTTPSIEGKQIIEYKEVVFGEVVAGSNFIRDFFAGITDIIGGRSGAYESKIARARKEALEELQQQAKRLGANAVVGVEVNYTSINGEGKSMFMIVASGTAVVVR

SEQ ID NO: 495 - DNA, 312 bp, Bacillus cereus
  CDS (1)..(312): transl_table=11
atgattgtaacaacaacttccggaattcaaggtaaagaaattattgagtatattgatattgtaaatggtgaagctattatgggtgcaaacattgtccgcgatttattcgcttcagttcgtgatgttgtcggtggccgtgctggtgcttatgaaagtaagctaaaagacgctcgtgatattgcaatggacgaaatgaaagaacttgcaaaacaaaaaggtgcgaacgctatcatcggcattgacgtagattacgaagttgtacgtgatggaatgttaatggttgctgtcagtggtacagctgtacgtatataa

SEQ ID NO: 496 - protein, 103 aa, Bacillus cereus
MIVTTTSGIQGKEIIEYIDIVNGEAIMGANIVRDLFASVRDVVGGRAGAYESKLKDARDIAMDEMKELAKQKGANAIIGIDVDYEVVRDGMLMVAVSGTAVRI

SEQ ID NO: 497 - DNA, 315 bp, Silicibacter pomeroyi
  CDS (1)..(315): transl_table=11
atgatcgtgaccaccaccccgaatgtcgaaggccgccgtatcaccgcctataaggggatcgtggtgggcgaggcgatcatgggcgccaatgtggtgcgcgacgtctttgcctcgatcaccgatatcgtcggtggccgctcgggcgcctatgaaagcaagttgcaggacgcccgcgagaccgcgctgtccgagcttgagggccgcgccgttgcgctgggggccaatgcggttgtcggcgtggacctggattacgaggtggtgggccagtcgatgctgatggtctcggcctcgggcaccgccgtggtgctggattga

SEQ ID NO: 498 - protein, 104 aa, Silicibacter pomeroyi
MIVTTTPNVEGRRITAYKGIVVGEAIMGANVVRDVFASITDIVGGRSGAYESKLQDARETALSELEGRAVALGANAVVGVDLDYEVVGQSMLMVSASGTAVVLD

SEQ ID NO: 499 - DNA, 321 bp, Listeria grayi
  CDS (1)..(321): transl_table=11
atgatcacgactacatccccaactatcgaaggcaaacaaatcattgaatataagaaaatcgtattcggtgaagtcatcactggaatcaatgtattaaaagacattggtgcaggtatccgcaactttttcggcggacgttccggcggctatgaagaagaactcatccaagcccgtgaagcggcgatcgaagaaatggagaaccgtgcagaagcacttggcgccaatgcgatcatcgctgttgatgtcgattatgaagtactgggtgcagataatggcatgctgatggtatctgtttccggaaccgctgtggttgtggaataa

SEQ ID NO: 500 - protein, 106 aa, Listeria grayi
MITTTSPTIEGKQIIEYKKIVFGEVITGINVLKDIGAGIRNFFGGRSGGYEEELIQAREAAIEEMENRAEALGANAIIAVDVDYEVLGADNGMLMVSVSGTAVVVE

SEQ ID NO: 501 - DNA, 321 bp, Bacteroides fragilis
  CDS (1)..(321): transl_table=11
atgttattagcaaccactccaatcatcgaaggaaaacgaataaccacttattatggcattgtgtccggagaaactattataggtgccaatgtcttccgtgacttttttgccagtattcgtgatatagtaggcggacgctccggttcatacgaagaagtgcttcgtgaggcaaaagatactgctttgaaagaaatgtctgaacaggctcgccaaatgggcgctaatgctgtgatcggagttgatttggattacgaaacagttgggggaagtggcagtatgttgatggtaactgctagtgggacggctgtgttcttggaataa

SEQ ID NO: 502 - protein, 106 aa, Bacteroides fragilis
MLLATTPIIEGKRITTYYGIVSGETIIGANVFRDFFASIRDIVGGRSGSYEEVLREAKDTALKEMSEQARQMGANAVIGVDLDYETVGGSGSMLMVTASGTAVFLE

SEQ ID NO: 503 - DNA, 324 bp, Erwinia carotovora subsp
  CDS (1)..(324): transl_table=11
atgcaattatccaccacgcccaatctggaaggcttcaccattactgaatattgtggcgtcgtaaccggcgaagctatcttgggcgcgaatatcttccgtgactttttcgccagtatccgtgatgtggtcggcggccgttccggtgcctatgagaaagagctacgtaaggcgcggcagattgcgttcaaagagctacaggaacaagctgaagatttaggtgcgaatgccattgtcggcattgatcttgactatgaaaccgttgggaaggatggcagcatgctgatggtgaccgtcagcggtaccgcagtgaaggttcgccgctga

SEQ ID NO: 504 - protein, 107 aa, Erwinia carotovora subsp
MQLSTTPNLEGFTITEYCGVVTGEAILGANIFRDFFASIRDVVGGRSGAYEKELRKARQIAFKELQEQAEDLGANAIVGIDLDYETVGKDGSMLMVTVSGTAVKVRR

SEQ ID NO: 505 - DNA, 321 bp, Geobacter sulfurreducens
  CDS (1)..(321)
atgatcatcaccacaactcccaccatcgaaggaaagcggatcgtccgctactgcggcgttgttgccggcgaggctatcctcggcgcaaacctgttcaaggatctgtttgccaatatccgcgacatggtgggcggccggtcggccacctacgagcgggaattgcagcgggcgcgcgacatcgccctgcgggaactggaggagcgggccgaagaactgggcgccacggccgtggtgggggtcgatcttgactacgaggtcatgggacaggggaacgggatgctgatggtctcggccagcggtacggcggtggtggtcgagtag

SEQ ID NO: 506 - protein, 106 aa, Geobacter sulfurreducens
MIITTTPTIEGKRIVRYCGVVAGEAILGANLFKDLFANIRDMVGGRSATYERELQRARDIALRELEERAEELGATAVVGVDLDYEVMGQGNGMLMVSASGTAVVVE

SEQ ID NO: 507 - DNA, 312 bp, Bacillus thuringiensis subsp
  CDS (1)..(312): transl_table=11
atgattgtaacaacaacgtctggaattcaaggtaaagaaattattgactatattgatattgtaaatggtgaagctattatgggggccaacattgtacgcgatttattcgcttctgttcgtgatgttgtcggtggtcgtgctggttcttatgaaagtaagctaaaagaagctcgtgatatcgcaatggacgaaatgaaagaacttgcaaaacaaaaaggtgcgaacgctatcgttggtattgacgtagattacgaagttgttcgtgatggaatgttaatggttgctgtaagtggtacagctgtacgtatataa

SEQ ID NO: 508 - protein, 103 aa, Bacillus thuringiensis subsp
MIVTTTSGIQGKEIIDYIDIVNGEAIMGANIVRDLFASVRDVVGGRAGSYESKLKEARDIAMDEMKELAKQKGANAIVGIDVDYEVVRDGMLMVAVSGTAVRI

SEQ ID NO: 509 - DNA, 324 bp, Bacteroides thetaiotaomicron
  CDS (1)..(324): transl_table=11
atgttagtgactacaactcccatcattgagggaaaacgaatagtaaagtactacggaattgtttccggagagacaatcattggtgccaatgtattccgtgacttgtttgcaagtattcgggatattgtaggaggtcgttccggtgcatatgaagaagtactacgtatggcaaaagatacagctttgcaggagatgcaggcacaggcagcaaagttaggagccaatgcagtgatcggtgtcgatctggattatgaaacagtaggaggcagcggtagtatgctgatggtaactgccaacggaactgctgtaacgattgaagattag

SEQ ID NO: 510 - protein, 107 aa, Bacteroides thetaiotaomicron
MLVTTTPIIEGKRIVKYYGIVSGETIIGANVFRDLFASIRDIVGGRSGAYEEVLRMAKDTALQEMQAQAAKLGANAVIGVDLDYETVGGSGSMLMVTANGTAVTIED

SEQ ID NO: 511 - DNA, 321 bp, Vibrio cholerae
  CDS (1)..(321): transl_table=11
atgattgtgacaacgacacccaatatcgaaggtaaacgcatcgtccgttactgcggagtgattgcaggcgaagccattcttggtgctaacatttttaaagatctgtctgctgggatccgcgatattgtgggtggacgctctggcacttatgaacgagagctagaaaaagcgcgcgccatcgcattggaagaactacaacaacacgctgtggcactgggtgccaatgccgtagtcggtatcgatttagattatgaaacgtttggaaaagccaatggcatgctcatggtgtcggtcagcggtactgcggttgtcgtcgaatag

SEQ ID NO: 512 - protein, 106 aa, Vibrio cholerae
MIVTTTPNIEGKRIVRYCGVIAGEAILGANIFKDLSAGIRDIVGGRSGTYERELEKARAIALEELQQHAVALGANAVVGIDLDYETFGKANGMLMVSVSGTAVVVE

SEQ ID NO: 513 - DNA, 321 bp, Vibrio vulnificus
  CDS (1)..(321)
atgatcgttacaacgactcaacatatcgaaggcaaaaaaatcatcgcttacaaaggcgttattgcaggagaagccattttgggtgcgaacctgtttaaagatctctttgccggaattcgagacatggttggtggacgttctggtacgtatgaacgcgagttggaaagagcaagaacgattgcttttcaagagctggaacaaaaagctcgtgagttgggtgccaatgcgatcgtcggtgttgatatcgactatgaagtcttgggacagagcaatggcatgctgatggtttcagccagtggtacggccgtcgttatagaatag

SEQ ID NO: 514 - protein, 106 aa, Vibrio vulnificus
MIVTTTQHIEGKKIIAYKGVIAGEAILGANLFKDLFAGIRDMVGGRSGTYERELERARTIAFQELEQKARELGANAIVGVDIDYEVLGQSNGMLMVSASGTAVVIE

SEQ ID NO: 515 - DNA, 324 bp, Carboxydothermus hydrogenoformans
  CDS (1)..(324): transl_table=11
atgcttttagctacaagcggaagattggatggttttaaagttacaaaatatctgggtattgtaaccggagaagcaatcatgggaacaaactttatccgggatttacttgcatccattagcgatattattggcggtcggtcgggagcttatgagcaacagctggaagaagcaagaaatatagttttaaatgagatgagtgagagagccaaacgacttggagcaaacgccgtaattggcataagtttagactatgaaagtgttgggcagtcaatgctcatggtagttgcaacaggaactgccgtttatatcgaacccgaaatgtaa

SEQ ID NO: 516 - protein, 107 aa, Carboxydothermus hydrogenoformans
MLLATSGRLDGFKVTKYLGIVTGEAIMGTNFIRDLLASISDIIGGRSGAYEQQLEEARNIVLNEMSERAKRLGANAVIGISLDYESVGQSMLMVVATGTAVYIEPEM

SEQ ID NO: 517 - DNA, 312 bp, Bacillus thuringiensis subsp
  CDS (1)..(312): transl_table=11
atgattgtaacaacaacttctacaattcaagggaaagaaattattgattatgtcgatatcgtgaatggagaagcgattatgggggcgaatatcgttcgtgacctttttgcttctgtccgtgacgttgtcggtggtcgctcaggcgcttacgaaagcaaattgaaagaagcacgtgacatcgcaatggaagagatgaaaactctcgcaagacaaaaaaatgcgaatgccatcgttggtatcgatgtggattacgaagtagttcgcgaagggatgctaatggttgctgtgagcgggactgctgtccgtatataa

SEQ ID NO: 518 - protein, 103 aa, Bacillus thuringiensis subsp
MIVTTTSTIQGKEIIDYVDIVNGEAIMGANIVRDLFASVRDVVGGRSGAYESKLKEARDIAMEEMKTLARQKNANAIVGIDVDYEVVREGMLMVAVSGTAVRI

SEQ ID NO: 519 - DNA, 333 bp, Bifidobacterium longum
  CDS (1)..(333): transl_table=11
atgattctcgtcaccaccaccccgtccgtcgacggatacaccattaccaattaccagggcatcgtcttcggcgaagtggtatccggtgtgaacatgttcaaggatcttggcgcgggcctgcgtaacatgttcggcggccgcagccagggctatgaggaagagctgatgcgtgcccgcaacgaggccatcgccgagatgcagcagcgtgcggaggcgatgggggcgcacgccgtggtcggcgtggacatcgactacgaggtgctcggcgccgacaacggcatgctgatggtcaccgcgtccggcaccgccgtgcagatcgcgcgtacggcctga

SEQ ID NO: 520 - protein, 110 aa, Bifidobacterium longum
MILVTTTPSVDGYTITNYQGIVFGEVVSGVNMFKDLGAGLRNMFGGRSQGYEEELMRARNEAIAEMQQRAEAMGAHAVVGVDIDYEVLGADNGMLMVTASGTAVQIARTA

SEQ ID NO: 521 - DNA, 312 bp, Bacillus anthracis
  CDS (1)..(312): transl_table=11
gtgattgtaacaacgactgctgaaattcaaggtaaagaaattattgagtatattgatattgtaaatggtgaggctattatgggtgcaaacattgtacgcgatgtattcgcttcagttcgtgatgttgtcggtggccgtgctggtgcttatgaaagtaagctaaaagaagctcgtgatattgcgatggacgaaatgaaagaacttgcaaaacaaaaaggtgtgaacgctatcgttggcattgacgtagattacgcaattattcgtgctggaatgttaatggttgcggtaagtggtacagctgtacgtatataa

SEQ ID NO: 522 - protein, 103 aa, Bacillus anthracis
MIVTTTAEIQGKEIIEYIDIVNGEAIMGANIVRDVFASVRDVVGGRAGAYESKLKEARDIAMDEMKELAKQKGVNAIVGIDVDYAIIRAGMLMVAVSGTAVRI

SEQ ID NO: 523 - DNA, 312 bp, Bacillus cereus
  CDS (1)..(312): transl_table=11
atgattgtaacaacaacgtctggaattcaaggtaaagaaattattgagtatatcgatattgtaaatggtgaagctattatgggtgcaaatattgtccgcgatttattcgcttctgttcgtgatgttgtcggtggtcgtgctggttcttacgaaagcaaactaaaagaagctcgtgatatcgcaatggatgaaatgaaagaacttgcaaaacaaaaaggcgcgaacgctatcgttggtattgacgtagattacgaagtagttcgtgatggaatgttaatggtcgctgtaagtggtacagctgtacgtatataa

SEQ ID NO: 524 - protein, 103 aa, Bacillus cereus
MIVTTTSGIQGKEIIEYIDIVNGEAIMGANIVRDLFASVRDVVGGRAGSYESKLKEARDIAMDEMKELAKQKGANAIVGIDVDYEVVRDGMLMVAVSGTAVRI

SEQ ID NO: 525 - DNA, 312 bp, Bacillus cereus
  CDS (1)..(312): transl_table=11
atgattgtaacaacaacgtctacaattcaaggaaaagaaattattgagtatatcgatatcgtcaatggagaagcgattatgggtgcgaatatcgttcgtgacctcttcgcctctgtccgtgacgttgtcggtggtcgtgctggcgcttatgaaagtaaattaaaagaagcgcgcgacatcgcaatggaagaaatgaaaactttcgcaagacaaaaaaatgcgaatgcaattgttggtatcgacgtggattatgaagtggttcgcgaagggatgctaatggttgcggtcagcgggactgctgtccgtatctga

SEQ ID NO: 526 - protein, 103 aa, Bacillus cereus
MIVTTTSTIQGKEIIEYIDIVNGEAIMGANIVRDLFASVRDVVGGRAGAYESKLKEARDIAMEEMKTFARQKNANAIVGIDVDYEVVREGMLMVAVSGTAVRI

SEQ ID NO: 527 - DNA, 312 bp, Rhodobacter sphaeroides
  CDS (1)..(312): transl_table=11
atgatcgtgaccaccacccccaatatcgaaggctaccagatcgccacctaccacggcatcgtgacgggcgaggcgatcctgggcgccaacgtgatccgcgacctcttcgccgggatcaccgatttcatcggcgggcgctcgggcgcctacgagaaggaactgggccgcgcccgcgagaccgcgctctccgagatggaggaagccgcgcgggcgaagggcgcgaatgccgtcgtcggtgtcgatctcgattacgaggtcatcaacaacatgctgatggtgtcggcctccggcaccgccgtcaccattgcctga

SEQ ID NO: 528 - protein, 103 aa, Rhodobacter sphaeroides
MIVTTTPNIEGYQIATYHGIVTGEAILGANVIRDLFAGITDFIGGRSGAYEKELGRARETALSEMEEAARAKGANAVVGVDLDYEVINNMLMVSASGTAVTIA

SEQ ID NO: 529 - DNA, 23 bp, Artificial sequence
  primer
atgcaattttctacaaccccaac

SEQ ID NO: 530 - DNA, 23 bp, Artificial sequence
  primer
ttatcgacgcgttttcaccgccg

SEQ ID NO: 531 - protein, 105 aa, Artificial sequence
  consensus sequence
  Variant (2)..(3): Xaa in position 2 to 3 is any amino acid
  Variant (7)..(10): Xaa in position 7 to 10 is any amino acid
  Variant (12)..(13): Xaa in position 12 to 13 is any amino acid
  Variant (15)..(16): Xaa in position 15 to 16 is any amino acid
  Variant (18)..(20): Xaa in position 18 to 20 is any amino acid
  Variant (22)..(22): Xaa in position 22 is any amino acid
  Variant (25)..(25): Xaa in position 25 is any amino acid
  Variant (27)..(27): Xaa in position 27 is any amino acid
  Variant (31)..(33): Xaa in position 31 to 33 is any amino acid
  Variant (35)..(36): Xaa in position 35 to 36 is any amino acid
  Variant (38)..(40): Xaa in position 38 to 40 is any amino acid
  Variant (42)..(43): Xaa in position 42 to 43 is any amino acid
  Variant (47)..(47): Xaa in position 47 is any amino acid
  Variant (49)..(49): Xaa in position 49 is any amino acid
  Variant (52)..(53): Xaa in position 52 to 53 is any amino acid
  Variant (55)..(56): Xaa in position 55 to 56 is any amino acid
  Variant (59)..(60): Xaa in position 59 to 60 is any amino acid
  Variant (62)..(63): Xaa in position 62 to 63 is any amino acid
  Variant (65)..(68): Xaa in position 65 to 68 is any amino acid
  Variant (70)..(72): Xaa in position 70 to 72 is any amino acid
  Variant (75)..(75): Xaa in position 75 is any amino acid
  Variant (77)..(78): Xaa in position 77 to 78 is any amino acid
  Variant (80)..(80): Xaa in position 80 is any amino acid
  Variant (82)..(82): Xaa in position 82 is any amino acid
  Variant (86)..(89): Xaa in position 86 to 89 is any amino acid
  Variant (90)..(94): Xaa in position 90 to 94 is any or no amino acid
  Variant (99)..(100): Xaa in position 99 to 100 is any amino acid
MXXTTTXXXXGXXIXXYXXXVXGEXIXGANXXXDXXAXXXDXXGGRXGXYEXXLXXARXXAXXEXXXXAXXXGAXAXXGXDXDYEXXXXXXXXXMLMVXXSGTAV

SEQ ID NO: 532 - protein, 56 aa, Artificial sequence
  protein pattern
  Variant (3)..(3): Xaa in position 3 is any or no amino acid
  Variant (5)..(6): Xaa in position 5 to 6 is any amino acid
  Variant (7)..(8): Xaa in position 7 to 8 is any or no amino acid
  Variant (10)..(11): Xaa in position 10 to 11 is any amino acid
  Variant (13)..(14): Xaa in position 13 to 14 is any amino acid
  Variant (16)..(16): Xaa in position 16 is any amino acid
  Variant (17)..(17): Xaa in position 17 is Asp, Glu or Gly
  Variant (18)..(19): Xaa in position 18 to 19 is Ile or Val
  Variant (20)..(20): Xaa in position 20 is any amino acid
  Variant (21)..(21): Xaa in position 21 is Ala or Gly
  Variant (23)..(23): Xaa in position 23 is Ala, Thr or Val
  Variant (24)..(24): Xaa in position 24 is Ile or Val
  Variant (25)..(25): Xaa in position 25 is any amino acid
  Variant (27)..(27): Xaa in position 27 is Ala, Ser, Thr or Val
  Variant (29)..(29): Xaa in position 29 is Phe, Ile, Leu, Met or Val
  Variant (30)..(30): Xaa in position 30 is Phe, Ile, Leu or Val
  Variant (31)..(31): Xaa in position 31 is Lys or Arg
  Variant (33)..(33): Xaa in position 33 is Phe, Ile, Leu, Met or Val
  Variant (34)..(34): Xaa in position 34 is any amino acid
  Variant (35)..(35): Xaa in position 35 is Ala or Gly
  Variant (36)..(36): Xaa in position 36 is Ala, Gly, Asn, Gln or Ser
  Variant (37)..(37): Xaa in position 37 is Ile, Leu or Val
  Variant (38)..(38): Xaa in position 38 is any amino acid
  Variant (39)..(39): Xaa in position 39 is Asp or Asn
  Variant (40)..(40): Xaa in position 40 is Phe, Ile, Leu, Met or Val
  Variant (41)..(41): Xaa in position 41 is Phe, Ile or Val
  Variant (45)..(45): Xaa in position 45 is Ala, Ser or Val
  Variant (46)..(46): Xaa in position 46 is Ala, Gly or Gln
  Variant (47)..(47): Xaa in position 47 is Ala, Gly, Ser or Thr
  Variant (50)..(51): Xaa in position 50 to 51 is any amino acid
  Variant (52)..(52): Xaa in position 52 is Phe, Ile or Leu
  Variant (53)..(54): Xaa in position 53 to 54 is any amino acid
  Variant (55)..(55): Xaa in position 55 is Ala or Gly
  Variant (56)..(56): Xaa in position 56 is Lys or Arg
TTXTXXXXGXXIXXYXXXXXXEXXXGXNXXXDXXXXXXXXXGGRXXXYEXXXXXXX

SEQ ID NO: 533 - protein, 27 aa, Artificial sequence
  protein pattern
  Variant (2)..(2): Xaa in position 2 is Phe, Ile, Leu or Met
  Variant (3)..(3): Xaa in position 3 is any amino acid
  Variant (4)..(4): Xaa in position 4 is Asp or Glu
  Variant (5)..(5): Xaa in position 5 is Leu or Met
  Variant (6)..(8): Xaa in position 6 to 8 is any amino acid
  Variant (9)..(9): Xaa in position 9 is Ala or Cys
  Variant (10)..(12): Xaa in position 10 to 12 is any amino acid
  Variant (13)..(13): Xaa in position 13 is Gly, Asn or Gln
  Variant (14)..(14): Xaa in position 14 is Ala, Gly or Val
  Variant (15)..(15): Xaa in position 15 is any amino acid
  Variant (17)..(18): Xaa in position 17 to 18 is Ile or Val
  Variant (20)..(20): Xaa in position 20 is Ile or Val
  Variant (22)..(22): Xaa in position 22 is Ile, Leu or Val
  Variant (24)..(24): Xaa in position 24 is Phe or Tyr
  Variant (25)..(25): Xaa in position 25 is Ala, Glu or Gln
  Variant (26)..(26): Xaa in position 26 is any amino acid
  Variant (27)..(27): Xaa in position 27 is Phe, Ile, Leu, Met or Val
AXXXXXXXXXXXXXXAXXGXDXDXXXX

SEQ ID NO: 534 - protein, 9 aa, Artificial sequence
  protein pattern
  Variant (3)..(3): Xaa in position 3 is Ala, Ser or Thr
  Variant (4)..(4): Xaa in position 4 is Ala or Val
MVXXSGTAV

SEQ ID NO: 535 - DNA, 459 bp, Escherichia coli K12
  CDS (1)..(459): transl_table=11
atggaactgacgactcgcactttacctgcgcggaaacatattgcgctggtggcacacgatcactgcaaacaaatgctgatgagctgggtggaacggcatcaaccgttactggaacaacacgtactgtatgcaacaggcactaccggtaacttaatttcccgcgcgaccggcatgaacgtcaacgcgatgttgagtggcccaatggggggtgaccagcaggttggcgcattgatctcagaagggaaaattgatgtattgattttcttctgggatccactaaatgccgtgccgcacgatcctgacgtgaaagccttgctgcgtctggcgacggtatggaacattccggtcgccaccaacgtggcaacggcagacttcataatccagtcgccgcatttcaacgacgcggtcgatattctgatccccgattatcagcgttatctcgcggaccgtctgaagtaa

SEQ ID NO: 536 - protein, 152 aa, Escherichia coli K12 [sequence omitted]

SEQ ID NO: 537 - DNA, 501 bp, Thermotoga maritima MSB8
  CDS (1)..(501): transl_table=11
atgtctgacagaccaagaaggtacaagatatttatggacaaaaagaagaggatcgctctcatagcacatgacagaagaaagagagatcttcttgagtgggtgagcttcaatcttggaacgctctccaaacacgagctttacgctacaggtacaaccggcgctctccttcaggaaaaactcggtctcaaagtacaccgactgaaaagcggacccctcggtggagatcagcagatcggtgcaatgatcgccgaagggaagatagacgtgctcatattcttctgggatcctctggaacctcaggcacacgacgtggatgtgaaagcgctcatcaggatagccacagtgtacaacatccccgtcgccatcacaagatccacagcggacttcttgatctcctcaccgctcatgaacgatgtgtacgagaagattcagatagactacgaagaagaactggaaagaagaatcagaaaagtggtggaaggcgaggaggaagagacttag

SEQ ID NO: 538 - protein, 166 aa, Thermotoga maritima MSB8
MSDRPRRYKIFMDKKKRIALIAHDRRKRDLLEWVSFNLGTLSKHELYATGTTGALLQEKLGLKVHRLKSGPLGGDQQIGAMIAEGKIDVLIFFWDPLEPQAHDVDVKALIRIATVYNIPVAITRSTADFLISSPLMNDVYEKIQIDYEEELERRIRKVVEGEEEET

SEQ ID NO: 539 - DNA, 450 bp, Clostridium acetobutylicum ATCC 824
  CDS (1)..(450): transl_table=11
atggcacttataatgaatagtaaaaaaaagatagccttagttgcacatgacaatagaaaaaaagctttgattagctggtgtgaggcaaattcggaagttttaagtaatcacagcctttgtggtacaggcactactgcaaagcttataaaagaggcaacaggacttgaggtttttccatataaaagcggacctatggggggagatcaacaaataggagctgctatagtaaatgaagatatagattttatgatttttttctgggatccacttacagctcagccacatgatcctgatgtaaaggcacttcttaggatttctgtactttatgatattccaatagcaatgaatgaatctacagcagagtttttaattaagtcacctattatgaaggagcagcatgaaaggcacatcatagattattaccaaaaaattagaaaagacaatttttaa

SEQ ID NO: 540 - protein, 149 aa, Clostridium acetobutylicum ATCC 824
MALIMNSKKKIALVAHDNRKKALISWCEANSEVLSNHSLCGTGTTAKLIKEATGLEVFPYKSGPMGGDQQIGAAIVNEDIDFMIFFWDPLTAQPHDPDVKALLRISVLYDIPIAMNESTAEFLIKSPIMKEQHERHIIDYYQKIRKDNF

SEQ ID NO: 541 - DNA, 537 bp, Bacteroides thetaiotaomicron VPI-5482
  CDS (1)..(537): transl_table=11
atggaaacaattgttcgtagaattggacttgttgcacacgatgcaatgaaaaaagacatgatagagtgggttctctggaactcggaacgtctgataggacataaattctattgtacgggtacaaccggtacactaattaaaaaagcccttgaagaaaaacatcctgaaatcaaatgggatatcacaatcctgaaatctggtcctttaggaggtgaccagcaaattggttcgcggatcgtagaaggagaaatagactatctgttcttttttacagatccgatgacactacagccgcatgatacggatgtgaaagcattgaccagactggctggagttgaaaatattgttttctgctgtaaccgttcgactgcggaccacattattacgagtcccttattcactgacccaacttacgaacgtattcacccggattacaccaattacacgcagcgttttgaaaacaagggaatcatatctgaagcagtggagcaagtgaaaaagcggaggaataaaagtgagaataacatttctaaatga

SEQ ID NO: 542 - protein, 178 aa, Bacteroides thetaiotaomicron VPI-5482
METIVRRIGLVAHDAMKKDMIEWVLWNSERLIGHKFYCTGTTGTLIKKALEEKHPEIKWDITILKSGPLGGDQQIGSRIVEGEIDYLFFFTDPMTLQPHDTDVKALTRLAGVENIVFCCNRSTADHIITSPLFTDPTYERIHPDYTNYTQRFENKGIISEAVEQVKKRRNKSENNISK

SEQ ID NO: 543 - DNA, 525 bp, Bacteroides thetaiotaomicron VPI-5482
  CDS (1)..(525): transl_table=11
atggaaccaaaagtaaggagaggcatcgggctggtagcacatgatgccatgaaaaaagacctcatcgaatgggtgctgtggaactcggaactgttgatgggaaataaattctattgtacaggtactacaggtactctgattctggaagcactgaaggagaagcatcctgaagtggagtgggacttcacaattctgaaatccggtcctttgggaggtgaccagcagatgggatcgcgtattgtggacggtcagattgattatctattctttttcactgaccctatgactttgcagccacatgatacggatgttaaagcattaacccgactggccggtgttgagaacatcgttttctgttgtaaccgttctacggcggatcatatcatttccagccctctgtttatggatcccgattacgaacgtacccatccggactattccagttatacgaaacggttcgaaaacaaatccgtggtaacggaagctgtagaatcggtaaataaaagaaaaagaaagaagagatag

SEQ ID NO: 544 - protein, 174 aa, Bacteroides thetaiotaomicron VPI-5482
MEPKVRRGIGLVAHDAMKKDLIEWVLWNSELLMGNKFYCTGTTGTLILEALKEKHPEVEWDFTILKSGPLGGDQQMGSRIVDGQIDYLFFFTDPMTLQPHDTDVKALTRLAGVENIVFCCNRSTADHIISSPLFMDPDYERTHPDYSSYTKRFENKSVVTEAVESVNKRKRKKR

SEQ ID NO: 545 - DNA, 507 bp, Mannheimia succiniciproducens MBEL55E
  CDS (1)..(507): transl_table=11
atgccattatcggctaaaaaaccgcgtatcttaatccaaggaggatatatggaaaccacatttcgtcatgttgccgcacaaaaacatattgctttggtcgcccatgatcattgcaaagaagatctgattaattggtgtcagaaaaatgtgcatcatctacaaaaccatcagctttatgcaacaggaactaccgggcatttaatcgaaaaagcgaccgaattaaaaatcaacagcttattaagcggaccgatgggtggcgatcagcaactgggcgcattaattgcggaaaataaaatcgacgtgatgattttcttttgggatccgatgaatgcggtgcctcatgacccggatgtgaaagccttattacgcattgccgcagtatggaacattccccatgctatgaatattgcaagcgccgatttattaattaattcgccattaataaaccgagaaatcgaactccgcattcccgattatcaaacttatctacaaaaacgcctgaaataa

SEQ ID NO: 546 - protein, 168 aa, Mannheimia succiniciproducens MBEL55E
MPLSAKKPRILIQGGYMETTFRHVAAQKHIALVAHDHCKEDLINWCQKNVHHLQNHQLYATGTTGHLIEKATELKINSLLSGPMGGDQQLGALIAENKIDVMIFFWDPMNAVPHDPDVKALLRIAAVWNIPHAMNIASADLLINSPLINREIELRIPDYQTYLQKRLK

SEQ ID NO: 547 - DNA, 519 bp, Bacteroides fragilis NCTC 9343
  CDS (1)..(519): transl_table=11
atggaaaaactaattcgaagaatcgggctggtagcgcacgatgctatgaaaaaagacctgattgaatgggttctttggaactcggagttattgatgggacataagttttattgtacaggtaccaccggtacgctgatacaggaggcattgaaagagaaacatcccgatgtggagtgggattttactatcctgaaatccggtcctctgggcggcgaccagcagatgggatcgcgtattgtggatggagagatcgattatcttttcttctttaccgacccgatgactcttcagccgcacgatacggatgtgaaggcactgacccgtctggcaagtgtggaaaacatcgtcttttgttgcaaccgttccactgccgatcatattatttcaagtccgctcttccttgatccggactatgaacggacacatccggactactcgggctatacgaaacgtttcgagaataaaccggtggtgaccgaggcggtagaatcggtgaagaaaagaaagagaaagaaataa

SEQ ID NO: 548 - protein, 172 aa, Bacteroides fragilis NCTC 9343
MEKLIRRIGLVAHDAMKKDLIEWVLWNSELLMGHKFYCTGTTGTLIQEALKEKHPDVEWDFTILKSGPLGGDQQMGSRIVDGEIDYLFFFTDPMTLQPHDTDVKALTRLASVENIVFCCNRSTADHIISSPLFLDPDYERTHPDYSGYTKRFENKPVVTEAVESVKKRKRKK

SEQ ID NO: 549 - DNA, 459 bp, Haemophilus influenzae 86-028NP
  CDS (1)..(459): transl_table=11
atgcagacaacaactcgaaccctcactcaacacaaacgtattgcacttgtggctcacgatagttgtaaaaaaaatttactgaattggacgcaaaaacacaaagaggcacttaagcctcatatactttatgcaacaggtacaacagggcatattttagaacgagaaacaggtttaagcattcaatctttattaagtggtccgatgggaggtgaccaacaacttggtggattaatcgcagaaaagaaaatcgacatgatgatcttcttttgggatccaatgaatgctgcaccacatgatcctgatgtgaaagcccttatgcgtattgcaacagtgtggaatatccctgttgcgattaatcaaagctctgcagattttcttttaacttcagttttatttgaacaagatgtggaaattgacgtaccagattatgaagggtatttaaaagagcggttagcttaa

SEQ ID NO: 550 - protein, 152 aa, Haemophilus influenzae 86-028NP
MQTTTRTLTQHKRIALVAHDSCKKNLLNWTQKHKEALKPHILYATGTTGHILERETGLSIQSLLSGPMGGDQQLGGLIAEKKIDMMIFFWDPMNAAPHDPDVKALMRIATVWNIPVAINQSSADFLLTSVLFEQDVEIDVPDYEGYLKERLA

SEQ ID NO: 551 - DNA, 465 bp, Pseudomonas fluorescens Pf-5
  CDS (1)..(465): transl_table=11
atgatcggtatcagtttcacccacaagaccatggccgcgcgcaagcgcatcgccctggtcgcccatgaccactgcaaggcgttcctgctggagtgggccgggcggcagaaggcgcgcctggccgagcacgagctggttgccaccggtaccaccggcctgttgctgagcaagcacttggggctgccggtggaaagcatgatcagcggccccctgggcggcgatcagcaactgggggcgcagattgccgagcaacgggtcgacctgctggtgttcttctgggaccccttcgaaccccagccccatgatccggacatcaaggccctgttgcgggtagcggcggtatggaacattccggtggcctgcaacgagtgcagcgccgactacctgctcagcagcccgctgatgaaccaggcccatgagcaccggattcccgactaccaggcctacctggccggccgaggataa

SEQ ID NO: 552 - protein, 154 aa, Pseudomonas fluorescens Pf-5
MIGISFTHKTMAARKRIALVAHDHCKAFLLEWAGRQKARLAEHELVATGTTGLLLSKHLGLPVESMISGPLGGDQQLGAQIAEQRVDLLVFFWDPFEPQPHDPDIKALLRVAAVWNIPVACNECSADYLLSSPLMNQAHEHRIPDYQAYLAGRG

SEQ ID NO: 553 - DNA, 444 bp, Desulfovibrio desulfuricans G20
  CDS (1)..(444): transl_table=11
atgaaaggccagcgtaacatcggcatggtggcgcatgacgaacgcaaagaagacctgctggactgggtgcagcacaacctgcaggctcttattccgcacaggatatttgccaccggcaccactggcgggctgttgcgtcagcgcttcggcgacctgaccataacccccatgaaaagcggcccgctgggcggagaccagcaactgggttccatgattgccgaaggcaggctggatatgcttttctttctcatcgaccccatggcacctcatcctcatgatgttgacatcaaagcactgctgcgactggcagtgctgtataacatccctgcagcctacaatcgctccacagcggacttccttattaccagcccgtttatgaccggagagtatattcctgaaataaaagattatactccgtacgtgaagcgtcttggcgctaaatag

SEQ ID NO: 554 - protein, 147 aa, Desulfovibrio desulfuricans G20
MKGQRNIGMVAHDERKEDLLDWVQHNLQALIPHRIFATGTTGGLLRQRFGDLTITPMKSGPLGGDQQLGSMIAEGRLDMLFFLIDPMAPHPHDVDIKALLRLAVLYNIPAAYNRSTADFLITSPFMTGEYIPEIKDYTPYVKRLGAK

SEQ ID NO: 555 - DNA, 468 bp, Rhodospirillum rubrum ATCC 11170
  CDS (1)..(468): transl_table=11
atgtcccacagccccgagacgccgccgcgcatgaccattggtctggtcgcccatgatggacagaagcgggccatgggccagtgggtggcggccaatgccaccgtgcttggccaccacgccctggtcgccaccggcaccaccgcccgggtgctcaaggaacagaacccgaccttcgatatcaccggcctgaaaagcggtccctttggcggcgaccagcaattgggcgcgttgatcgccgagggacatctggactgtttgattttcttcgtcgacccgatggagccccagccccatgacgtcgacgtcaaggcgctgatccgtctggcccaggtccacgagatcccggcggcctgcaaccgcgccaccgccgatctgatgatcaccagcccgctgtttggcgttctgcgcgccggcagcttccccccggccgaagaacgcttcgccgtctacgccaaccgcaaggtctag

SEQ ID NO: 556 - protein, 155 aa, Rhodospirillum rubrum ATCC 11170
MSHSPETPPRMTIGLVAHDGQKRAMGQWVAANATVLGHHALVATGTTARVLKEQNPTFDITGLKSGPFGGDQQLGALIAEGHLDCLIFFVDPMEPQPHDVDVKALIRLAQVHEIPAACNRATADLMITSPLFGVLRAGSFPPAEERFAVYANRKV

SEQ ID NO: 557 - DNA, 465 bp, Saccharophagus degradans 2-40
  CDS (1)..(465): transl_table=11
ttgaaaagtcgcacaggcgcgctacccagccgaaaacaaatagcgctaatcgcgcatgacaacaaaaaacaagagctaagtgactgggtgtgcacccacaagaaggaactagaacagcacgaccttttcgcaactgggacaaccggctataagctagcagccgaaacaggcttaaaggttgaaaagtatattagcgggcccttgggtggcgaccagcaaataggagccaaaatatctaccggcgaaatagacgtgcttattttcttttgggacccgttcgagcctatgcctcacgaccccgatgtaaaggcgctattgcgcattgcagccgtatggaacatacccgtagcttgcaaccccgcgtcagcagactttgttatcacatcaccactcatcaaacagagctacgagaggcaaatccccgattacgaggcttatatcgccgaaagaaccaaaaagctctga

SEQ ID NO: 558 - protein, 154 aa, Saccharophagus degradans 2-40
MKSRTGALPSRKQIALIAHDNKKQELSDWVCTHKKELEQHDLFATGTTGYKLAAETGLKVEKYISGPLGGDQQIGAKISTGEIDVLIFFWDPFEPMPHDPDVKALLRIAAVWNIPVACNPASADFVITSPLIKQSYERQIPDYEAYIAERTKKL

SEQ ID NO: 559 - DNA, 471 bp, Acidobacteria bacterium Ellin345
  CDS (1)..(471): transl_table=11
atgtccgacacgcaatacacgtcgttgccgattccggcgcaaaaacgcatcgcgttggtcgcgcacgatcacaagaaacgggagctgctcgagtgggccactgctcatcgcgaactcctcgttcgacacgacctttacgccaccggtacaactggcggcgttcttgagaccctcggacttaagatccacaagttgctcagtggccccctcggtggtgaccagcagatcggtgcgaagatcgcgcaaaatgagatcgatttggttatcttcttctgggatccgctcgaagcgcagccgcacgatcccgacgtccgcgcgctgcttcgcatatcggcggtgtggaacattccggttgcctataaccgctcatcggcggacttcatgatctcttcgccgttcatgaccaccgaatatagccgtcaaattccggattacagcgactatcgccaccggctcaaaccgaacctatga

SEQ ID NO: 560 - protein, 156 aa, Acidobacteria bacterium Ellin345
MSDTQYTSLPIPAQKRIALVAHDHKKRELLEWATAHRELLVRHDLYATGTTGGVLETLGLKIHKLLSGPLGGDQQIGAKIAQNEIDLVIFFWDPLEAQPHDPDVRALLRISAVWNIPVAYNRSSADFMISSPFMTTEYSRQIPDYSDYRHRLKPNL

SEQ ID NO: 561 - DNA, 459 bp, Haemophilus somnus 129PT
  CDS (1)..(459)
atgcaaaccacctatcgcaaattgacaaaaaacaaaaaaattgctctggttgcacacgatcactgcaaacaagatttgatacaatggtgtcaaactaaccgcactttacttcaacctcatattctttatgcaacggggacaactggaaatttaattcatcaagaaacgaatttagaaatcaaaaatttacttagcggtcctatgggaggagatcaacagttgggtggcttaattgcagaagggaaaattgacttgctgatattcttttgggatccaatgaatgcagttcctcatgatcctgatgtcaaagccttaatgcgtattgcaactgtttggaacattcctgttgcgatgaatattgctactgctgattttttaattagttctcctgcattccaacaagaaactgaaattcgtattccagactatcaaggttacttaaaagagcggttaaaataa

SEQ ID NO: 562 - protein, 152 aa, Haemophilus somnus 129PT
MQTTYRKLTKNKKIALVAHDHCKQDLIQWCQTNRTLLQPHILYATGTTGNLIHQETNLEIKNLLSGPMGGDQQLGGLIAEGKIDLLIFFWDPMNAVPHDPDVKALMRIATVWNIPVAMNIATADFLISSPAFQQETEIRIPDYQGYLKERLK

SEQ ID NO: 563 - DNA, 459 bp, Haemophilus somnus 2336
  CDS (1)..(459)
atgcaaacaacctatcgcaaattggcaaaaaacaaaaaaattgctttggttgcacacgatcactgcaaacaagatttgatacaatggtgtcaaactaaccgcactttacttcaacctcatattctttatgcaacggggacaactggaaatttaattcatcaagaaacgaatttagaaatcaaaaatttacttagcggtcctatgggaggagatcaacagttgggtggcttaattgcagaagggaaaattgacttgctgatattcttttgggatccaatgaatgcagttcctcatgatcctgatgtcaaagccttaatgcgtattgcaactgtttggaacattcctgttgcgatgaatattgctactgctgattttttaattagttctcctgcattccaacaagaaactgaaattcgtattccggactatcaaggttacttaaaagagcggttaaaataa

SEQ ID NO: 564 - protein, 152 aa, Haemophilus somnus 2336
MQTTYRKLAKNKKIALVAHDHCKQDLIQWCQTNRTLLQPHILYATGTTGNLIHQETNLEIKNLLSGPMGGDQQLGGLIAEGKIDLLIFFWDPMNAVPHDPDVKALMRIATVWNIPVAMNIATADFLISSPAFQQETEIRIPDYQGYLKERLK

SEQ ID NO: 565 - DNA, 459 bp, Haemophilus influenzae R2846
  CDS (1)..(459)
atgcatacaaccacacgaaccctcactcaacacaaacgtattgcactagtggctcatgatagctgcaaaaaaaatttactgaattggacgcaaaaacacaaagaggctcttaagccacatatactttatgcaacaggtacgactggacatattttagaacgagaaacaggtttaagcattcaatctttattaagtggtccgatgggcggcgaccaacaacttggtggattaatcgcagaaaagaaaattgacatgatgatcttcttttgggatccaatgaatgccgcaccacacgatcctgatgtaaaagccctcatgcgtattgcaacagtgtggaatatccctgtcgctattaatcaaagttctgcagattttcttttaacttcagttttatttgaacaagatgtggaaattgacgtgctagattatgaagggtatttaaaagagcgtttagcttaa

SEQ ID NO: 566 - protein, 152 aa, Haemophilus influenzae R2846
MHTTTRTLTQHKRIALVAHDSCKKNLLNWTQKHKEALKPHILYATGTTGHILERETGLSIQSLLSGPMGGDQQLGGLIAEKKIDMMIFFWDPMNAAPHDPDVKALMRIATVWNIPVAINQSSADFLLTSVLFEQDVEIDVLDYEGYLKERLA

SEQ ID NO: 567 - DNA, 459 bp, Haemophilus influenzae R2866
  CDS (1)..(459)
atgcagacaacaactcgaaccctcactcaacacaaacgtattgcacttgtggctcacgacagttgtaaaaaaaatttactgaattggacgcaaaaacacaaagaggcactcaagtctcatatactttatgcaacaggtacaacagggcatattttagaacgagaaacaggtttaagcattcaatctttattaagtggcccaatgggcggcgatcagcaacttggtggattaatcgcagaaaagaaaatcgacatgatgatcttcttttgggatccaatgaatgccgccccacatgatcctgatgtgaaagcccttatgcgtattgcaacagtgtggaatatccctgtcgcgattaatcaaagctctgcagattttcttttaacttcagttttatttgaacaagatgttgaaattgaagtgccagattatgaggggtatttaaaagagcggttagcttaa

SEQ ID NO: 568 - protein, 152 aa, Haemophilus influenzae R2866
MQTTTRTLTQHKRIALVAHDSCKKNLLNWTQKHKEALKSHILYATGTTGHILERETGLSIQSLLSGPMGGDQQLGGLIAEKKIDMMIFFWDPMNAAPHDPDVKALMRIATVWNIPVAINQSSADFLLTSVLFEQDVEIEVPDYEGYLKERLA

SEQ ID NO: 569 - DNA, 414 bp, Mesorhizobium sp. BNC1
  CDS (1)..(414): transl_table=11
atggcacgcaggcaggtagcgctgatcgcgcatgatcaaaagaaggacgatctggttgcgtttgcacacgatcaccaggcatggttcgcaaaatgcgacctggtcgctaccggaacaacgggcgggcggatcgccgaggcttgcccggatctccagataagacgcctgaagagcgggcctctgggcggagatcagcagatcggcgccctgatcgccgagcgggctatcgatcttctcatcttctttgttgatccgctgacgccgatgccgcatgacgtggatgtaaaggcacttatgcggcttgcaatcgtttacgacattccaatggcgttgaaccgggccacggccgaaaatattcttgccttggaagaggcggcaggcccggagccgatagttgagcaaggaggctcctag

SEQ ID NO: 570 - protein, 137 aa, Mesorhizobium sp. BNC1
MARRQVALIAHDQKKDDLVAFAHDHQAWFAKCDLVATGTTGGRIAEACPDLQIRRLKSGPLGGDQQIGALIAERAIDLLIFFVDPLTPMPHDVDVKALMRLAIVYDIPMALNRATAENILALEEAAGPEPIVEQGGS

SEQ ID NO: 571 - DNA, 462 bp, Pseudoalteromonas tunicata D2
  CDS (1)..(462): transl_table=11
atgaagacaatacaacaggctttacctgcaaaaaaaaccattgccttggttgcccatgatggcaaaaaacacgccctggaactttggtgctcaaaacaccttaatatacttagtcaacatacactgtatggcacaggcacaaccggtcacttaatcgaaaagagaaccggccttcctgtgcataaactccttagcggcccgttagggggcgaccaacaacttggtgcgctcatagctgagcatgaaatccatttattgatatttttttgggatccgttggcctcgcaaccacatgatcctgatgtaaaagccttattacgattagccgcggtgtggaatattccagttgcgtgtaatgaatcaagtgctgatatgttactgtcatcaccccttatgaacagtcaaatgccccgtgaaatgcccgattaccaaggctatttagcgcagcgccttaccatataa

SEQ ID NO: 572 - protein, 153 aa, Pseudoalteromonas tunicata D2
MKTIQQALPAKKTIALVAHDGKKHALELWCSKHLNILSQHTLYGTGTTGHLIEKRTGLPVHKLLSGPLGGDQQLGALIAEHEIHLLIFFWDPLASQPHDPDVKALLRLAAVWNIPVACNESSADMLLSSPLMNSQMPREMPDYQGYLAQRLTI

SEQ ID NO: 573 - DNA, 459 bp, Photobacterium sp. SKA34
  CDS (1)..(459): transl_table=11
atgcacagaacaacccgcacaatggcatcgtctaaacatatcgccctcgttgcacacgataactgtaaagttgatctacttcgctgggttaaagaacataaagataaactgagatctcacgagctttacgcaacaggtaccacaggacatctcctctcaaaagaaataggcttaccgatcacttgcttaattagtggtccaatggggggagaccaacaattaggcgctctgatttcagaaggtaaaatcgatatgatgattttcttttgggacccactcaatgccgttcctcatgacccagatgtaaaagcgttactccgtatttcagcagtatggaacatccccgttgcgactaaccgtgcgagcgcaaacttcatgatcacctcaccacttctcgatcaagaagtaagtattgaagttcctgattacgatgcttacctagaagaacgtataaattag

SEQ ID NO: 574 - protein, 152 aa, Photobacterium sp. SKA34
MHRTTRTMASSKHIALVAHDNCKVDLLRWVKEHKDKLRSHELYATGTTGHLLSKEIGLPITCLISGPMGGDQQLGALISEGKIDMMIFFWDPLNAVPHDPDVKALLRISAVWNIPVATNRASANFMITSPLLDQEVSIEVPDYDAYLEERIN

SEQ ID NO: 575 - DNA, 465 bp, Pseudomonas chlororaphis
  CDS (1)..(465): transl_table=11
atgatcggtatcagcttcacccaggccagcatggcggcgcgcaagcgcatcgccctggtggcccacgaccactgcaagagtttcctcctggactgggccgagcggcagaaagacaagctcgccgagcacgctctgctggccactggcaccaccggccagctgctgcaccagcgcctgggcctgccggtggaaagcatgatcagcggccccctgggcggcgaccagcagctcggcgcgcgaatcgccgagcagcgggtggacatgctggtgttcttctgggaccccttcgaaccccagccccacgatccggacatcaaggccctgctacgggtcgcggcggtctggaacattcccgtggcctgcaacgaatgcagcgccgactacctgctcagcagcccgctgatggagcaggcgcacagctaccggattccggactacccggcgtacctctcagggcgtcgatga

SEQ ID NO: 576 - protein, 154 aa, Pseudomonas chlororaphis
MIGISFTQASMAARKRIALVAHDHCKSFLLDWAERQKDKLAEHALLATGTTGQLLHQRLGLPVESMISGPLGGDQQLGARIAEQRVDMLVFFWDPFEPQPHDPDIKALLRVAAVWNIPVACNECSADYLLSSPLMEQAHSYRIPDYPAYLSGRR

SEQ ID NO: 577 - DNA, 384 bp, Agrobacterium tumefaciens
  CDS (1)..(384): transl_table=11
atggaagggcaacgctgtatcgcgctcatcgctcacgacgagaaaaaggacgatatggcggatttcgcccgtcaccatcagaaggtgcttgccagtttcaggatcgtcgccaccggcaccaccggcgggcgtgtgcaggaagcctgcccggggcttgaggtcatccgcctcaaaagcggtcctcttggcggcgaccagcagatcggcgcgatgatcgccactggcgaagtggacatgctgatcttctttaccgatccgctgactgccatgccgcatgatgtcgatgtgaaggcgctgacgcgtcttgccacggtctacgacattcccatggcgctcaaccgcgccaccgcagaaaacctcatcgacttcaattccgccgactga

SEQ ID NO: 578 - protein, 127 aa, Agrobacterium tumefaciens
MEGQRCIALIAHDEKKDDMADFARHHQKVLASFRIVATGTTGGRVQEACPGLEVIRLKSGPLGGDQQIGAMIATGEVDMLIFFTDPLTAMPHDVDVKALTRLATVYDIPMALNRATAENLIDFNSAD

SEQ ID NO: 579 - DNA, 438 bp, Clostridium acetobutylicum
  CDS (1)..(438)
atgaatagtaaaaaaaagatagccttagttgcacatgacaatagaaaaaaagctttgattagctggtgtgaggcaaattcggaagttttaagtaatcacagcctttgtggtacaggcactactgcaaagcttataaaagaggcaacaggacttgaggtttttccatataaaagcggacctatggggggagatcaacaaataggagctgctatagtaaatgaagatatagattttatgatttttttctgggatccacttacagctcagccacatgatcctgatgtaaaggcacttcttaggatttctgtactttatgatattccaatagcaatgaatgaatctacagcagagtttttaattaagtcacctattatgaaggagcagcatgaaaggcacatcatagattattaccaaaaaattagaaaagacaatttttaa

SEQ ID NO: 580 - protein, 145 aa, Clostridium acetobutylicum
MNSKKKIALVAHDNRKKALISWCEANSEVLSNHSLCGTGTTAKLIKEATGLEVFPYKSGPMGGDQQIGAAIVNEDIDFMIFFWDPLTAQPHDPDVKALLRISVLYDIPIAMNESTAEFLIKSPIMKEQHERHIIDYYQKIRKDNF

SEQ ID NO: 581 - DNA, 432 bp, Coxiella burnetii
  CDS (1)..(432): transl_table=11
atgaccgtcaaaaaaatcgccctcgtcgctcacgatcgaatgaaaaaggaattaatcgagtggattaaaaaacatcaaaacttgttaaagcaccatgagctctatgccactggctcaacaggacaggccatcgaaaaaacactaaacgtaacggtaactaaaatggaaagcggtccgctgggaggcgatcttcagctgggggccaaaattgttaacaaagaaatcgacattctaattttcttctgggaccccctcgaagcacagccccacgatcctgatgtacgcgctttgctacgcatcgctgtcgtgtggaaccttcccgttgcctgcaatgcatcaaccgccgattatttactaacttcgcctttatttgacagtgattatcaccctgaaactcccgattacgaagcctatcgcaatcggattatttag

SEQ ID NO: 582 - protein, 143 aa, Coxiella burnetii
MTVKKIALVAHDRMKKELIEWIKKHQNLLKHHELYATGSTGQAIEKTLNVTVTKMESGPLGGDLQLGAKIVNKEIDILIFFWDPLEAQPHDPDVRALLRIAVVWNLPVACNASTADYLLTSPLFDSDYHPETPDYEAYRNRII

SEQ ID NO: 583 - DNA, 459 bp, Erwinia carotovora subsp
  CDS (1)..(459): transl_table=11
atggagttcaccacccgtaccatccccgcgcaaaaacatattgcgctggtagcccacgaccactgcaaacaatctttgctggattgggttggtactaataaacaacagctcacagagcacacgctttacgccaccgggaccaccggaaacctgattcagtcaaatacgggcctgcccgtaaaaagtatgctgagtgggccgatggggggcgaccaacaggtcggcgcactcatctccgaagggaaaatcgatttgatgatcttcttttgggatccacttaacgccgtgccacacgatcccgatgtaaaggcgctgctgagactcgcgacagtttggaacattcctgttgctaccaaccgtgcaacggcggatttcctgatcaactctgcgctatttaaagaaccggttcagatagccatccctgattatcagcgctacctgcaagaccgactgaaataa

SEQ ID NO: 584 - protein, 152 aa, Erwinia carotovora subsp
MEFTTRTIPAQKHIALVAHDHCKQSLLDWVGTNKQQLTEHTLYATGTTGNLIQSNTGLPVKSMLSGPMGGDQQVGALISEGKIDLMIFFWDPLNAVPHDPDVKALLRLATVWNIPVATNRATADFLINSALFKEPVQIAIPDYQRYLQDRLK

SEQ ID NO: 585 - DNA, 459 bp, Haemophilus influenzae
  CDS (1)..(459): transl_table=11
  misc_feature (273)..(273): w is a or t
atgcagacaacaactcgaaccctcactcaacacaaacgtattgcacttgtggctcacgatagttgtaaaaaaaatttactgaattggacgcaaaaacacaaagaggcacttaagcctcatatactttatgcaacaggtacaacagggcatattttagaacgagaaacaggtttaagcattcaatctttattaagtggcccgatgggcggcgatcaacaacttggtggattaatcgcagaaaagaaaatcgacatgatgatcttcttttgggawccaatgaatgctgcaccacatgaacctgatgtgaaagcccttatgcgtattgcaacagtgtggaatattcctgttgcgattaatcaaagctctgcagattttcttttaacttcagttttatttgaacaagatgtggaaattgacgtaccagattatgaagggtatttaaaagagcggttagcttaa

SEQ ID NO: 586 - protein, 152 aa, Haemophilus influenzae
  misc_feature (91)..(91): The Xaa at location 91 stands for Asp, or Glu.
MQTTTRTLTQHKRIALVAHDSCKKNLLNWTQKHKEALKPHILYATGTTGHILERETGLSIQSLLSGPMGGDQQLGGLIAEKKIDMMIFFWXPMNAAPHEPDVKALMRIATVWNIPVAINQSSADFLLTSVLFEQDVEIDVPDYEGYLKERLA

SEQ ID NO: 587 - DNA, 447 bp, Leptospira interrogans serogroup Icterohaemorrhagiae serovar
  CDS (1)..(447): transl_table=11
atgaaagaagtttccgttccggcaatcaaaagaatcgtattgattgcccatgataatcgtaaagaagatttagtaaactgggtaaaaactcacagagaaatcctttcaaaacatcagctatatggaactggaacgactggaaaattgataagcgaagaaaccgaacttccggtttacagatttctttctgggccgttgggaggagatcagcaaattggtgctaagattgctgaaggagatttagatatagtaatttttttctgggatccactaacagctcaaccccatgatccggatgtaaaagctttgcttagaattgcggttttatacaacgttcctatggcttgtaaccgatccactgccgattatatgatcagttctcctcaatttacaaaaacttataaaaagatccttttgagttacaatactaaagtaaaaaaggactga

SEQ ID NO: 588 - protein, 148 aa, Leptospira interrogans serogroup Icterohaemorrhagiae serovar
MKEVSVPAIKRIVLIAHDNRKEDLVNWVKTHREILSKHQLYGTGTTGKLISEETELPVYRFLSGPLGGDQQIGAKIAEGDLDIVIFFWDPLTAQPHDPDVKALLRIAVLYNVPMACNRSTADYMISSPQFTKTYKKILLSYNTKVKKD

SEQ ID NO: 589 - DNA, 405 bp, Listeria innocua
  CDS (1)..(405): transl_table=11
atgcatatcgcattaatcgcgcacgatgaaaagaaggatttgatggttggatttgcaaccgcatataaacatttgctcgaaccgcatcagttgtacgcaacaggcacgactggtttgcggattattgaagcaactggcttaacggtgcatcgttttaaatctggtccgcttggtggcgatcaacaaattggtgcgcgcatttctgaaaataaaatggacttagttattttcttgcgtgacccgctgaccgctcagccacatgaaccagatgtaagcgcgctgatacgattatgcgatgtatacgaaattcctttagcaactaatattggaacagcagaaattttaattcgcggtttaggagctggctttctagattggcgagatttaagaagaaacgatgaataa

SEQ ID NO: 590 - protein, 134 aa, Listeria innocua
MHIALIAHDEKKDLMVGFATAYKHLLEPHQLYATGTTGLRIIEATGLTVHRFKSGPLGGDQQIGARISENKMDLVIFLRDPLTAQPHEPDVSALIRLCDVYEIPLATNIGTAEILIRGLGAGFLDWRDLRRNDE

SEQ ID NO: 591 - DNA, 405 bp, Listeria monocytogenes serotype 4b
  CDS (1)..(405): transl_table=11
atgcatatcgcattaatcgcgcacgatgaaaagaaagatttgatggttggatttgcaactgcatataaacatttgctcgaaccgcatcaattatatgcaaccgggacgacaggtttacgcattatcgaagcaactggcttaacggtacatcgttttaaatcaggcccgcttggtggcgatcaacaaattggtgcgcggatttcagaaaataaaatggacttagttattttcttgcgggatccactcactgcgcagcctcacgaaccagatgtgacggcgcttattcgattatgcgatgtatacgaaattcctttagcgacaaatattggcacagcagaaattttaattcgtggtttaggagctggtttcctagattggcgagacttaagacggaatgatgaataa

SEQ ID NO: 592 - protein, 134 aa, Listeria monocytogenes serotype 4b
MHIALIAHDEKKDLMVGFATAYKHLLEPHQLYATGTTGLRIIEATGLTVHRFKSGPLGGDQQIGARISENKMDLVIFLRDPLTAQPHEPDVTALIRLCDVYEIPLATNIGTAEILIRGLGAGFLDWRDLRRNDE

SEQ ID NO: 593 - DNA, 459 bp, Mannheimia succiniciproducens
  CDS (1)..(459)
atggaaaccacatttcgtcatgttgccgcacaaaaacatattgctttggtcgcccatgatcattgcaaagaagatctgattaattggtgtcagaaaaatgtgcatcatctacaaaaccatcagctttatgcaacaggaactaccgggcatttaatcgaaaaagcgaccgaattaaaaatcaacagcttattaagcggaccgatgggtggcgatcagcaactgggcgcattaattgcggaaaataaaatcgacgtgatgattttcttttgggatccgatgaatgcggtgcctcatgacccggatgtgaaagccttattacgcattgccgcagtatggaacattccccatgctatgaatattgcaagcgccgatttattaattaattcgccattaataaaccgagaaatcgaactccgcattcccgattatcaaacttatctacaaaaacgcctgaaataa

SEQ ID NO: 594 - protein, 152 aa, Mannheimia succiniciproducens
METTFRHVAAQKHIALVAHDHCKEDLINWCQKNVHHLQNHQLYATGTTGHLIEKATELKINSLLSGPMGGDQQLGALIAENKIDVMIFFWDPMNAVPHDPDVKALLRIAAVWNIPHAMNIASADLLINSPLINREIELRIPDYQTYLQKRLK

SEQ ID NO: 595 - DNA, 459 bp, Pasteurella multocida
  CDS (1)..(459): transl_table=11
atgcagagtaccgcacgtaccttgtctgttaataaacatattgcactggttgcacatgaccactgtaaacaagatttgataaattggtgtaaaactcaccgcactttattagcacaacataccctttatgcgacaggaacaactggcaacctcattcaaaaagaagcaaatttgccgattaaaagtttactcagtggtccaatgggcggcgatcaacaattgggcggcttaattgcagaaaaacaaattgatgtattgattttcttttgggatccgatgaatgcagtcccccatgatcctgacgtcaaagcattaatgcgaatcgcaacggtgtggaatattcccgtcgcaatgaatatggcaacagcagattttctcattacatcacctagctttgctcaagaaacccaagtacgaattcctgattatgacggctatttgaaagaacgtttaaaataa

SEQ ID NO: 596 - protein, 152 aa, Pasteurella multocida
MQSTARTLSVNKHIALVAHDHCKQDLINWCKTHRTLLAQHTLYATGTTGNLIQKEANLPIKSLLSGPMGGDQQLGGLIAEKQIDVLIFFWDPMNAVPHDPDVKALMRIATVWNIPVAMNMATADFLITSPSFAQETQVRIPDYDGYLKERLK

SEQ ID NO: 597 - DNA, 459 bp, Photorhabdus luminescens subsp
  CDS (1)..(459): transl_table=11
atggaattgacaacccgcacaatggcaaccgctaaaaatatagcgcttattgcacatgaccactgtaaaacttcgctgctagcttggtccaaaaaacataaaagtttactcaagaaacatcatttatacgctaccggcacaaccggtaatctgattcagaacgaaaccggattatctgttaccaatatgcttagtggtccaatgggtggagatcaacaaattggttctctaatctcagaagggaaaattgatgtgttgatatttttctgggacccacttaattccgtgcctcatgatcctgatgtaaaagcacttctacgccttgctacagtatggaatatccctgttgcaactaatctagcgtctgcggattttattgttagttctcctctattttctgaatcagtagatattcaagtacctgattatcaacattatctgaatggacgtctgaaataa

SEQ ID NO: 598 - protein, 152 aa, Photorhabdus luminescens subsp
MELTTRTMATAKNIALIAHDHCKTSLLAWSKKHKSLLKKHHLYATGTTGNLIQNETGLSVTNMLSGPMGGDQQIGSLISEGKIDVLIFFWDPLNSVPHDPDVKALLRLATVWNIPVATNLASADFIVSSPLFSESVDIQVPDYQHYLNGRLK

SEQ ID NO: 599 - DNA, 459 bp, Photobacterium profundum
  CDS (1)..(459)
atgcaagtcacaacacgtacaatgaacaagagcaagcatattgccttagttgcacacgacaactgtaaacaagaccttttacgctgggtaaaagagtttgaagacaaacttgaagaccacactctatatgcaacaggcaccacaggtcatcttctttccaaagaaacaggccttaaaatcaactgcatgatcagtggtcctatgggaggagatcaacaactaggcgctttaatttcagaaagtaaaattgatatgatgattttcttctgggatccgctaaatgccgttcctcatgatcctgatgtgaaagcactattgcgtatttctgccgtctggaatgtacctgttgcgaccaaccgagcaagcgcaaagtttatgattacatcaccattattagcagaagaaatttctatcgaaattccagattatgaagcttaccttgctgagcgtattggctaa

SEQ ID NO: 600 - protein, 152 aa, Photobacterium profundum
MQVTTRTMNKSKHIALVAHDNCKQDLLRWVKEFEDKLEDHTLYATGTTGHLLSKETGLKINCMISGPMGGDQQLGALISESKIDMMIFFWDPLNAVPHDPDVKALLRISAVWNVPVATNRASAKFMITSPLLAEEISIEIPDYEAYLAERIG

SEQ ID NO: 601 - DNA, 459 bp, Salmonella typhi
  CDS (1)..(459): transl_table=11
atggaactgacgactcgcaccttgccgacgcgcaaacatatcgcgttggttgctcacgaccactgcaaacagatgttaatgaactgggtggaacgccatcagccgttgctggaaaaacacgttctttatgcaaccggcaccacggggaatctgatccagcgcgcaaccggtatggacgttaatgcgatgctgagcggcccgatgggcggcgaccagcaggttggcgcgctcatttcagaagggaaaatcgacgtgttgattttcttctgggacccgcttaacgcggtaccgcacgaccccgatgtcaaagcgctactgcgtctggccactgtatggaatatccctgtcgccactaatgtctcaacggcggactttatcatccagtccccgcattttaatgacgctgtagatattcttattccggattatgcgcgttatctggccgagcgcctgaaataa

SEQ ID NO: 602 - protein, 152 aa, Salmonella typhi
MELTTRTLPTRKHIALVAHDHCKQMLMNWVERHQPLLEKHVLYATGTTGNLIQRATGMDVNAMLSGPMGGDQQVGALISEGKIDVLIFFWDPLNAVPHDPDVKALLRLATVWNIPVATNVSTADFIIQSPHFNDAVDILIPDYARYLAERLK

SEQ ID NO: 603 - DNA, 468 bp, Thermotoga maritima
  CDS (1)..(468)
atggacaaaaagaagaggatcgctctcatagcacatgacagaagaaagagagatcttcttgagtgggtgagcttcaatcttggaacgctctccaaacacgagctttacgctacaggtacaaccggcgctctccttcaggaaaaactcggtctcaaagtacaccgactgaaaagcggacccctcggtggagatcagcagatcggtgcaatgatcgccgaagggaagatagacgtgctcatattcttctgggatcctctggaacctcaggcacacgacgtggatgtgaaagcgctcatcaggatagccacagtgtacaacatccccgtcgccatcacaagatccacagcggacttcttgatctcctcaccgctcatgaacgatgtgtacgagaagattcagatagactacgaagaagaactggaaagaagaatcagaaaagtggtggaaggcgaggaggaagagacttag

SEQ ID NO: 604 - protein, 155 aa, Thermotoga maritima
MDKKKRIALIAHDRRKRDLLEWVSFNLGTLSKHELYATGTTGALLQEKLGLKVHRLKSGPLGGDQQIGAMIAEGKIDVLIFFWDPLEPQAHDVDVKALIRIATVYNIPVAITRSTADFLISSPLMNDVYEKIQIDYEEELERRIRKVVEGEEEET

SEQ ID NO: 605 - DNA, 456 bp, Vibrio cholerae
  CDS (1)..(456): transl_table=11
atgaaaaaaaccacccgcactatggcagcgcacaaacacgttgctcttgtggctcacgataactgcaaaggtgaactgctgcgctgggtaacagagaacaaggaaaaactgcaacgccatttcctgtatgccactggcaccacggggcatatgctcagtaaagaaacgggactggcgatcaaaagtatgatcagcggcccaatgggcggtgatcagcaactgggcgcgttaatttctgaaggcaaaattgatgtgctgattttcttttgggatccacttaatgccgttccgcatgatccggatgtgaaagcgctgctgcgtatcgccagtgtgtggaatattcccgtcgccaccaaccgcgccagtgctaaattcttgttttcttcttctttgatggagcaggaagtgcaaattgaaattccggattaccaagcttatctcgctgaacgcacctaa

SEQ ID NO: 606 - protein, 151 aa, Vibrio cholerae
MKKTTRTMAAHKHVALVAHDNCKGELLRWVTENKEKLQRHFLYATGTTGHMLSKETGLAIKSMISGPMGGDQQLGALISEGKIDVLIFFWDPLNAVPHDPDVKALLRIASVWNIPVATNRASAKFLFSSSLMEQEVQIEIPDYQAYLAERT

SEQ ID NO: 607 - DNA, 456 bp, Vibrio parahaemolyticus
  CDS (1)..(456): transl_table=11
atgcaaaaaacgactcgtaccatgcctgcgcataaacacgtggcattggttgcccacgacaattgcaaacctgagctacttcgctgggtaaaagagaataaagaaaagctgcaacgccatttcttgtacgctacaggcacaactggccacatgctgagcaaagaaactggcttagcaattaagagtatgatcagcggccctatggggggcgaccaacaacttggtgcattgatttcggaaggtaaaatcgatgtgttggtcttcttctgggatccactaaacgccgtacctcacgaccccgatgtgaaagccctacttcgtattgcgagtgtttggaacatcccagttgcgactaaccgtgcaacggcaaaattcctcttcgactctcctcttctagaacaagaagtcgacatcgaagtgccagattacgaagcttaccttgcagaacgcatgtaa

SEQ ID NO: 608 - protein, 151 aa, Vibrio parahaemolyticus
MQKTTRTMPAHKHVALVAHDNCKPELLRWVKENKEKLQRHFLYATGTTGHMLSKETGLAIKSMISGPMGGDQQLGALISEGKIDVLVFFWDPLNAVPHDPDVKALLRIASVWNIPVATNRATAKFLFDSPLLEQEVDIEVPDYEAYLAERM

SEQ ID NO: 609 - DNA, 456 bp, Vibrio vulnificus
  CDS (1)..(456): transl_table=11
atgcaaaaaacaactcgcacgatgccagcgcataaacacattgcattggttgcacacgataactataagcctgagctgctacgctgggtaaaagagaacaaagaaaaattgcagagccacttcttgtatgccacggggacaactggccacatgcttagtcgtgaaaccgggcttgcgattaaaagtatgatcagcggcccaatgggtggtgatcaacagcttggtgctttaatctcagaaggcaaaatcgatatgctgattttcttctgggacccactgaatgcggtaccacatgatccggatgtaaaagcgctactgcgcattgccagtgtgtggaatattccagtggcaaccaaccgtgcaacggcaaagttcctttttgaatcgccattattgaatgaagaagttgatgtcgaaatccctgattaccaagcctatttggcaggtcgcacctaa

SEQ ID NO: 610 - protein, 151 aa, Vibrio vulnificus
MQKTTRTMPAHKHIALVAHDNYKPELLRWVKENKEKLQSHFLYATGTTGHMLSRETGLAIKSMISGPMGGDQQLGALISEGKIDMLIFFWDPLNAVPHDPDVKALLRIASVWNIPVATNRATAKFLFESPLLNEEVDVEIPDYQAYLAGRT

SEQ ID NO: 611 - DNA, 465 bp, Yersinia pestis
  CDS (1)..(465): transl_table=11
atggaactgactacccgcactattgcggctcgcaaacacattgcccttgtttcccatgatcactgtaagaaatcactgctcgcatgggtgatggaaaacagagatctactggcacaacacgaactctatgccacagggaccaccggtaatttagtgcagaaggcgacaggtattgatgtgcactgtttgctcagtggcccgatgggcggtgatcaggaagtgggtgcgctgatatctgagaagaagatagatatcctgattttcttttgggatccgctcaatgccgttccacatgacccagatgtgaaagccctgctgcgcctagcaacagtatggaatattccagtagcaacaaaccgctctactgcagatttcttaattggctcaaccctgtttagcagcgaagtcactatcgccatccctgattatgaccgttacatgcaacagcgcctggacctaaaatag

SEQ ID NO: 612 - protein, 154 aa, Yersinia pestis
MELTTRTIAARKHIALVSHDHCKKSLLAWVMENRDLLAQHELYATGTTGNLVQKATGIDVHCLLSGPMGGDQEVGALISEKKIDILIFFWDPLNAVPHDPDVKALLRLATVWNIPVATNRSTADFLIGSTLFSSEVTIAIPDYDRYMQQRLDLK

SEQ ID NO: 613 - DNA, 25 bp, Artificial sequence
  primer
atgtacattatggaactgacgactc

SEQ ID NO: 614 - DNA, 22 bp, Artificial sequence
  primer
ttacttcagacggtccgcgaga

SEQ ID NO: 615 - protein, 138 aa, Artificial sequence
  consensus sequence
  Variant (4)..(4): Xaa in position 4 is any amino acid
  Variant (8)..(9): Xaa in position 8 to 9 is any amino acid
  Variant (11)..(12): Xaa in position 11 to 12 is any amino acid
  Variant (14)..(15): Xaa in position 14 to 15 is any amino acid
  Variant (17)..(23): Xaa in position 17 to 23 is any amino acid
  Variant (25)..(26): Xaa in position 25 to 26 is any amino acid
  Variant (28)..(28): Xaa in position 28 is any amino acid
  Variant (30)..(30): Xaa in position 30 is any amino acid
  Variant (37)..(50): Xaa in position 37 to 50 is any amino acid
  Variant (51)..(58): Xaa in position 51 to 58 is any or no amino acid
  Variant (62)..(62): Xaa in position 62 is any amino acid
  Variant (68)..(68): Xaa in position 68 is any amino acid
  Variant (70)..(71): Xaa in position 70 to 71 is any amino acid
  Variant (73)..(77): Xaa in position 73 to 77 is any amino acid
  Variant (79)..(80): Xaa in position 79 to 80 is any amino acid
  Variant (84)..(84): Xaa in position 84 is any amino acid
  Variant (87)..(90): Xaa in position 87 to 90 is any amino acid
  Variant (94)..(94): Xaa in position 94 is any amino acid
  Variant (100)..(100): Xaa in position 100 is any amino acid
  Variant (102)..(102): Xaa in position 102 is any amino acid
  Variant (104)..(104): Xaa in position 104 is any amino acid
  Variant (106)..(106): Xaa in position 106 is any amino acid
  Variant (110)..(110): Xaa in position 110 is any amino acid
  Variant (112)..(112): Xaa in position 112 is any amino acid
  Variant (114)..(116): Xaa in position 114 to 116 is any amino acid
  Variant (118)..(122): Xaa in position 118 to 122 is any amino acid
  Variant (124)..(127): Xaa in position 124 to 127 is any amino acid
  Variant (128)..(136): Xaa in position 128 to 136 is any or no amino acid
IALXAHDXXKXXLXXWXXXXXXXLXXHXLXATGTTGXXXXXXXXXXXXXXXXXXXXXXSGPXGGDQQXGXXIXXXXXDXXIFFXDPXXXXPHDXDVKALXRXAXVXNIPXAXNXXXAXXXXXSXXXXXXXXXXXXXDY

SEQ ID NO: 616 - protein, 58 aa, Artificial sequence
  protein pattern
  Variant (3)..(3): Xaa in position 3 is Phe, Leu or Met
  Variant (9)..(9): Xaa in position 9 is Ile, Leu, Met or Val
  Variant (11)..(11): Xaa in position 11 is Ala, Gly or Ser
  Variant (12)..(12): Xaa in position 12 is any amino acid
  Variant (14)..(14): Xaa in position 14 is Ala, Ser or Val
  Variant (15)..(15): Xaa in position 15 is Asp, Glu, Asn, Gln or Thr
  Variant (16)..(17): Xaa in position 16 to 17 is any amino acid
  Variant (18)..(18): Xaa in position 18 is Ile, Leu or Val
  Variant (20)..(20): Xaa in position 20 is any amino acid
  Variant (21)..(21): Xaa in position 21 is Leu, Met or Val
  Variant (22)..(22): Xaa in position 22 is Phe, Ile or Val
  Variant (25)..(25): Xaa in position 25 is any amino acid
  Variant (28)..(28): Xaa in position 28 is Phe, Leu or Met
  Variant (29)..(29): Xaa in position 29 is Glu, Asn or Thr
  Variant (30)..(31): Xaa in position 30 to 31 is any amino acid
  Variant (32)..(32): Xaa in position 32 is Ala or Pro
  Variant (35)..(35): Xaa in position 35 is Pro, Thr or Val
  Variant (37)..(37): Xaa in position 37 is Ile or Val
  Variant (38)..(38): Xaa in position 38 is Lys or Arg
  Variant (41)..(41): Xaa in position 41 is any amino acid
  Variant (43)..(43): Xaa in position 43 is Ile, Leu or Val
  Variant (44)..(44): Xaa in position 44 is Ala or Ser
  Variant (45)..(45): Xaa in position 45 is any amino acid
  Variant (46)..(46): Xaa in position 46 is Leu or Val
  Variant (47)..(47): Xaa in position 47 is any amino acid
  Variant (48)..(48): Xaa in position 48 is Asp, Glu or Asn
  Variant (49)..(49): Xaa in position 49 is Ile or Val
  Variant (50)..(50): Xaa in position 50 is Pro or Val
  Variant (51)..(51): Xaa in position 51 is any amino acid
  Variant (52)..(52): Xaa in position 52 is Ala or Cys
  Variant (53)..(53): Xaa in position 53 is any amino acid
  Variant (54)..(54): Xaa in position 54 is Asn or Thr
  Variant (55)..(55): Xaa in position 55 is any amino acid
  Variant (56)..(56): Xaa in position 56 is Ala, Cys or Ser
  Variant (57)..(57): Xaa in position 57 is Ser or Thr
GPXGGDQQXGXXIXXXXXDXXXFFXDPXXXXXHDXDXXALXRXXXXXXXXXXXXXXXA

SEQ ID NO: 617 - protein, 40 aa, Artificial sequence
  protein pattern
  Variant (2)..(2): Xaa in position 2 is Ala, Gly or Val
  Variant (3)..(3): Xaa in position 3 is Leu or Met
  Variant (4)..(4): Xaa in position 4 is Ile or Val
  Variant (5)..(5): Xaa in position 5 is Ala or Ser
  Variant (8)..(9): Xaa in position 8 to 9 is any amino acid
  Variant (11)..(11): Xaa in position 11 is any amino acid
  Variant (12)..(12): Xaa in position 12 is any or no amino acid
  Variant (14)..(22): Xaa in position 14 to 22 is any amino acid
  Variant (23)..(23): Xaa in position 23 is any or no amino acid
  Variant (25)..(26): Xaa in position 25 to 26 is any amino acid
  Variant (27)..(27): Xaa in position 27 is any or no amino acid
  Variant (29)..(29): Xaa in position 29 is any amino acid
  Variant (30)..(30): Xaa in position 30 is Phe, Ile or Leu
  Variant (31)..(31): Xaa in position 31 is any amino acid
  Variant (32)..(32): Xaa in position 32 is Ala, Cys or Gly
  Variant (35)..(35): Xaa in position 35 is Ser or Thr
  Variant (37)..(37): Xaa in position 37 is Ala or Gly
  Variant (38)..(39): Xaa in position 38 to 39 is any amino acid
  Variant (40)..(40): Xaa in position 40 is Ile, Leu or Val
IXXXXHDXXKXXLXXXXXXXXXXLXXXHXXXXTGXTXXXX

SEQ ID NO: 618 - DNA, 588 bp, Escherichia coli K12
  CDS (1)..(588): transl_table=11
atgagcgagcaacgcgtggtggtcatggggctgggcaacctgctgtgggccgatgaaggcttcggcgtgcgggtggcggaacggctgtatgcccattaccactggcccgagtatgtggagattgtcgatggcggtactcagggactgaacttgctggggtatgtcgaaagcgccagccatctgttgattctcgatgccattgactacgggctggaacctggaacgctgcgaacctatgccggagaacgcattccggcttatctcagcgcgaagaaaatgagcctgcatcagaacagtttctccgaagtgttggcgctggcggatatccgcggacatctgccagcacatattgccctcgtcggtctgcaacccgcaatgctcgacgactacggcggtagcctgagcgaactggcacgggagcaactgcccgctgcggaacaggcggcgctggcgcagcttgctgcgtggggaattgtgccgcaaccggctaatgaatcgcgctgtctcaattatgactgtctgtcgatggaaaattacgaaggcgttcgcttgcgccagtaccggatgacacaggaggagcagggatga

SEQ ID NO: 619 - protein, 195 aa, Escherichia coli K12
MSEQRVVVMGLGNLLWADEGFGVRVAERLYAHYHWPEYVEIVDGGTQGLNLLGYVESASHLLILDAIDYGLEPGTLRTYAGERIPAYLSAKKMSLHQNSFSEVLALADIRGHLPAHIALVGLQPAMLDDYGGSLSELAREQLPAAEQAALAQLAAWGIVPQPANESRCLNYDCLSMENYEGVRLRQYRMTQEEQG

SEQ ID NO: 620 - DNA, 609 bp, Salmonella enterica subsp. enterica serovar Typhi str. CT18
  CDS (1)..(609): transl_table=11
atggcagaagtaacaatcttagggcttggcaacctgctttgggcagatgaagggttcggcgtcagagctgcggaaaagctgtttgaacagtatgccgataacgagaaagttgacgttgttgatggcggtacgcaggggctggcgctgctgccctggctgcaacagacagaaaaactgttaatcatggatgctatcgattttggtatggcgccaggttcgctggcgatgtttcgtgatgaacaggttcccgcctatctgacggcgaaaaaacttagtttacatcagaccagtttttctgaagtgctggcattgctgcaattaaccggcggccagttatcggagattgtgctgattggcgtgcagccggaatgtctggatgactatggcgggagtcttacgccgcaggtaagggcgcaactgatgcctgcggtctatctcgcgcaggaagtgctggcgcaatggggtatcaccgcctcttcagcggccttgcccactgaaagactcaatcattacagcctgtgtatggaacgctacgaagatgaacggccagatgcgcaaagcgcttgccgggtcggcgatattcgggtgctacagagagagaaatcataa

SEQ ID NO: 621 - protein, 202 aa, Salmonella enterica subsp. enterica serovar Typhi str. CT18
MAEVTILGLGNLLWADEGFGVRAAEKLFEQYADNEKVDVVDGGTQGLALLPWLQQTEKLLIMDAIDFGMAPGSLAMFRDEQVPAYLTAKKLSLHQTSFSEVLALLQLTGGQLSEIVLIGVQPECLDDYGGSLTPQVRAQLMPAVYLAQEVLAQWGITASSAALPTERLNHYSLCMERYEDERPDAQSACRVGDIRVLQREKS

SEQ ID NO: 622 - DNA, 609 bp, Salmonella typhimurium LT2
  CDS (1)..(609): transl_table=11
atggcagaagtaacaatcttagggcttggcaacctgctttgggcagatgaagggttcggcgtcagagcggcggaaaagctgtttgaacagtatgccgataacgagaaagttgacgttgttgatggcggtacgcaggggctggcgctgctgccctggctgcaacagaccgaaaaactgttaatcatggatgctatcgattttggtatggcgccaggttcgctggcgatgtttcgtgatgaacaggttcccgcctatctgacggcgaaaaaactcagtttacatcagaccagtttttctgaagtgctggcattgctgcaattaaccggcggccagttatcggagattgtgctgattggcgtgcagccggaatgtctggatgactatggcgggagtcttacgccgcaggtaaaggcgcaactgatgcctgcggtctatctcgcgcaggaagtgctggcgcaatggggtatcaccgcctcttcagcggccttgcccactgaaagactcaatcattacagcctgtgtatggaacgctacgaagatgaacgcccagatgcgcaaagcgcttgccgggtcggcgatattcgggtgctacagagagagaaatcataa

SEQ ID NO: 623 - protein, 202 aa, Salmonella typhimurium LT2
MAEVTILGLGNLLWADEGFGVRAAEKLFEQYADNEKVDVVDGGTQGLALLPWLQQTEKLLIMDAIDFGMAPGSLAMFRDEQVPAYLTAKKLSLHQTSFSEVLALLQLTGGQLSEIVLIGVQPECLDDYGGSLTPQVKAQLMPAVYLAQEVLAQWGITASSAALPTERLNHYSLCMERYEDERPDAQSACRVGDIRVLQREKS

SEQ ID NO: 624 - DNA, 597 bp, Salmonella typhimurium LT2
  CDS (1)..(597): transl_table=11
atgaatgcgcaacgcgtagtggtgatggggttaggaaacctgctgtgggccgatgaaggattcggtatccgggtcgcggagcgtttgtatgcccgatatcactggcctgaagaggtagaaattgtggacggcggtacgcaagggctaaacctgttaggttatgttgagcaagccagccatctcctgctccttgacgcgatcgattacggcctggcgccgggcagcctgcgaacctatgccggcgagaaaatccccgcgtatctcagcgccaaaaaaatgagcctgcatcaaaacagtttttccgaagttctggcgctggccgacatccgcgggcatctgccctgtcacattgcgctggtcggcctgcaaccggcgctactggacgactacggcggtagcctgagcgaaatagctcgcagccagctaccggcggcagaacaggccgccctggcgcaactggccgcctgggggatcgtgccgcaggcaaatgaggtcgcacgctgcctgaactataaatgcctgtcgatggaaaattatgagggagtgcgcatacgtcagtatcagacacgtctggagggcaaaagaagtggcgaatga

SEQ ID NO: 625 - protein, 198 aa, Salmonella typhimurium LT2
MNAQRVVVMGLGNLLWADEGFGIRVAERLYARYHWPEEVEIVDGGTQGLNLLGYVEQASHLLLLDAIDYGLAPGSLRTYAGEKIPAYLSAKKMSLHQNSFSEVLALADIRGHLPCHIALVGLQPALLDDYGGSLSEIARSQLPAAEQAALAQLAAWGIVPQANEVARCLNYKCLSMENYEGVRIRQYQTRLEGKRSGE

SEQ ID NO: 626 - DNA, 654 bp, Rhodopseudomonas palustris CGA009
  CDS (1)..(654): transl_table=11
gtgcacggagctggattgcttcttcgcttcgctcctcgcaatgacgcattgaaacgtgaggactcaatgacagatgcgccccgcgtcctgatcctcggtatcggcaacattctgtgggccgacgaaggcttcggcgtgcgcgcggtcgaagcgtttcaccgggcctatgatgtgccggccaatgtcaccgtgctggatggcggcacgcaggggctgtatctcgtcaacttcctgcaggaccacgaccatctgctggtgttcgacgccatcgactacgggctcgagcccggcacgctgaagctggtgcgcggcgacgaagtgccgaaattcaccggcgccaagaagatgagcctgcatcagaccggtttccaggaggtgctgagcgccgcagatctgctcggtgccgcgccgcgcgagctggcgctgatcggctgccagccgctcgatctggaagattggggcggggcgctgaccgagccggtgcggggccgcatcgccgagtcgctggcgttggcctgcgcgatcctggcggagtggggtgtcgtggtggcgccacgcgcgacaccgctacccgaaggcgccgccctgctggccaatgatatcgaccacgaccattacgaacggcgcgaagccgccgcatctcccacgatttga

SEQ ID NO: 627 - protein, 217 aa, Rhodopseudomonas palustris CGA009
MHGAGLLLRFAPRNDALKREDSMTDAPRVLILGIGNILWADEGFGVRAVEAFHRAYDVPANVTVLDGGTQGLYLVNFLQDHDHLLVFDAIDYGLEPGTLKLVRGDEVPKFTGAKKMSLHQTGFQEVLSAADLLGAAPRELALIGCQPLDLEDWGGALTEPVRGRIAESLALACAILAEWGVVVAPRATPLPEGAALLANDIDHDHYERREAAASPTI

SEQ ID NO: 628 - DNA, 618 bp, Oligotropha carboxidovorans
  CDS (1)..(618): transl_table=11
gtgagtgaagagtcttcgattctgattctcggaatcggcaatgttttgtgggccgacgagggattcggggtgcgcgccgtcgagcgtctgcaccagcaatatgcttttcctgacaccgtcaccgtgatggacgggggcacgcagggcattttcctgctgccgcatgttcaggcttgctcgacccttatcattctcgatgccgtggattacgggctgccgcccggcaccctgaaactcgtcgaggacgacagcgtcccggctttcatgggagcaaagaaagtctctctccaccaagccggttttcaggaagttctgatcaccgccaagatgctcggctggacgccgcgccgcatcctgctggtcggccttcagccggaaatgatcgaggactatggcgggtcgctccgcccgttgatcgtgtcccgcatcgacgatgcgattgccgccgtgctcgccgaattgcagcggctgaacgtgccggtgcagcgccgcgacagtgccgccgaggaactcggtccgggcgcactggagcagcgtctttacgaaagcggccgccccagcgaaaacgccgcgtgccgcacaggcgacgaacgtttcctctcggactggagcgcctga

SEQ ID NO: 629 - protein, 205 aa, Oligotropha carboxidovorans
MSEESSILILGIGNVLWADEGFGVRAVERLHQQYAFPDTVTVMDGGTQGIFLLPHVQACSTLIILDAVDYGLPPGTLKLVEDDSVPAFMGAKKVSLHQAGFQEVLITAKMLGWTPRRILLVGLQPEMIEDYGGSLRPLIVSRIDDAIAAVLAELQRLNVPVQRRDSAAEELGPGALEQRLYESGRPSENAACRTGDERFLSDWSA

SEQ ID NO: 630 - DNA, 606 bp, Methylococcus capsulatus str. Bath
  CDS (1)..(606): transl_table=11
atgcctccccgcgtcctgatcttgggcatcggcaacctgctgtgggcggacgaaggcttcggcgtgcgcgtcgcccaggcattgcagcgggactacgtcttccccgagaacgtcaccgtgatggacggcggcacccaggggctggcactgatcccatacgtccaggaaagcgacgtgctcatcatcgccgatgcggtggacttcggcctggcgccggcctcgctggtcgaagcccgggacgaggatgtgcccgcctacctgcattcgggcaagaccagcctgcaccaggtcagcttccaggaggtgctggccctgtgcaagctgatggggcaagggccggagcgactccatctggtgggcgtacagcccgtcgacatggaggattatggcggcagcctgacaccgcccgtcaaggcccaactcgaaccggccatcgcccggatactcgccgtctgcgcagaactcggcctggccggctggcgccggcccaaaggaaactgcacggccgacgccctggacatgacgcagtacgagcgtcagcgaccctcggccgaagaagcctgccgcatcggcgacgcccgcttcctgccgggcgatccgcgctag

SEQ ID NO: 631 - protein, 201 aa, Methylococcus capsulatus str. Bath
MPPRVLILGIGNLLWADEGFGVRVAQALQRDYVFPENVTVMDGGTQGLALIPYVQESDVLIIADAVDFGLAPASLVEARDEDVPAYLHSGKTSLHQVSFQEVLALCKLMGQGPERLHLVGVQPVDMEDYGGSLTPPVKAQLEPAIARILAVCAELGLAGWRRPKGNCTADALDMTQYERQRPSAEEACRIGDARFLPGDPR

SEQ ID NO: 632 - DNA, 615 bp, Dechloromonas aromatica RCB
  CDS (1)..(615): transl_table=11
atgaataccaaacgcattctggtcttgggtatcggcaacatcctgtgggccgatgaaggcttcggggtacgctgcgtcgaagcgctgaacgacggctgggagtttccgccgcaagtgacactgatggatggcggcacgcagggcctttacctgctgccctacgtgcaggaagccgattgcctgctggtcttcgatgccgtcgattacggcgatccggccggcaagctgcgcgaagtcgtcggcgatcaggtaccgcgcttcatgggcgccaagaagatgagcctgcaccagaccggctttcaggaagtgctgatggcggccgagctgaccaacaaattgccggccgaactggtgctgatcggtgtccagccggaagaacttgaagactacggtggcagtctgcgcgacatcgtcaaggcgcagatggtgccgtccttgaatctggcgctcgactggctggagcgctggggcgtggtcggtcgtgtccgtgaaggcaaggccgaaagcctgaccgatgcggcgctggccatggacgtttacgaaggggaacggccgccggccgatcaggcttatcgcctgggcgatgcccgtttcctgaatatggaagctgcctga

SEQ ID NO: 633 - protein, 204 aa, Dechloromonas aromatica RCB
MNTKRILVLGIGNILWADEGFGVRCVEALNDGWEFPPQVTLMDGGTQGLYLLPYVQEADCLLVFDAVDYGDPAGKLREVVGDQVPRFMGAKKMSLHQTGFQEVLMAAELTNKLPAELVLIGVQPEELEDYGGSLRDIVKAQMVPSLNLALDWLERWGVVGRVREGKAESLTDAALAMDVYEGERPPADQAYRLGDARFLNMEAA

SEQ ID NO: 634 - DNA, 621 bp, Rhodobacter sphaeroides 2.4.1
  CDS (1)..(621): transl_table=11
atgccagcatctccacccgcaagggtgctcattctcggtatcggcaacgtgctgtgggcagacgagggattcggcccccgctgcatcgagatccttgccgagagccacgccttcccctcgcaggtcaagctgctcgacggcggcacgcagggcctctacctgctgcccttcctcgaagaggccgacgccctcctcgtgttcgacgcggtcgattacggtctcgtgcccggcacgctgatgatcgcgcgcgacgacgaagtgcccgccttcatgggcgccaagaagatgagcctgcaccagaccggctttcaggacgtgctggccacggcccagcttctcgggcgctgcccggcgcggctgacgctgatcggctgccagcccgaggagctggaggattacggcggctcgctgcgcccggtcgtggcggcccagatcgcaccggcgatcggcctcgcgctggccgagctcgcccactggggcgtgaccccgctgcccggccgcagcccggccgaagggctcgccgatccgtcgctgcgccgggacgcctacgagacgggccgccccggccccgacgaggcctgccgcacgggcgacgcccgcttcttcccggaaccctgctga

SEQ ID NO: 635 - protein, 206 aa, Rhodobacter sphaeroides 2.4.1
MPASPPARVLILGIGNVLWADEGFGPRCIEILAESHAFPSQVKLLDGGTQGLYLLPFLEEADALLVFDAVDYGLVPGTLMIARDDEVPAFMGAKKMSLHQTGFQDVLATAQLLGRCPARLTLIGCQPEELEDYGGSLRPVVAAQIAPAIGLALAELAHWGVTPLPGRSPAEGLADPSLRRDAYETGRPGPDEACRTGDARFFPEPC

SEQ ID NO: 636 - DNA, 597 bp, Rhodospirillum rubrum ATCC 11170
  CDS (1)..(597): transl_table=11
atgaacatccccggcgggctccccttggcaagggaggaggacgaggaggattgcgccgccctggtgctgggcatcggcaatctgctgtgggccgacgagggctttggcgtgcgctgcgtcgaagagatgcacgccacctgtgacctagcgcccggggtgcggttgctcgatggcggcacccaggggctttatctggtgggcgccatcgcccgggcggcgcggctgatcgtttttgacgccatcgattatggcgaggcgccgggcaccctgaaggtggtgttcggcgaggaggtcgccggtttcatgggctgtcgcaagatgagcctgcaccagaccggctttcaggacgtgttggcggcggccgatctgctggggcgccgaccgccggtaatggcgttgatcggcgtgcaggccgaagccctggacgactggggcggccctttgcgccccgtcgtgcgggcccaggtcggcccggccatcgcccaggcctgcgccctgcttgccgagtgggggttggcctgtcggccgcgcccggcggcgccggcggccggcctgctggggttcggcctgtcaagctcggcctatgaacagcgttaa

SEQ ID NO: 637 - protein, 198 aa, Rhodospirillum rubrum ATCC 11170
MNIPGGLPLAREEDEEDCAALVLGIGNLLWADEGFGVRCVEEMHATCDLAPGVRLLDGGTQGLYLVGAIARAARLIVFDAIDYGEAPGTLKVVFGEEVAGFMGCRKMSLHQTGFQDVLAAADLLGRRPPVMALIGVQAEALDDWGGPLRPVVRAQVGPAIAQACALLAEWGLACRPRPAAPAAGLLGFGLSSSAYEQR

SEQ ID NO: 638 - DNA, 666 bp, Ralstonia metallidurans CH34
  CDS (1)..(666): transl_table=11
atgcgcaccactccgaccgaatccacctgtcaccccggtggtgacactctgccggcccgcatcgtcgtgctgggcatcggcaacctgctctgggccgacgaaggctttggcgtgcgctgcatcgaagccctgcagcgccgctgggagttcgccgaccacgtgcagctgatcgacggcggcacccagggcctgtacctgatccagcacgtgcaggaggccgaccgcctgctcatcttcgacgccatcgactacggcctggcgcccggcaccttgaagctggtgcgagacgacgacgtgccgcgcttcatgggcgccaagaagatgagcctgcaccagaccggtttccaggaagtgctgtcgctggccacgctgaccggcaagtacccgcagcaggtgctgctgatcggctgccagccgcaggagctggaagactacggcggcagcctgcgcccggtcgtcaaggccgcgatggaggacgcactggcgctgggcgtggccgaactcgaacgctggggcgcacgccccgtcgaacgccggaccccgttggccccgcgcgaggccgtgacgttggacgagctggcgctgaccgcctacgaagcgcagcgacccgccgcggaagaagcctgccgcatcggcgacgaccggctcctggtgaaggacctctga

SEQ ID NO: 639 - protein, 221 aa, Ralstonia metallidurans CH34
MRTTPTESTCHPGGDTLPARIVVLGIGNLLWADEGFGVRCIEALQRRWEFADHVQLIDGGTQGLYLIQHVQEADRLLIFDAIDYGLAPGTLKLVRDDDVPRFMGAKKMSLHQTGFQEVLSLATLTGKYPQQVLLIGCQPQELEDYGGSLRPVVKAAMEDALALGVAELERWGARPVERRTPLAPREAVTLDELALTAYEAQRPAAEEACRIGDDRLLVKDL

SEQ ID NO: 640 - DNA, 627 bp, Alkalilimnicola ehrlichei MLHE-1
  CDS (1)..(627): transl_table=11
atgggacaggaaccagacattctcgtgttgggcatcggcaacctgctctgggcggatgagggtttcggtgtgcgtgccgcagaggcgctggcggcggagtatgacctgccggaggatcgggtacggctcctcgatggcggcacccaggggttgtatctgctggagtacgtgacggccgcacaccgcctgctcgtattcgatgcggtggattacgccttgccgccgggcaccctcaaggtggttcgtggtgcggatgttccgaagttcatgggcgccaagaaaatgagccttcatcagacaggctttcaagaggtcctcgcaacggcggacctcttgggtcaactgcctgaggccctcgtattgatcggggttcaacccgaggagctggaggattacggcggtagccttcgggcgagtgtcaaggcccgggtgccggaggcactggcgattgcgttggattgccttcgcgaatggggggtatcgcccgcgccgcgctgccggtccgccaggccgcggctgaacgattccgctctggatatggcccgctacgaggcggatcggccggatgagggggcagcctgccgctatggtgatccgcgtgttctggccgttagggggcaagcctga

SEQ ID NO: 641 - protein, 208 aa, Alkalilimnicola ehrlichei MLHE-1
MGQEPDILVLGIGNLLWADEGFGVRAAEALAAEYDLPEDRVRLLDGGTQGLYLLEYVTAAHRLLVFDAVDYALPPGTLKVVRGADVPKFMGAKKMSLHQTGFQEVLATADLLGQLPEALVLIGVQPEELEDYGGSLRASVKARVPEALAIALDCLREWGVSPAPRCRSARPRLNDSALDMARYEADRPDEGAACRYGDPRVLAVRGQA

SEQ ID NO: 642 - DNA, 639 bp, Oceanospirillum sp. MED92
  CDS (1)..(639): transl_table=11
atgtctgaacaggttccatctgaagaaaagagcgtcctgattctggggattggtaatgtgctttgggcagatgaaggcttcggcgttcgttgtgtagaaaccctgaataaacagtgtcgttttgctgacaatgtgaagctgatggatgggggtacgcaagggatctatctggttcagcatgtacaaaaggcagatattttggtggtgttcgatgcgatcgattatggattgaagccgggaacgctgagagagatctatgatcaggatgtccctaagtttatgggcgctaagcagatgagcctgcatcagacgggctttcaggaagtacttgcgatggctgaatttaccggtagttatccagagcagcttctgctgatcggttgtcagccggttgagcttgaagattttggaggcagcttacgcgatgaggtcaaagctcaggtcgcccctgccattagtatcgctttgaattacctgaaagagagaggcatcgtccccgtttctgaccagacgggtggggaaggtttagcgccaggtgaactggagatgcaaacctatgaatcaggtaggccttccgaagagagcgcgtttcgaaaaggtgatattcgttttatgagcagtgaagaaggtcagagttaa

SEQ ID NO: 643 - protein, 212 aa, Oceanospirillum sp. MED92
MSEQVPSEEKSVLILGIGNVLWADEGFGVRCVETLNKQCRFADNVKLMDGGTQGIYLVQHVQKADILVVFDAIDYGLKPGTLREIYDQDVPKFMGAKQMSLHQTGFQEVLAMAEFTGSYPEQLLLIGCQPVELEDFGGSLRDEVKAQVAPAISIALNYLKERGIVPVSDQTGGEGLAPGELEMQTYESGRPSEESAFRKGDIRFMSSEEGQS

SEQ ID NO: 644 - DNA, 627 bp, Xanthobacter autotrophicus Py2
  CDS (1)..(627): transl_table=11
atggacgacgatcggcaagttgcgcgcattctggtgctcggcatcggcaacatcttgtgggctgacgagggcttcggcgtccgcgtgctggaagcgctcgacgcttcccatgtctttcccgacaccgtcaccctgctcgatggcggcacccagggcctctatctgctcccctatctggaagaggcggacggcgtcgtcatcgtggatgcggtggattacggcctcgttccgggcacgctccatatcctcgccgatggtgaggtgcccgccgtgctcgccgcccgcaaggtgagcctgcaccagaccggcttccaggaaatcctcggcctgctcgctttgcgcggcaagacgcccgcgcgcatcgtgctggtgggcgtgcagcccgagctgctggacgattacgggggcggcctcaccgccaccatcgccgcgcaggtggagccggcggcgcgcaaggtgctcgacatcctgaaggacgagttcggcgtgatgcccgcgccccgcgcgggagagggcagcctcgtcaccgccgccgtcggccggcagtcctacgaaagcgagcgcccgagcgcggaggcggcgtgccgcatcggcgatccccgcgtcctcgccacctcccggagctga

SEQ ID NO: 645 - protein, 208 aa, Xanthobacter autotrophicus Py2
MDDDRQVARILVLGIGNILWADEGFGVRVLEALDASHVFPDTVTLLDGGTQGLYLLPYLEEADGVVIVDAVDYGLVPGTLHILADGEVPAVLAARKVSLHQTGFQEILGLLALRGKTPARIVLVGVQPELLDDYGGGLTATIAAQVEPAARKVLDILKDEFGVMPAPRAGEGSLVTAAVGRQSYESERPSAEAACRIGDPRVLATSRS

SEQ ID NO: 646 - DNA, 459 bp, Pseudomonas hydrogenovora
  CDS (1)..(459): transl_table=11
atgcatagccagccattcgtgaatccgcgaccgcaaccgaccgaggcagcgggaccgatcatcgtgctcggtatcggtaacgtattgtgggccgatgaaggcctcggggtccgttgtgtcgagctgctgcaacagcgttacgcgttcgccccgcatgtgcagctggtcgacggcggaacgcaggggctttatctgatctcgtacgtgcagtcggccgaacgactgctgattctcgatgcgatcgattatggtctggcacccggcacgctgaggatcatcgaggacgaggaagtaccgaaattcctcggcgcgaagaagatgagcctccatcaaaccggtttccaggaagtgctgcaactggccgagctgaccggccactacccgcagcgcgtggtgctcgtcggctgtcagcccgaggagctcgacgattacggcggcagtctgcgtccggccgtgtaa

SEQ ID NO: 647 - protein, 152 aa, Pseudomonas hydrogenovora
MHSQPFVNPRPQPTEAAGPIIVLGIGNVLWADEGLGVRCVELLQQRYAFAPHVQLVDGGTQGLYLISYVQSAERLLILDAIDYGLAPGTLRIIEDEEVPKFLGAKKMSLHQTGFQEVLQLAELTGHYPQRVVLVGCQPEELDDYGGSLRPAV

SEQ ID NO: 648 - DNA, 582 bp, Bradyrhizobium sp
  CDS (1)..(582): transl_table=11
gtgaagccgacattctcgcaagacgatcgcatcctggtgctcggcatcggcaatatcctgtgggccgacgaagggtttggcgtgcgcgcggtggaggagtttcaccgccgctacgccgtgcccgacaacgtcaccatcctcgatggcggcacgcaggggctctatctcgtcaactatctggaagaggcggaccgcctgatcgtgttcgacgcgatcgactatggcctcgagcccggccagttaaagcttgtgcgtgacgacgaggtgccgcgtttcaccggcgccaagaagatgagcctgcaccagaccggcttccaggaagtcatcagcgcggccgacctgctcggccgttgcccgaaacatctggtgctgatcggctgccagccgctcgatctcgaagattggggcggaccgctgacgccgccggtgcgcgaccagatcgcgccggcgatcaatctcgcttgcgccatcttggccgaatggggcctcacggtgagccaacgcgcggagccattggcagatatcgagcgactgctcgccaatgacatcgatcatctccattacgagacgcggccggcctga

SEQ ID NO: 649 - protein, 193 aa, Bradyrhizobium sp
MKPTFSQDDRILVLGIGNILWADEGFGVRAVEEFHRRYAVPDNVTILDGGTQGLYLVNYLEEADRLIVFDAIDYGLEPGQLKLVRDDEVPRFTGAKKMSLHQTGFQEVISAADLLGRCPKHLVLIGCQPLDLEDWGGPLTPPVRDQIAPAINLACAILAEWGLTVSQRAEPLADIERLLANDIDHLHYETRPA

SEQ ID NO: 650 - DNA, 582 bp, Bradyrhizobium sp
  CDS (1)..(582): transl_table=11
atgctgagtccggagaacaagaaaaggatcctggtgctcggcatcggcaatatcctgtgggccgatgagggattcggcgtgcgggtggtagaggagttttatcgtcgctacaccatcgatgacaacgtctccatcctcgatggtggcacgcaggggctctatctcgtcggttttctcgagcaggccgattgcctgatcgtgttcgatgccgtcgattatggactttctcccggacagttgaagctcgtgcgagatgacgaggtgccgaaatttaccgctgccaagaagctgagcctgcatcagaccggctttcaggaggtcttgagtgcggccgacctgcttggtcgctgcccgcgagagctcgctctgatcggctgtcagccgctggacctggagcattggggcggtccgttgactgcaccggtgcgtgttcagatcacgcctgcgatcgaactggcctgcaacctgctggcccagtggggcgcaccggcaagaccgcgggccgccccgctgcctgcatcagaacggctgttggggaacaatatcgaccatgtcaattatgaaagggcgcagccgatctag

SEQ ID NO: 651 - protein, 193 aa, Bradyrhizobium sp
MLSPENKKRILVLGIGNILWADEGFGVRVVEEFYRRYTIDDNVSILDGGTQGLYLVGFLEQADCLIVFDAVDYGLSPGQLKLVRDDEVPKFTAAKKLSLHQTGFQEVLSAADLLGRCPRELALIGCQPLDLEHWGGPLTAPVRVQITPAIELACNLLAQWGAPARPRAAPLPASERLLGNNIDHVNYERAQPI

SEQ ID NO: 652 - DNA, 627 bp, Azorhizobium caulinodans
  CDS (1)..(627): transl_table=11
atggacggcgaacacatcctcgtgcttggcatcggcaacatcctgtgggcggacgaaggcttcggcgtccgcgtggtggaagccctcgatcgcgccttcactttccccgaccatgtgacgctgctcgatggcggcacgcagggcctctatctcctgcccgcgttggaagaggcggatgtggtggtgatcctcgatgcggtggattacggcctgccccccggcaccctccattgtctgtccgatggcgacgttcccgccgtgctcggcgcgcgcaagctgagccttcaccagaccggattccaggaggtgctggcgctgctgcaactgcgcggctgcctgccgcgccatctgcgcctcgtgggcgtccagccccatacgcttgatgattacggtggagggctgacccctccggtggcggcgcaggtcgcccccgccgtgaccgaggtcttgcgcctccttactgaagagttcgacgttccggtgcggccgcgcgacagcgaaagctcggaggggctcgtcaccgccgccgtggcgcgtgccgcttatgaggcgggacggccgagcgcgcaggacgcctgccgcatcggcgacgcccgcgtgctcgcccgcaccttcggcgaggcctga

SEQ ID NO: 653 - protein, 208 aa, Azorhizobium caulinodans
MDGEHILVLGIGNILWADEGFGVRVVEALDRAFTFPDHVTLLDGGTQGLYLLPALEEADVVVILDAVDYGLPPGTLHCLSDGDVPAVLGARKLSLHQTGFQEVLALLQLRGCLPRHLRLVGVQPHTLDDYGGGLTPPVAAQVAPAVTEVLRLLTEEFDVPVRPRDSESSEGLVTAAVARAAYEAGRPSAQDACRIGDARVLARTFGEA

SEQ ID NO: 654 - DNA, 609 bp, Ralstonia eutropha
  CDS (1)..(609): transl_table=11
gtggtagttgcaatgggcattggcaatgtgctctgggcggatgagggctttggcgtgcgctgcattgaaaccctccagcagcgctatcagttcgcaccgcaggtatgcctggtcgacgggggcacgcaggggctctatctgatccaccacgtgcaggctgcgtcgcgcctgctgatcttcgatgcgatcgactatggcctgcctccaggaacgctgagaattatcgaagacgaggcggtgccgaaattccttggggccaagaagatgagcctgcaccagaccggcttccaggaagtactgttgctcgcccagttgacgggacagtacccgcagcaggtggtgctgatcggctgtcagccggaggagttggaggattatggcggcagtctaaggcgggtgatgaaggctgcggtggaggatgcggtggagaaaggggcggacttgctgcggagatggggcgggatgccggtgcctcgcactgcggagcttgcgcctgccgaggccgtgaccgtgccgcatctggcgctcgatcgctacgaagccgaacgtccttcgcctcgggccgcctgccggattggcgatgaacgttttatgccacaggatttgtga

SEQ ID NO: 655 - protein, 202 aa, Ralstonia eutropha
MVVAMGIGNVLWADEGFGVRCIETLQQRYQFAPQVCLVDGGTQGLYLIHHVQAASRLLIFDAIDYGLPPGTLRIIEDEAVPKFLGAKKMSLHQTGFQEVLLLAQLTGQYPQQVVLIGCQPEELEDYGGSLRRVMKAAVEDAVEKGADLLRRWGGMPVPRTAELAPAEAVTVPHLALDRYEAERPSPRAACRIGDERFMPQDL

SEQ ID NO: 656 - DNA, 579 bp, Bradyrhizobium japonicum
  CDS (1)..(579): transl_table=11
atgccgacatcctcgcaagacaatcgcatcctggtgctcggcatcggcaacatcctgtgggccgacgaaggctttggcgtgcgcgcggtggaggagttccaccgccgctacgccgtgcctgacaacgtcaccatcctcgacggcggcacgcaggggctgtacctcgtgaactatctggaggaggccgaccgccttatcgtgttcgacgccatcgactatgggctcgagcccggccggttgaagctcgtgcgcgacgacgaggtgcctcgcttcaccggcgccaagaagatgagcctgcaccagaccggcttccaggaggtcatcagcgccgccgacctgctcggccggtgcccgaagcatctcgtgctgatcggctgccagccgctcgatctcgaagactggggcgggccgctgacgccgccggtgcgcgaccagatcgcgccctcgatcgatctcgcctgccaggtcttggccgagtggggcgtcacggtcagccgccgcagcgcgccattggcggagtccgagcggctgctcgccaatgacatcgatcacgccaattacgagatgcggccggcctga

SEQ ID NO: 657 - protein, 192 aa, Bradyrhizobium japonicum
MPTSSQDNRILVLGIGNILWADEGFGVRAVEEFHRRYAVPDNVTILDGGTQGLYLVNYLEEADRLIVFDAIDYGLEPGRLKLVRDDEVPRFTGAKKMSLHQTGFQEVISAADLLGRCPKHLVLIGCQPLDLEDWGGPLTPPVRDQIAPSIDLACQVLAEWGVTVSRRSAPLAESERLLANDIDHANYEMRPA

SEQ ID NO: 658 - DNA, 609 bp, Rhizobium leguminosarum bv
  CDS (1)..(609): transl_table=11
atgaccatcccgtatcccctgggacctccgccggcgcctcgtattctcgtgcttggcatcggcaatatcctctgggccgacgagggttttggcgtgcgtgcggtcgaggcgttccacaaagcctatgaactgtccgacaatgtcaccattctcgatggcggcacgcaggggctctatctcgtgcagttcgtcaacgagcacgaccggctgatcgtcttcgatgcgatcgactacggcctcgagccgggcacgatgaaggtggtggaagacgacgaagtgccgaaattcaccggcgccaagaagatgagcctgcaccagaccggcttccaggaggtgctgagtgccgccgacttcatggggcactatccggagcggttgaccctgattggctgccagccactcgatctcgaggattggggtggcccgctgacggcgccggtcaggggagtcatacccgcggccatcgaaacggcggtccgagtattgagaagctggggtgtcgccgtcacggcgcgcccggaaggcgcggcggttccgccgctcctcgaacacgatatcgatttcgaacgttacgagcgccgtgccgaaccggccgcgttgaactgctga

SEQ ID NO: 659 - protein, 202 aa, Rhizobium leguminosarum bv
MTIPYPLGPPPAPRILVLGIGNILWADEGFGVRAVEAFHKAYELSDNVTILDGGTQGLYLVQFVNEHDRLIVFDAIDYGLEPGTMKVVEDDEVPKFTGAKKMSLHQTGFQEVLSAADFMGHYPERLTLIGCQPLDLEDWGGPLTAPVRGVIPAAIETAVRVLRSWGVAVTARPEGAAVPPLLEHDIDFERYERRAEPAALNC

SEQ ID NO: 660 - DNA, 633 bp, Rhodobacter capsulatus
  CDS (1)..(633): transl_table=11
atgccagcattcaaacctgaacgggttcttgttctgggcatcggcaacgtgctttgggccgacgagggctttggcgtgcgctgtgtcgagcggatggccgaaacccatgcgctgcccgccaatgtccggctgctcgatggcggcacgcaggggctttacctgctgccgtttctggaagaggccgaggcgctgatcgtctttgacgcggtcgatttcggcttcacccccggcacgctggtcacgatgcgtgacgacgacgtgcccgccttcatgggcgcgaaaaagatgagcctgcatcagaccggctttcaggacgtcatcgccacggcgcagctgatgggctattgcccgtcccgcatgacgctgatcggctgccagccggtcgagctggaggattacggcggctccctgcgtccggccgtggccgggcagatcgatttcgccatcgccgaggcggtgcgggaactgcgcgcctggggcatcgaggtgacgaagggcgcgacgatcagcaacgatctggtcgatccctcgctggcgcgtgacgcctatgaacgcggccgcccctccgaggacgaggcctgccggatcggcgatcaccgcttcttcccctcggccgccaaggtccgcgcctga

SEQ ID NO: 661 - protein, 210 aa, Rhodobacter capsulatus
MPAFKPERVLVLGIGNVLWADEGFGVRCVERMAETHALPANVRLLDGGTQGLYLLPFLEEAEALIVFDAVDFGFTPGTLVTMRDDDVPAFMGAKKMSLHQTGFQDVIATAQLMGYCPSRMTLIGCQPVELEDYGGSLRPAVAGQIDFAIAEAVRELRAWGIEVTKGATISNDLVDPSLARDAYERGRPSEDEACRIGDHRFFPSAAKVRA

SEQ ID NO: 662 - DNA, 666 bp, Thiocapsa roseopersicina
  CDS (1)..(666): transl_table=11
atgcgatccgatccggagatccttgtcctcggcatcggcaatctcctctgggccgacgaaggcttcggcgtgcgcgcggtggaggcccttcaaagacactgggtgatgtcgtccaacgtgcagctgctcgacggcgggacacaggggatctacctggttgatcgggtgcgcaaggccgatgtactggtggtcttcgacgcggtcgactacgggctgccgccgggcaccatgaagcgggtcgaggacgacgaggtgccgcgcttcctcggtgccaagaagatgagcctgcaccaaaccggctttcaggaggtgctcgcgcttgccgccatgctcggcgactatccgaagcatctcctcctgatcggcgttcagcctgtcgagttggatgacttcggcggtagcctccgcccgcagatcaaggagcggatcaccccggcgatcgagatggcattggagtatctggcgcagttcggtgtcgtcgcgcggcggcgagaggattcgactgtcgactcccctcatctgccacacccgtcgctcgatttgatcgcgtacgaatccggccgaccgggacccgagatcgcctgccgcatcggcgacgagcgcgtcctgacgagcctgtccgcccggaccgtccaacccggaaatccacacggagatcgtcaatga

SEQ ID NO: 663 - protein, 221 aa, Thiocapsa roseopersicina
MRSDPEILVLGIGNLLWADEGFGVRAVEALQRHWVMSSNVQLLDGGTQGIYLVDRVRKADVLVVFDAVDYGLPPGTMKRVEDDEVPRFLGAKKMSLHQTGFQEVLALAAMLGDYPKHLLLIGVQPVELDDFGGSLRPQIKERITPAIEMALEYLAQFGVVARRREDSTVDSPHLPHPSLDLIAYESGRPGPEIACRIGDERVLTSLSARTVQPGNPHGDRQ

SEQ ID NO: 664 - DNA, 630 bp, Azotobacter chroococcum mcd 1
  CDS (1)..(630): transl_table=11
atgacaggctccagccccaacatcctcattctcggtatcggcaatctgctctgggcggacgaaggcttcggcgtgcgctgcgtcgagctgctcaacgagcgctaccgctttcccgacggcgtgcggctgatggacggcggcacccagggcatctacctggtgcagcacgtccagcaggccgactgcctgatcgtcttcgacgccgtcgactacggcctggcgcccggcaccctgaaggtcgtgcgcgacgacgaggtgcccaggttcatgggtgccaagcgcatgagcctgcaccagaccggtttccaggacgtgctggcgctcgccgcgttcaccggcgcctatccgcgcgagctgctgctggtcggcgtgcagcccgcggagctggaggacttcggcggcagcctgcgcgaaccggtgcgcgcccagctggagccggcgctggcgatcgccctggcgttcctcgccgaacgcggggtgctcgccacgccgcgcgagggcgatgccgagcaactggccccggcgcagctggccctgggccgctacgaggcggaacgcccggccgaggagctggcctaccgccacggcgacatccgcttcatcgcccagccgggccgggaggacgactga

SEQ ID NO: 665 - protein, 209 aa, Azotobacter chroococcum mcd 1
MTGSSPNILILGIGNLLWADEGFGVRCVELLNERYRFPDGVRLMDGGTQGIYLVQHVQQADCLIVFDAVDYGLAPGTLKVVRDDEVPRFMGAKRMSLHQTGFQDVLALAAFTGAYPRELLLVGVQPAELEDFGGSLREPVRAQLEPALAIALAFLAERGVLATPREGDAEQLAPAQLALGRYEAERPAEELAYRHGDIRFIAQPGREDD

SEQ ID NO: 666 - DNA, 20 bp, Artificial sequence
  primer
atgagcgagcaacgcgtggt

SEQ ID NO: 667 - DNA, 24 bp, Artificial sequence
  primer
ttatccctgctcctcctgtgtcat

SEQ ID NO: 668 - protein, 178 aa, Artificial sequence
  consensus sequence
  Variant (6)..(6): Xaa in position 6 is any amino acid
  Variant (17)..(18): Xaa in position 17 to 18 is any amino acid
  Variant (20)..(30): Xaa in position 20 to 30 is any amino acid
  Variant (31)..(31): Xaa in position 31 is any or no amino acid
  Variant (33)..(35): Xaa in position 33 to 35 is any amino acid
  Variant (43)..(43): Xaa in position 43 is any amino acid
  Variant (45)..(53): Xaa in position 45 to 53 is any amino acid
  Variant (55)..(57): Xaa in position 55 to 57 is any amino acid
  Variant (60)..(60): Xaa in position 60 is any amino acid
  Variant (64)..(65): Xaa in position 64 to 65 is any amino acid
  Variant (68)..(68): Xaa in position 68 is any amino acid
  Variant (70)..(76): Xaa in position 70 to 76 is any amino acid
  Variant (79)..(82): Xaa in position 79 to 82 is any amino acid
  Variant (86)..(86): Xaa in position 86 is any amino acid
  Variant (92)..(92): Xaa in position 92 is any amino acid
  Variant (98)..(103): Xaa in position 98 to 103 is any amino acid
  Variant (105)..(106): Xaa in position 105 to 106 is any amino acid
  Variant (108)..(111): Xaa in position 108 to 111 is any amino acid
  Variant (113)..(113): Xaa in position 113 is any amino acid
  Variant (115)..(115): Xaa in position 115 is any amino acid
  Variant (118)..(119): Xaa in position 118 to 119 is any amino acid
  Variant (121)..(121): Xaa in position 121 is any amino acid
  Variant (123)..(123): Xaa in position 123 is any amino acid
  Variant (126)..(126): Xaa in position 126 is any amino acid
  Variant (128)..(131): Xaa in position 128 to 131 is any amino acid
  Variant (132)..(137): Xaa in position 132 to 137 is any or no amino acid
  Variant (139)..(145): Xaa in position 139 to 145 is any amino acid
  Variant (147)..(149): Xaa in position 147 to 149 is any amino acid
  Variant (150)..(150): Xaa in position 150 is any or no amino acid
  Variant (152)..(161): Xaa in position 152 to 161 is any amino acid
  Variant (162)..(166): Xaa in position 162 to 166 is any or no amino acid
  Variant (168)..(176): Xaa in position 168 to 176 is any amino acid
LGIGNXLWADEGFGVRXXEXXXXXXXXXXXXVXXXDGGTQGLXLXXXXXXXXXLXXXDAXDYGXXPGXLXXXXXXXVPXXXXAKKXSLHQTXFQEVLXXXXXXGXXPXXXXLXGXQPXXLXDXGGXLXXXXXXXXXXAXXXXXXXLXXXXGXXXXXXXXXXXXXXXLXXXXXXXXXYE

SEQ ID NO: 669 - protein, 60 aa, Artificial sequence
  protein pattern
  Variant (2)..(4): Xaa in position 2 to 4 is any amino acid
  Variant (8)..(8): Xaa in position 8 is any amino acid
  Variant (10)..(10): Xaa in position 10 is Ile, Leu or Val
  Variant (11)..(12): Xaa in position 11 to 12 is any amino acid
  Variant (13)..(13): Xaa in position 13 is Ile, Leu or Val
  Variant (14)..(14): Xaa in position 14 is Ala, Glu, Asn, Gln or Thr
  Variant (15)..(18): Xaa in position 15 to 18 is any amino acid
  Variant (19)..(19): Xaa in position 19 is Leu or Val
  Variant (20)..(21): Xaa in position 20 to 21 is Ile, Leu or Val
  Variant (22)..(22): Xaa in position 22 is any amino acid
  Variant (25)..(25): Xaa in position 25 is Ile or Val
  Variant (27)..(27): Xaa in position 27 is Phe or Tyr
  Variant (28)..(28): Xaa in position 28 is Ala or Gly
  Variant (29)..(30): Xaa in position 29 to 30 is any amino acid
  Variant (31)..(31): Xaa in position 31 is Ala or Pro
  Variant (32)..(32): Xaa in position 32 is Ala or Gly
  Variant (33)..(33): Xaa in position 33 is any amino acid
  Variant (34)..(34): Xaa in position 34 is Leu or Met
  Variant (35)..(38): Xaa in position 35 to 38 is any amino acid
  Variant (39)..(39): Xaa in position 39 is Asp or Gly
  Variant (40)..(40): Xaa in position 40 is Ala, Asp, Glu or Gly
  Variant (41)..(41): Xaa in position 41 is any amino acid
  Variant (42)..(42): Xaa in position 42 is Ile or Val
  Variant (43)..(43): Xaa in position 43 is Ala or Pro
  Variant (44)..(47): Xaa in position 44 to 47 is any amino acid
  Variant (48)..(48): Xaa in position 48 is Ala, Cys or Ser
  Variant (49)..(49): Xaa in position 49 is any amino acid
  Variant (51)..(51): Xaa in position 51 is any amino acid
  Variant (56)..(56): Xaa in position 56 is Asn, Thr or Val
  Variant (57)..(57): Xaa in position 57 is Gly or Ser
  Variant (59)..(59): Xaa in position 59 is Gln or Ser
  Variant (60)..(60): Xaa in position 60 is Asp or Glu
DXXXQGLXLXXXXXXXXXXXXXDAXDXXXXXXXXXXXXXXXXXXXXXXXKXSLHQXXFXX

SEQ ID NO: 670 - protein, 24 aa, Artificial sequence
  protein pattern
  Variant (2)..(3): Xaa in position 2 to 3 is any amino acid
  Variant (4)..(4): Xaa in position 4 is Leu or Pro
  Variant (5)..(6): Xaa in position 5 to 6 is any amino acid
  Variant (7)..(7): Xaa in position 7 is Ile, Leu, Met or Val
  Variant (8)..(8): Xaa in position 8 is any amino acid
  Variant (10)..(10): Xaa in position 10 is Ile or Val
  Variant (12)..(12): Xaa in position 12 is any amino acid
  Variant (15)..(16): Xaa in position 15 to 16 is any amino acid
  Variant (18)..(18): Xaa in position 18 is Asp or Glu
  Variant (19)..(19): Xaa in position 19 is Asp or His
  Variant (20)..(20): Xaa in position 20 is Phe, Trp or Tyr
  Variant (23)..(23): Xaa in position 23 is Ala, Gly, Pro or Ser
GXXXXXXXLXGXQPXXLXXXGGXL

SEQ ID NO: 671 - DNA, 495 bp, Escherichia coli K12
  CDS (1)..(495): transl_table=11
atgaacattgtcgatcaacaaacttttcgcgatgcgatgtcctgcatgggcgcggcggtcaatattatcaccacggacggtccagccgggcgcgccgggttcaccgccagcgccgtctgcagtgtgaccgatacgccgcccacattactggtgtgcctgaatcgtggggcgtccgtctggccggcattcaatgaaaatcgaacgctgtgtgtaaatacacttagcgccgggcaggagccgctttcaaacctttttggcggcaaaacgcccatggaacaccgctttgccgccgcccgctggcagacgggggtgaccggatgcccgcaactggaagaggctctggtttcgtttgactgccgtatcagccaggtggtgagcgtcggcacccacgacattctgttttgcgccatcgaagcgattcatcgtcacaccacaccctacgggctggtgtggttcgatcgcagttatcacgcgctgatgcgccctgcttgttaa

SEQ ID NO: 672 - protein, 164 aa, Escherichia coli K12
MNIVDQQTFRDAMSCMGAAVNIITTDGPAGRAGFTASAVCSVTDTPPTLLVCLNRGASVWPAFNENRTLCVNTLSAGQEPLSNLFGGKTPMEHRFAAARWQTGVTGCPQLEEALVSFDCRISQVVSVGTHDILFCAIEAIHRHTTPYGLVWFDRSYHALMRPAC

SEQ ID NO: 673 - DNA, 528 bp, Mesorhizobium loti MAFF303099
  CDS (1)..(528): transl_table=11
gtgctgaagaagaatgatattggaccgcaggcctatcgcgacgcgatgagccattttgccggccacgtccatgtggtcaccaccgacgggcccgccggcaagcgcggcacgacggtgatcgctgcctgctcggtgtcggacacgccgccgaccattctggtctgtctcaatcgcgaaaatgccaataatgagctgttcgtgaaaaacggccggtttgccctgaacacgctggcttcgcaccaggaaccgctgtcgatcggcttttcaggcatcaccggcctgccggtcgaggagcgtttcgcgctcggcgaatgggacgtgatctccaccggcgcgccgacgctgaagggcgcgctcgccgtgttcgactgcgaattgatcgacaccaaggatctggccacgcatcgtgtgctttttggcaaggtgacaggccttcgcatgggcgataatttgcggccgctgatctatcacgcccgcggctatcatgtcctggacagcggagcggcggcgttcacggagaaagaatga

SEQ ID NO: 674 - protein, 175 aa, Mesorhizobium loti MAFF303099
MLKKNDIGPQAYRDAMSHFAGHVHVVTTDGPAGKRGTTVIAACSVSDTPPTILVCLNRENANNELFVKNGRFALNTLASHQEPLSIGFSGITGLPVEERFALGEWDVISTGAPTLKGALAVFDCELIDTKDLATHRVLFGKVTGLRMGDNLRPLIYHARGYHVLDSGAAAFTEKE

SEQ ID NO: 675 - DNA, 507 bp, Pasteurella multocida subsp. multocida str. Pm70
  CDS (1)..(507): transl_table=11
atgcttacgccaattcaacaacactttcgtaattccatggcaaaattggccgctggcgtgaatattattacgaccaatggtatcgctgggaaatgtggtattacggcgacggctgtttgttccgttaccgatacaccgccaacgattatggtatgtattaacaaaaacagtgaaatgaatccggtcttccagaccaataaacgcctttgtgtcaatgtattgagtgcagaacaactcgaactcgcacaacattttgccggtttcatgggcagttgtatggatgagcgttttgagtgggctgtttggcatgaaaaacaagacccggtggcaccaccgagtcttaagaatgcactcgccaatttaacgggcaccattgtggatattcgtgatattggcacgcattcgatgtttttagtggagcttgaagaaattcaagtcaatgaagaacaagaacacgccttagtctatttctcgcgtcaattccataccgtcgggacgtcagagtaa

SEQ ID NO: 676 - protein, 168 aa, Pasteurella multocida subsp. multocida str. Pm70
MLTPIQQHFRNSMAKLAAGVNIITTNGIAGKCGITATAVCSVTDTPPTIMVCINKNSEMNPVFQTNKRLCVNVLSAEQLELAQHFAGFMGSCMDERFEWAVWHEKQDPVAPPSLKNALANLTGTIVDIRDIGTHSMFLVELEEIQVNEEQEHALVYFSRQFHTVGTSE

SEQ ID NO: 677 - DNA, 513 bp, Pseudomonas aeruginosa PAO1
  CDS (1)..(513): transl_table=11
atgtcccagctcgaacccaggcagcaagccttccgcaacgccatggcgcatctttcggcggcggtcaacgtgatcaccagcaacggcccggccggacgctgcgggatcaccgccaccgcggtctgctcggtcaccgacagcccgccgacgctgatgctctgcatcaaccgcaacagcgagatgaacacggtgttcaaggccaacggtcgactctgcgtgaacgtcctcagcggcgaacatgaagaggtggcccgccacttcgccggcatgaccgaggtcccgatggaacgccgcttcgccctccacgactggcgcgagggcctcgccgggttgccggtgctgcacggcgccctggccaacctgcagggacgcatcgccgaggtccaggagatcggcacccactcggtgctgttgctggaactggaggacatccaggtcctcgaacagggcgacggcctggtctacttcagccgcagcttccatcgcctgcaatgcccccggcgggcggcctga

SEQ ID NO: 678 - protein, 170 aa, Pseudomonas aeruginosa PAO1
MSQLEPRQQAFRNAMAHLSAAVNVITSNGPAGRCGITATAVCSVTDSPPTLMLCINRNSEMNTVFKANGRLCVNVLSGEHEEVARHFAGMTEVPMERRFALHDWREGLAGLPVLHGALANLQGRIAEVQEIGTHSVLLLELEDIQVLEQGDGLVYFSRSFHRLQCPRRAA

SEQ ID NO: 679 - DNA, 459 bp, Escherichia coli O157:H7 EDL933
  CDS (1)..(459): transl_table=11
atgtcctgcatgggcgcggcggtcaatatcatcaccacggacggtccagccgggcgcgccgggttcaccgccagcgccgtctgcagcgtgaccgacacgcctcccacattactggtgtgcctgaatcgtggggcgtccgtctggccggtattcaatgaaaatcgaacgctgtgtgtaaatacacttagcgccgggcaggagccgctttcaaacctttttggcggcaaaacgcccatggaacaccgctttgccgccgcccgctggcagaatggtgtgaccggatgcccgcaactggaagaggcgctggtttcgtttgactgccgtatcagccaggtggtgagcgtcggcacccacgacattttgttttgcgccatcgaagcgattcatcgtcacgccaccccctacgggctggtgtggttcgatcgcagttatcacgcgctgatgcgccctgcttgttaa

SEQ ID NO: 680 - protein, 152 aa, Escherichia coli O157:H7 EDL933
MSCMGAAVNIITTDGPAGRAGFTASAVCSVTDTPPTLLVCLNRGASVWPVFNENRTLCVNTLSAGQEPLSNLFGGKTPMEHRFAAARWQNGVTGCPQLEEALVSFDCRISQVVSVGTHDILFCAIEAIHRHATPYGLVWFDRSYHALMRPAC

SEQ ID NO: 681 - DNA, 525 bp, Agrobacterium tumefaciens str. C58
  CDS (1)..(525): transl_table=11
atgcagatgatgtctctcgaaaaggaagcggcaatggagacgaagactgctgagcagcgcagcctcgattatagaaacgccatggcgcggctcggtgcggcggtcaacatcgtcacgacggatggcgcggcaggccgtgcgggctttgcagcgacggccgtttgcagcgtttccgacaatccgcccacgcttctcgtctgcctcaaccgcaatgcctcagcctacaaggtggtgaaggctaatggcgttatctgcatcaatacgcttgccgcccatcacgaggtgctgagcacgctttttggcggcaagacaccggcggaagaacgtttcgccgccggcagctggggcgtgctcgagaccggcgctccggttctggaagacgcactggtttctttcgactgccgtatccgcgaggcccatgacggcggcacgcatgatattctgatctgcactgtcgttgatatgaagatcaacgcgggtgatgaagcgctgatgtatttcaaccggcgttaccgggtgctttga

SEQ ID NO: 682 - protein, 174 aa, Agrobacterium tumefaciens str. C58
MQMMSLEKEAAMETKTAEQRSLDYRNAMARLGAAVNIVTTDGAAGRAGFAATAVCSVSDNPPTLLVCLNRNASAYKVVKANGVICINTLAAHHEVLSTLFGGKTPAEERFAAGSWGVLETGAPVLEDALVSFDCRIREAHDGGTHDILICTVVDMKINAGDEALMYFNRRYRVL

SEQ ID NO: 683 - DNA, 498 bp, Yersinia pestis KIM
  CDS (1)..(498): transl_table=11
atgtcaacagaaaatcaacatcatctgtgttttcgtgacgcgatggcctgtttatcggcagcggttaatattgtgaccaccgatggccctgccggacgttgtggcattacagcaaccgcagtgtgttccgtgacagatacccccccgaccttgataatttgtattaatcgtaatagtgcaatgaaccctgtttttcagcaaaatggatgtttatgcatcaacgtactgaatcatcaacaagagcctatggcgcgtcattttgctggaatgacggggagcagcatggaagaacgtttcagttgggatatctggaatgtcggtctgctcggccagccgttgttacgagataccttagccagtttggagggggtgattgaacaggtacaaacgataggtacacatctggtttatttggtacacatcacacagatcgttctgcgtgagcaaggccatggtctgatttactttaaacgccattttcacccggtgatggtgtaa

SEQ ID NO: 684 - protein, 165 aa, Yersinia pestis KIM
MSTENQHHLCFRDAMACLSAAVNIVTTDGPAGRCGITATAVCSVTDTPPTLIICINRNSAMNPVFQQNGCLCINVLNHQQEPMARHFAGMTGSSMEERFSWDIWNVGLLGQPLLRDTLASLEGVIEQVQTIGTHLVYLVHITQIVLREQGHGLIYFKRHFHPVMV

SEQ ID NO: 685 - DNA, 459 bp, Shigella flexneri 2a str. 301
  CDS (1)..(459): transl_table=11
atgtcctgtatgggcgcggcggtcaatatcatcaccacggacggtccagccgggcgcgccgggttcaccgccagcgccgtctgcagcgtgaccgacacgccgcccacattactggtgtgcctgaatcgtggggcgtccgtctggccggtattcaatgaaaatcgaacgctgtgtgtaaatacactgagcgccgggcaggagccgctttcaaatctttttggcggcaaaacgcccatggaacaccgctttgccgccgcccgctggcagacgggtgtgaccggatgcccgcaactggaagaggctctggtttcgtttgactgccgtatcagccaggtggtgagcgtcggcacccacgacattctgttttgcgccatcgaagcgattcatcgtcacaccacaccctacgggctggtgtggttcgatcgcagttatcacgcgctgatgcgccctgcttgttaa

SEQ ID NO: 686 - protein, 152 aa, Shigella flexneri 2a str. 301
MSCMGAAVNIITTDGPAGRAGFTASAVCSVTDTPPTLLVCLNRGASVWPVFNENRTLCVNTLSAGQEPLSNLFGGKTPMEHRFAAARWQTGVTGCPQLEEALVSFDCRISQVVSVGTHDILFCAIEAIHRHTTPYGLVWFDRSYHALMRPAC

SEQ ID NO: 687 - DNA, 513 bp, Shigella flexneri 2a str. 301
  CDS (1)..(513): transl_table=11
atgcaattagatgaacaacgcctgcgctttcatgacgcgatggccagcctgtcggcagcggtaaatattatcaccaccgagggcgacgccggacaatgcgggattacggcaacggctgtctgctcggtcacggatacaccaccgtcgctgatggtgtgcattaacgccaacagtgcgatgaacccggtttttcagggcaacggcaagttgtgcgtcaacgtcctcaaccatgagcaggaactgatggcgcgccacttcgcgggcatgacaggcatggcgatggaagagcgttttagcctctcatgctggcaaaaaggtccgctggcgcagccggtgctaaaaggttcgctggccagtcttgaaggagagatccgcgatgtgcaggcgattggcacacatctggtgtatctggtggagattaaaaacatcatcctcagtgcagaaggtcacggacttatttactttaaacgccgtttccatccggtgatgctggaaatggaagctgcgatttaa

SEQ ID NO: 688 - protein, 170 aa, Shigella flexneri 2a str. 301
MQLDEQRLRFHDAMASLSAAVNIITTEGDAGQCGITATAVCSVTDTPPSLMVCINANSAMNPVFQGNGKLCVNVLNHEQELMARHFAGMTGMAMEERFSLSCWQKGPLAQPVLKGSLASLEGEIRDVQAIGTHLVYLVEIKNIILSAEGHGLIYFKRRFHPVMLEMEAAI

SEQ ID NO: 689 - DNA, 543 bp, Bradyrhizobium japonicum USDA 110
  CDS (1)..(543): transl_table=11
gtgaggatgcggatgcaggatgtggccccacaggactaccgcgatgcgatggcctgtctcggcgcggccgtcaacatcgtgaccacagacggcagcgcggggcgcgccggatttaccgcatccgccatttgcagcgttaccgacgatccgccgacgcttctggtctgcatcaaccgcggctcctctgcctactccagcgtgacgcgcaacgaggtggtgtgcgtcaacgtgctctcggcccggcatgagccgctgtcccggctgttcggcggcaaggtgcccgccgacgaacggtttgccgcggccgcgtggtcgacgctcgcaaccggtgcgccggtgctggccgactgttccgccgcgttcgactgccggattgccgataccgtcaatgtcggtacgcatgacgtgctgttctgccgcgtcgtggccctgcagagattcggttgcaccgacaatctgatctatttcggccgcgcctaccacacggtcggggtgaccgatccagccgaggctggacccgaatccgctcttgacgcatcctga

SEQ ID NO: 690 - protein, 180 aa, Bradyrhizobium japonicum USDA 110
MRMRMQDVAPQDYRDAMACLGAAVNIVTTDGSAGRAGFTASAICSVTDDPPTLLVCINRGSSAYSSVTRNEVVCVNVLSARHEPLSRLFGGKVPADERFAAAAWSTLATGAPVLADCSAAFDCRIADTVNVGTHDVLFCRVVALQRFGCTDNLIYFGRAYHTVGVTDPAEAGPESALDAS

SEQ ID NO: 691 - DNA, 543 bp, Pseudomonas syringae pv. tomato str. DC3000
  CDS (1)..(543): transl_table=11
atgcaagccacaactgaagcccataccacgttatccgccgacgtcatcccggtcagccagttggccttccgcgacgcgatgtccagccttgcagcggcggtcaacgtcatcaccaccgacggccagagcggccgcgccggttttaccgcaaccgcggtgtgcagcgtgaccgaccagccgccaaccctgctggtctgcatcaaccgcagcgcgtcggtgtatgaaaccttcatcggcaacggcacgctgtgtgtcaatacgctgtgcaacagccagcaggcgctgtccaacctgtttggcggcaagacctcacaagaggagcgctttgccgctggccactgggaaagcggcgtgaccggcgcgccgctgctggaaggcgccaaactggccctggactgcaaagtgacccagtcagtcagcgtcggcacccacgacatccttttttgccaagtggtggatatcaggcatcaggatgcgtcagacgcgctgctgtattttggccgccaataccatcacctgccgggcgcagctgccgctgtctga

SEQ ID NO: 692 - protein, 180 aa, Pseudomonas syringae pv. tomato str. DC3000
MQATTEAHTTLSADVIPVSQLAFRDAMSSLAAAVNVITTDGQSGRAGFTATAVCSVTDQPPTLLVCINRSASVYETFIGNGTLCVNTLCNSQQALSNLFGGKTSQEERFAAGHWESGVTGAPLLEGAKLALDCKVTQSVSVGTHDILFCQVVDIRHQDASDALLYFGRQYHHLPGAAAAV

SEQ ID NO: 693 - DNA, 513 bp, Salmonella enterica subsp. enterica serovar Typhi Ty2
  CDS (1)..(513): transl_table=11
atgcaagtagatgaacaacgtctgcgttttcgcgatgcgatggcaagtctggcggcagcggtcaacatcgtaaccacggcgggtcacgccggacgctgcggtatcaccgcaacagcggtttgctcagtcactgatacgccgccctccgtgatggtatgtattaatgccaatagcgccatgaaccccgtttttcagggcaacggcaggctgtgcattaatgtacttaaccatgagcaggagctgatggcgcgccactttgccggtatgacggggatggcgatggaggagcgttttcaccagccatgttggcaaaacgggccgctgggccagccggtacttaacggcgcgctggccagtcttgaaggcgagatcagcgaggtacaaaccattggcacgcatctggtgtatctggtggcgatcaaaaatattattcttagccaggaggggcatggcctgatttatttcaaacgccgttttcatccggtcagacttgagatggaagcgcctgtttaa

SEQ ID NO: 694 - protein, 170 aa, Salmonella enterica subsp. enterica serovar Typhi Ty2
MQVDEQRLRFRDAMASLAAAVNIVTTAGHAGRCGITATAVCSVTDTPPSVMVCINANSAMNPVFQGNGRLCINVLNHEQELMARHFAGMTGMAMEERFHQPCWQNGPLGQPVLNGALASLEGEISEVQTIGTHLVYLVAIKNIILSQEGHGLIYFKRRFHPVRLEMEAPV

SEQ ID NO: 695 - DNA, 510 bp, Haemophilus ducreyi 35000HP
  CDS (1)..(510): transl_table=11
atgtctatcgttcaagctcaaccgcctactgcgttttcactacaatttcgtgatgctatggcacatttatctgctgccgtcagcattgttactactaatggtatagcgggcaaaattggtttgactgtctcatcagtttgttccgtgacagatacaccaccaacattattgttttgtattaataaaaatagtggagtacacgatattatacaagcaaatggtaaggtttgtattaatgtgttaaaccatcagcaagaagaaatggcaaaacattttgccagtatgttgccgagtactatggaagagcgtttcagttgggatatttgggatgaaggaattgatggtttacccattttacgcgatgcgatttctgctctgcaaggtgatattattgatactcattctgttggcacgcatactatttttatggtgcaactgaagcatattgaggttaagccaagtaatagtttggtttattttggtcgtcaatttaaagtgattacgatctaa

SEQ ID NO: 696 - protein, 169 aa, Haemophilus ducreyi 35000HP
MSIVQAQPPTAFSLQFRDAMAHLSAAVSIVTTNGIAGKIGLTVSSVCSVTDTPPTLLFCINKNSGVHDIIQANGKVCINVLNHQQEEMAKHFASMLPSTMEERFSWDIWDEGIDGLPILRDAISALQGDIIDTHSVGTHTIFMVQLKHIEVKPSNSLVYFGRQFKVITI

SEQ ID NO: 697 - DNA, 519 bp, Photorhabdus luminescens subsp. laumondii TTO1
  CDS (1)..(519): transl_table=11
atgtccttagaaaatgaacatcgcctgcgtttcagagatgcgatggcgagtctgtcagcagcggtgaatatcgtcaccaccgatggtcatggcggatgctgcggcatcacggccaccgcagtatgctcaatcaccgatacgccacccacgctgatggtatgcattaaccgtagcagtgctatgaataccgtttttcaggaaaatggccgcctgtgtgtcaatattttaaaccacgaacaagaattgatggcacgtcactttgccggtatgaccggagtcagcatggaagagcgctttcgctggaatatctggcagaaaggaatattaggtcaaccggtgttaaccggcaccctcgccagccttgaaggtgaaattgaacaggttcaagaagtgggaacgcataacgtgtatctggttcagattaaacatatcacggtgagcgaacaaggccacggcctcatctattttaagcggaatttccgtccagttatgttggaaattgaaaccgctacagtttaa

SEQ ID NO: 698 - protein, 172 aa, Photorhabdus luminescens subsp. laumondii TTO1
MSLENEHRLRFRDAMASLSAAVNIVTTDGHGGCCGITATAVCSITDTPPTLMVCINRSSAMNTVFQENGRLCVNILNHEQELMARHFAGMTGVSMEERFRWNIWQKGILGQPVLTGTLASLEGEIEQVQEVGTHNVYLVQIKHITVSEQGHGLIYFKRNFRPVMLEIETATV

SEQ ID NO: 699 - DNA, 510 bp, Bartonella quintana str. Toulouse
  CDS (1)..(510): transl_table=11
atgcctaaacttcaacatattgttactgtttcttcgcaagaatatcgagacgctatgagtcattttgcaggagctgtgcatattgtgacaacaaatggcattaagggaaggcgcggggtgacaatttcagcgtgttgttctttatctgatgatcctccaacacttcttgtttgcctaatgcgccataatcctaagaatcagttatttatggaaaatgggaatttttgtgttaatagcttggcaggaaaacatcgtccactagcggatgttttttccaggcgctgcaattccacagaaactgaatgttttgatatagcacaatgggggactttgcagactggtgcccctagtctttcagatgctttagcttcatttgattgtcgtttgatttgttggcacgagcatgcaacccattacgttttgattggtgaagttgttgcaatcaactgtaatcaagaaaaagaggctttgatgtatttgaatcgtggatatcatactctacctttataa

SEQ ID NO: 700 - protein, 169 aa, Bartonella quintana str. Toulouse
MPKLQHIVTVSSQEYRDAMSHFAGAVHIVTTNGIKGRRGVTISACCSLSDDPPTLLVCLMRHNPKNQLFMENGNFCVNSLAGKHRPLADVFSRRCNSTETECFDIAQWGTLQTGAPSLSDALASFDCRLICWHEHATHYVLIGEVVAINCNQEKEALMYLNRGYHTLPL

SEQ ID NO: 701 - DNA, 510 bp, Bartonella henselae str. Houston-1
  CDS (1)..(510): transl_table=11
atgcctaaaattcaaaatattgttactgtctcttcacaagaatatcgagacgcgatgagtcattttgcaggagctgtgcatattgtgacaacaaatggcattaaaggaaagcgtggggtgacaatttcagcatgttgttctttatctgatgatcctccaacacttcttgtttgcctcatgcgccataacctcaagaatcatttgtttatagaaaatgggaacttttgtgtgaatagtttggctggaaaacaccgttcactagcggatattttttctaggcgttacaattatacagaaactgagtgttttgatagagcgcaatggggaactttacagactggtgcacctagtctttcagatgctttagcgtcgtttgattgtcggttaatttgttggcatgagcatgcaacccattacattttgattggtgaagttattgcaattaaccgtaatcaagagaaagatgctttgatatatttgaatcgtgggtatcatactctgcctttataa

SEQ ID NO: 702 - protein, 169 aa, Bartonella henselae str. Houston-1
MPKIQNIVTVSSQEYRDAMSHFAGAVHIVTTNGIKGKRGVTISACCSLSDDPPTLLVCLMRHNLKNHLFIENGNFCVNSLAGKHRSLADIFSRRYNYTETECFDRAQWGTLQTGAPSLSDALASFDCRLICWHEHATHYILIGEVIAINRNQEKDALIYLNRGYHTLPL

SEQ ID NO: 703 - DNA, 567 bp, Acinetobacter sp. ADP1
  CDS (1)..(567): transl_table=11
atgacagtattaacacaaactacaaaacacatagaaagtctgctcggacaaatgaaacaaattcatcgtgaaactttcatgcaggtcgatcagcaggcttttcgtcaagggatgtccaatttaggcgctgctgtcaatgtgattaccacggatggcgtggcaggaaaatcaggctttaccgcatctgcggtgtgtagtgtgaccgatactccgccgacattactggtctgtctaaatcgctctgcctcagtatttgaaacctttaaacaaaatcaggtgttgtgtgtcaatacactggctgcacatcaggcgcatctctctaatatttttggtggtaaaaccccgatggtagaccgttttgcccatggtgagtggaggacattagccacacaggcgcctgtacttacagatgcgctggtgtctttcgactgtgaggttgtacaaagcctatctgttggcagtcatgatgtttttttctgtcaggtgaaggccatacaacattgccaaggacaaaatgccttgatgtattttaaccgcaattattgcgaaccccattgtgtagcttaa

SEQ ID NO: 704 - protein, 188 aa, Acinetobacter sp. ADP1
MTVLTQTTKHIESLLGQMKQIHRETFMQVDQQAFRQGMSNLGAAVNVITTDGVAGKSGFTASAVCSVTDTPPTLLVCLNRSASVFETFKQNQVLCVNTLAAHQAHLSNIFGGKTPMVDRFAHGEWRTLATQAPVLTDALVSFDCEVVQSLSVGSHDVFFCQVKAIQHCQGQNALMYFNRNYCEPHCVA

SEQ ID NO: 705 - DNA, 507 bp, Acinetobacter sp. ADP1
  CDS (1)..(507): transl_table=11
gtgatgattgaaacaacagactttagaaatgcaatgtccttattgagcagtgcagtcagtgttgtcactacagcaggtttagcgggtcgttatggctttactgcatctgcggtatgcagtgtcacagatacgcctccgacattgctggtatgtatgaatcagtcatctagctcacatatgcattttgtagaaaacaagattttaaccgtgaatgtgcttagtgcgcagcatcagcagctttccaatgttttttcatctaagcttagtccagaagaacgttttaaacatggcatctggacagaacttgaaacgggtgcgcctgtactcaatgatgccctggtcagttttgattgtgagattgagcaaatccagcaagtgggcacacataccatttttatttgtccgattgtggcgattcaacagaatcaacatcaccagagtctggtgtattttaatcggggctatcaccatgtcggacatagtctagaacagattgaagtggcttaa

SEQ ID NO: 706 - protein, 168 aa, Acinetobacter sp. ADP1
MMIETTDFRNAMSLLSSAVSVVTTAGLAGRYGFTASAVCSVTDTPPTLLVCMNQSSSSHMHFVENKILTVNVLSAQHQQLSNVFSSKLSPEERFKHGIWTELETGAPVLNDALVSFDCEIEQIQQVGTHTIFICPIVAIQQNQHHQSLVYFNRGYHHVGHSLEQIEVA

SEQ ID NO: 707 - DNA, 546 bp, Erwinia carotovora subsp. atroseptica SCRI1043
  CDS (1)..(546): transl_table=11
atgtctgatttgacagctgaacgacgcgtaaccgtgaatgacgccgttccctctgcggcggttagcgccgttgaccggcaggcgtttcgcgatgcaatggcaaagttgagcgcggcggttaatatcgttaccaccgatggtccggcaggtaaggctgggtttaccgcgtcggctgtatcaagcgttagcgacacgcccggcacgctgctggtgtgtctgaatcgtggttcatcggtgtatcccacgtttcaggtgaatgaacatttatgcgttaatacgttggcggcacatcatgaagcgctgtcgtcgctgtttgggagtcggtcgtctacggaagaacggtttgctgcggcgaagtggggcgtgttacacacgggttcaccggtgttgcaagatgcgctggttgcatttgactgccgggttgaggaagtggtgagcgcggcgacgcacgatatctttatttgcagagtgttagcgattaagcagggcgaaagtaccgatggtctggtgtatttttcccgtggttatcacgctgttcgcgggtaa

SEQ ID NO: 708 - protein, 181 aa, Erwinia carotovora subsp. atroseptica SCRI1043
MSDLTAERRVTVNDAVPSAAVSAVDRQAFRDAMAKLSAAVNIVTTDGPAGKAGFTASAVSSVSDTPGTLLVCLNRGSSVYPTFQVNEHLCVNTLAAHHEALSSLFGSRSSTEERFAAAKWGVLHTGSPVLQDALVAFDCRVEEVVSAATHDIFICRVLAIKQGESTDGLVYFSRGYHAVRG

SEQ ID NO: 709 - DNA, 537 bp, Pseudomonas syringae pv. syringae B728a
  CDS (1)..(537): transl_table=11
atgcctacctcctctgcaactcccgccattctgcccatcgccgctgtcagccagctggcgtttcgcgatgcgatgtccggcctggccgccgccgtcaacctcatcaccaccgacggccctggcggacgcgccggctttaccgcgaccgccgtgtgcagcgtgacggatcaaccgccgacgctgctggtctgtatcaaccgcagtgcgtcggtgtatgacgccttcatcgagaacggcacgttgtgcgtgaatacgctgggcaacggtcagcaggacttgtccaacctgttcggcggcaagagctcccagcaggagcgctttgccggcgggcagtgggaggccggagtgaccggcgcaccggtcctggacagtgcaaaactggcgctcgactgcaaagtgagccagtcagtcagcgtcggcacgcatgacattctgttctgcgaggtggtggatatcaggcatcagagcggcgcagatgcattggtctacttcggccgtcgctatcatcacctgccgagcgaaacgccagcggcctga

SEQ ID NO: 710 - protein, 178 aa, Pseudomonas syringae pv. syringae B728a
MPTSSATPAILPIAAVSQLAFRDAMSGLAAAVNLITTDGPGGRAGFTATAVCSVTDQPPTLLVCINRSASVYDAFIENGTLCVNTLGNGQQDLSNLFGGKSSQQERFAGGQWEAGVTGAPVLDSAKLALDCKVSQSVSVGTHDILFCEVVDIRHQSGADALVYFGRRYHHLPSETPAA

SEQ ID NO: 711 - DNA, 513 bp, Pseudomonas fluorescens Pf-5
  CDS (1)..(513): transl_table=11
atgtctgtactcgaccccaagcaactcgcctttcgcaacgccatggcgcacatgaccgcagcggtcaacgtcatcaccagcaacggccccgccggccgctgcggcatcaccgccacggcggtctgctcggtcactgacagcccgccgaccctgatggtctgcgtcaaccgcaacagcgccctgaacccggtgttcaagggcaacgggcggttgtgcgtcaacgtcctcagcggcgaacacgaagaagtggcccggcactttgccggcatgaccggcgtggccatggaccagcgcttcggcctgcacccctggcgcgacggcctgcaggccctgccggtgctggagggcgccctggccagcctgcaggggcgcatcaccgaggtccaggaaatcggcacgcactcggtaatgctggtggaactggatgaaatcggcgtgctggagcacggcgactcactggtgtacttcagccgttgcttccatcgcctggcccacccttgccgggcggcctga

SEQ ID NO: 712 - protein, 170 aa, Pseudomonas fluorescens Pf-5
MSVLDPKQLAFRNAMAHMTAAVNVITSNGPAGRCGITATAVCSVTDSPPTLMVCVNRNSALNPVFKGNGRLCVNVLSGEHEEVARHFAGMTGVAMDQRFGLHPWRDGLQALPVLEGALASLQGRITEVQEIGTHSVMLVELDEIGVLEHGDSLVYFSRCFHRLAHPCRAA

SEQ ID NO: 713 - DNA, 516 bp, Psychrobacter arcticus 273-4
  CDS (1)..(516): transl_table=11
atgattaaaggtatgattgaagcaactgattttagaaacgccatgtcgttgctaacgacggcggttaatatcgtcaccacaaaaggcagctctggttgtcatgggtttaccgcatctgcggtatgtagtgtcacagataccccgccaaccttgcttgtctgcatgaatcagacgtctcggtcatatactcatttcattgaaaataaaatcttaagtgtcaatgtgttaggcgcacagtatgaagatatatccaatgcatttgcctccaaattgtgttcagaggagcgatttaaacaaggctcttggactgaactagtaacaggcgctcctgttttagaggatgcattggtcagttttgattgtgagattgatcacattcaggaagttggtacgcacagtgtttttatgtgccgtgttgtcgccatcaaacaagctgagcaacaaggcagagctgatgaaagtttggtttattttaatcgtgcttatcatcaagttggtcaagtagaaagcgcttaa

SEQ ID NO: 714 - protein, 171 aa, Psychrobacter arcticus 273-4
MIKGMIEATDFRNAMSLLTTAVNIVTTKGSSGCHGFTASAVCSVTDTPPTLLVCMNQTSRSYTHFIENKILSVNVLGAQYEDISNAFASKLCSEERFKQGSWTELVTGAPVLEDALVSFDCEIDHIQEVGTHSVFMCRVVAIKQAEQQGRADESLVYFNRAYHQVGQVESA

SEQ ID NO: 715 - DNA, 537 bp, Pseudomonas syringae pv. phaseolicola 1448A
  CDS (1)..(537): transl_table=11
atgcatgccgactctgaagcccttgccaccctccccgctgacccggtcagccagctggcgtttcgcgatgcaatgtccagcctcgccgcagccgtcaacgtcatcaccaccgatggccccggcggtcgcgccggttttactgcgacagcggtctgcagcgtgaccgatcagcctcccacgctactggtttgtatcaatcgcagcgcctcggtgtatgaaaccttcatcgagaacggcctgttatgcgtcaacacactgggcaacggtcagcaggacttgtccaacctgttcggtggcaagcgctcacagcaggagcgttttgacggtggccagtgggaaagcggggtgacgggtgcgccgatactgaacagcgccaaactggccctcgactgcaaggtgacccaatccgtcagcgtcggcacacatgacattctcttttgccaagtgctggatataagggatcagggtgagtcagacgccttggtgtactttgcccgtcagtatcatcacttgccaggtgcggcaccggctgcctga

SEQ ID NO: 716 - protein, 178 aa, Pseudomonas syringae pv. phaseolicola 1448A
MHADSEALATLPADPVSQLAFRDAMSSLAAAVNVITTDGPGGRAGFTATAVCSVTDQPPTLLVCINRSASVYETFIENGLLCVNTLGNGQQDLSNLFGGKRSQQERFDGGQWESGVTGAPILNSAKLALDCKVTQSVSVGTHDILFCQVLDIRDQGESDALVYFARQYHHLPGAAPAA

SEQ ID NO: 717 - DNA, 510 bp, Pseudomonas fluorescens PfO-1
  CDS (1)..(510): transl_table=11
atggttgattcaacggagtttcgtaatgcaatggcgatgctggggagtgccgtcaccatcgtcacgaccgatggccctgcggggcgtttcggctttaccgcgtcggcggtgtgcagcgtgacggattcaccgcccacgctgctggtatgcgtcaatcgctcgtcgtccaatcacgagcatttcaagaccaatggcgtgctgtgcgtgaacgtcctgaccggcgatcaccagtcgacctccggtgcgttcgccaatcggcagttgagcatgcaggagcgcttttccagcgtgaattgccagaccctcaagaccggttcgccggtaatcgaggaggcgctggtcagcctcgattgccgagtcagcaaggtcgacgaggtcggcacccacagcatcttctactgtgaaattctcgagctgcagcaacacagcgaggccacggaaggcctggtctatttcaaccgcagttactaccgtctgaacgacgaactgcgcctggcacccgagcagtga

SEQ ID NO: 718 - protein, 169 aa, Pseudomonas fluorescens PfO-1
MVDSTEFRNAMAMLGSAVTIVTTDGPAGRFGFTASAVCSVTDSPPTLLVCVNRSSSNHEHFKTNGVLCVNVLTGDHQSTSGAFANRQLSMQERFSSVNCQTLKTGSPVIEEALVSLDCRVSKVDEVGTHSIFYCEILELQQHSEATEGLVYFNRSYYRLNDELRLAPEQ

SEQ ID NO: 719 - DNA, 498 bp, Burkholderia sp. 383
  CDS (1)..(498): transl_table=11
atggtgatgccaacggaatttcgggatgcaatgtcgcggctgggtgcggccgtcaatgtcgtgacgacgaatggcctcgccggcctgggcggctttaccgcgtcagcggtatgcagcgtcacggacagcccgcccaccctgctcgtctgcatgaatcagagcagccaccagtacgaccgcttcgaggccaacggcgtgctgtgcgtgaacgtgctcggtgccgaacaggaacatgtctcgcggctgttcagcggacagacgcgtgcgtcggtcgaggaccggttcgcgcagacgaattacgagtacctggagaccggttcgccggtgctgcccgacagcctggtgtgcttcgactgcaagatcgaccgcatcgagaaggtcggcacgcacggcatcctgttctgccaggtcgtcgggatcgggaacgggtctcaagcgggcggcctgctgtatttcgaccgcgcctaccatcggctcacgagcgtcaggccggtctag

SEQ ID NO: 720 - protein, 165 aa, Burkholderia sp. 383
MVMPTEFRDAMSRLGAAVNVVTTNGLAGLGGFTASAVCSVTDSPPTLLVCMNQSSHQYDRFEANGVLCVNVLGAEQEHVSRLFSGQTRASVEDRFAQTNYEYLETGSPVLPDSLVCFDCKIDRIEKVGTHGILFCQVVGIGNGSQAGGLLYFDRAYHRLTSVRPV

SEQ ID NO: 721 - DNA, 651 bp, Burkholderia sp. 383
  CDS (1)..(651): transl_table=11
atggtcgccggcattttcgcgacgtacgcttgggtcatcgtcggcgatccggcgcggcaccggcagtgccgcacgatcgccgctttcgtccactcaggagcgcccatgtcttccacgaccgatatccagcgaccggcacgcgtcgaaccgaccgacgcgcagaaggccttccggcaagcgatggcccacctcggcgcggccgtcaacgtgatcaccaccgccgggccgcatggccgctgcgggatcaccgcaagcgccgtgtgctccgtcaccgatacgccgccgacgctgctcgtgtgcctcaaccggtcgagcgcgatgcgtgcgacgttcgaacgcaaccgccacgtttgcatcaacgtgctgccggccgaacacgaacaactcgcgcggcatttcgcggggctcaccgacctgccgatggagcgccgcttcgacctgcccgtgtgggatcgcggcgagcaggacgtgcccgtgctgcgcgacgcgctcgcgagcctgcagggcacgatcgccgacatgaaggaagtcggctcgcattcggtgatgttcatcgaggcgacgtcgatccgcgtgcgcgacgacggcgacagcctgatctacttcagccgcgcgtttcatcgcgtgtcgcgcacggcgtgcgtgcgatga

SEQ ID NO: 722 - protein, 216 aa, Burkholderia sp. 383
MVAGIFATYAWVIVGDPARHRQCRTIAAFVHSGAPMSSTTDIQRPARVEPTDAQKAFRQAMAHLGAAVNVITTAGPHGRCGITASAVCSVTDTPPTLLVCLNRSSAMRATFERNRHVCINVLPAEHEQLARHFAGLTDLPMERRFDLPVWDRGEQDVPVLRDALASLQGTIADMKEVGSHSVMFIEATSIRVRDDGDSLIYFSRAFHRVSRTACVR

SEQ ID NO: 723 - DNA, 543 bp, Burkholderia thailandensis E264
  CDS (1)..(543): transl_table=11
atgccagaccgttcgagcgcgccggccgcgcgcgccgccctcgacgccgacgacgcgcgccggcagttccgccaggcgatggcgcatctcggcgcggcggtcaatgtcgtgacgaccgcggggccgcatggacgctgcggcatcaccgcgagcgccgtgtgctcggtgacggatgcgccgccgacgctcctcgtctgcgtcaaccgatcgagcgcaatgcatgcggccttcctgcgcaaccgcaacgtatgcgtcaatgtgctgccgagcgagcacgagttgctcgcgcgccatttcgccggctttaccggcctgccgatggatgcgcgctttaacctgcccctgtgggacgaaggcgcgcatggcgtgcccgtgctgcgcgacgcgctcgcgagccttcagggcacgatcgtcgaatcgaaggaagtcggctcgcatgcggtgatgttcgtccaagcgcacgcgatccgagtgcgcggcgacggcgacggcctcgtctacttcggccgcgcgttccatcgaatcgcgcggccggccgcctga

SEQ ID NO: 724 - protein, 180 aa, Burkholderia thailandensis E264
MPDRSSAPAARAALDADDARRQFRQAMAHLGAAVNVVTTAGPHGRCGITASAVCSVTDAPPTLLVCVNRSSAMHAAFLRNRNVCVNVLPSEHELLARHFAGFTGLPMDARFNLPLWDEGAHGVPVLRDALASLQGTIVESKEVGSHAVMFVQAHAIRVRGDGDGLVYFGRAFHRIARPAA

SEQ ID NO: 725 - DNA, 552 bp, Burkholderia xenovorans LB400
  CDS (1)..(552): transl_table=11
atgcagaaggaaaacaaagtgacgatcgaagacaccagaaaacgtttccgcgacgcgatggcgtgcctgccggccgccgtcaacatcgtcaccacggatggccccggcggccgctgcggcattaccgcaagcgcggtgtgctcggtaacggacgcgccgcccaccatgctcgtctgtatcaatcaggccagctacgtgcatgacgtgctgcatcgcaaccgcagcgtgtgcatcaacgtgcttgccgcggagtgccagcagctcgcgcgcgattttgccggcatgacagcgtgctcgatggacgagcgattcgggcgccacgcatggaccggaggcgcggcgtcggcgccggtgctggcagacgcgatcgccagtctcgaaggcgagatcgtcgacatcaagaaggtcggctcgcactcggtgatgttcgcgcagatccgtcacattgcgttgcgcccggatggcgacggcctcatttatttcggacggcattttcatcgcctgacgcgaccaccggctacagcgccgcttgccgcgcaagcagcgaggtga

SEQ ID NO: 726 - protein, 183 aa, Burkholderia xenovorans LB400
MQKENKVTIEDTRKRFRDAMACLPAAVNIVTTDGPGGRCGITASAVCSVTDAPPTMLVCINQASYVHDVLHRNRSVCINVLAAECQQLARDFAGMTACSMDERFGRHAWTGGAASAPVLADAIASLEGEIVDIKKVGSHSVMFAQIRHIALRPDGDGLIYFGRHFHRLTRPPATAPLAAQAAR

SEQ ID NO: 727 - DNA, 612 bp, Magnetospirillum magnetotacticum MS-1
  CDS (1)..(612)
atgaccatgcccgacagcgccgcagccgctcctcccgtcgatgcgatggcctatcgtgaggcgatgtcccggctcgcgagctcggttcacctgatcaccaccgacggtcccggcgggcgggccggcttcaccgcctcggccgtgtgcagcgtcagcgacacgccaccgaccctgctcgtctgcatcaaccgcgcctcctccgcctacgccgccctcacccgcaacggggttctctgcgtcaacaccctcggtgaaggccatcaggctctggcaacccggttcgggggccgcacgccgatggacgagcgcttcgccgacggggcgtggcggcgcctgcggagcggcgcgccggcactcgccgatgccctggtgagcttcgattgccgcctcgtcggccgccacgacgtcggcacgcacgacgtgctcttctgcgcggtcgaggcggtcgccgcggcgggggaggccgagccgctcctctacagcgagcgtcgctaccgcacccttccccgcgtgccgcgcctcggctccgctccgtccgagcccgccaagccctcgcgcgccctcggagcccggcccgtcgacgcgccgatgccggccctgcggagtgcctga

SEQ ID NO: 728 - protein, 203 aa, Magnetospirillum magnetotacticum MS-1
MTMPDSAAAAPPVDAMAYREAMSRLASSVHLITTDGPGGRAGFTASAVCSVSDTPPTLLVCINRASSAYAALTRNGVLCVNTLGEGHQALATRFGGRTPMDERFADGAWRRLRSGAPALADALVSFDCRLVGRHDVGTHDVLFCAVEAVAAAGEAEPLLYSERRYRTLPRVPRLGSAPSEPAKPSRALGARPVDAPMPALRSA

SEQ ID NO: 729 - DNA, 474 bp, Haemophilus somnus 129PT
  CDS (1)..(474)
atggtagaagtctctcaatttaaagatgcaatggcacaacttgcctcagcagttcatattgtgaccacaagtggtgaaacagggcagcatggttttacagcatcagccgtttgtagcgtgactgactccccacctaccttgcttgtttgtataaatagcaatgcacgtgcctatgagcattttgtaaaaaatcgggtactgatggttaatactttgacagccgaacaatcttctttatcaaatatattcgcctcaccattaagtcaagaagaacgtttttccaacgcttcttggacaacgttgactacaggatcaccgatgttacaggatgctctgattaattttgattgcgaaattacagaaattaagcacgttggcactcacgatattttaatttgtaaaattgtagatatacaccaaagtaatgcaaaaaatgctttggtctatcgaaatcgagtttatcattcggtttaa

SEQ ID NO: 730 - protein, 157 aa, Haemophilus somnus 129PT
MVEVSQFKDAMAQLASAVHIVTTSGETGQHGFTASAVCSVTDSPPTLLVCINSNARAYEHFVKNRVLMVNTLTAEQSSLSNIFASPLSQEERFSNASWTTLTTGSPMLQDALINFDCEITEIKHVGTHDILICKIVDIHQSNAKNALVYRNRVYHSV

SEQ ID NO: 731 - DNA, 477 bp, Haemophilus somnus 2336
  CDS (1)..(477)
atggtagaagtctctcaatttaaagatgcaatggcacaacttgcctcagcagttcatattgtgaccacaagtggtgaaacagggcagcatggctttacagcatcagccgtttgtagcgtgaccgattcaccgccaacattgcttgtgtgtgtcaatagcaatgcacgtgcctatgagcattttataaaaaatagggtgctaatggtgaatactttgactgccgaacaatcttctttatcaaatgtattcgcctcacccttaagtcaagaagagcgatttgctaatgcttattggacaacattggctacaggctcgccgatgttacaggatgcactgattaattttgattgcgaaattacagatattaagcaagtcggtactcacagtattttgatttgtgaaattgtagctattaaacaaggtgataagaaagaagcgttggtatatcacaatcgttcttaccgcattcttaaatga

SEQ ID NO: 732 - protein, 158 aa, Haemophilus somnus 2336
MVEVSQFKDAMAQLASAVHIVTTSGETGQHGFTASAVCSVTDSPPTLLVCVNSNARAYEHFIKNRVLMVNTLTAEQSSLSNVFASPLSQEERFANAYWTTLATGSPMLQDALINFDCEITDIKQVGTHSILICEIVAIKQGDKKEALVYHNRSYRILK

SEQ ID NO: 733 - DNA, 513 bp, Actinobacillus pleuropneumoniae serovar 1 str. 4074
  CDS (1)..(513)
atgtcttgtattccgaaacctcaagaggtacctgaattttcacaacaatttcgtaatgcgatggcgcatttatccgctgcggtaagtattgtgaccacaaacgggtctgccggcaaaatcggtattaccgtatcatcggtttgctcggtgaccgatacgccgccgaccttgcttttctgtatcaatcaaagcagttccgttcacgatatcattaagcaaaacggtaaagtgtgcatcaacgtattaagccacgaacaagaagaaatggcgaagcattttgcttgtatgatgtgcagcagtatggaagaacgtttcgcttgggatatttgggacgaaggctttgacggacaaccggtattacgcggttcgatttctgccttacaaggcgatattgtcgatacgcattcggtgggtacgcatacgatttttatggtggaactgaaacatatcgatgtaacgccgaataccggcttagtctatttcggtcgtcaatttaagggcatagcgatctaa

SEQ ID NO: 734 - protein, 170 aa, Actinobacillus pleuropneumoniae serovar 1 str. 4074
MSCIPKPQEVPEFSQQFRNAMAHLSAAVSIVTTNGSAGKIGITVSSVCSVTDTPPTLLFCINQSSSVHDIIKQNGKVCINVLSHEQEEMAKHFACMMCSSMEERFAWDIWDEGFDGQPVLRGSISALQGDIVDTHSVGTHTIFMVELKHIDVTPNTGLVYFGRQFKGIAI

SEQ ID NO: 735 - DNA, 513 bp, Pseudomonas aeruginosa UCBPP-PA14
  CDS (1)..(513)
atgtcccagctcgaacccaggcagcaagccttccgcaacgccatggcgcatctttcggcggcggtcaacgtgatcaccagcaacggcccggccggacgctgcgggatcaccgccaccgcggtctgctcggtcaccgacagcccgccgacgctgatgctctgcatcaaccgcaacagcgagatgaacacggtgttcaaggccaacggccggctctgcgtgaacgtcctcagcggcgaacacgaagaggtggcccgccacttcgccggcatgaccgaggtcccgatggaacgccgcttcgccctccacgactggcgcgagggcctcgccgggttgccggtgctgcacggcgccctggccaacctgcagggacgcatcgccgaggtccaggagatcggcacccattcggtgctgttgctggagctggaggacatccaggtcctcgaacagggcgacggcctggtctacttcagccgcagcttccatcgcctgcagcgagcctgccgagccgcctga

SEQ ID NO: 736 - protein, 170 aa, Pseudomonas aeruginosa UCBPP-PA14
MSQLEPRQQAFRNAMAHLSAAVNVITSNGPAGRCGITATAVCSVTDSPPTLMLCINRNSEMNTVFKANGRLCVNVLSGEHEEVARHFAGMTEVPMERRFALHDWREGLAGLPVLHGALANLQGRIAEVQEIGTHSVLLLELEDIQVLEQGDGLVYFSRSFHRLQRACRAA

SEQ ID NO: 737 - DNA, 582 bp, Burkholderia vietnamiensis G4
  CDS (1)..(582): transl_table=11
atgcttcatgcaaggacccgtggcgcgccgccacgaagccgcaccgccgttccgtccaccgagagaggtaccgccgtgatagcactttcccccgaccgcacgaccttccgcgaagccatgtcccgtatcggcgcagcggtgaatatcatcaccaccacgacgccttccggcgatgtcggcatgacggtgtccgcagtgtgctccgtcaccgacgatcctgctacggtgctcgtttgcataggccggtccagtcgtcaatatggacacttcagcaaggcgggcatcatctgcgtcaacgttctttcccatgagcacgagatgcttgcaccgatcttcgcgggcaagggcgatgtccagatgaccgagcgcttcacgtacggcgagtggatccgtctcgtcacgggtgcgccggtgctggccacagcggccgcgagtctcgactgcacggtggaccggagcatcgacatcggcacacatacggtctttttctgcgccgtgcaggcgctacatctcggctccgcgtgttcgggcctcgtctatcacgggcgcgcttatcatcggctgccgcagcagcatgcgtga

SEQ ID NO: 738 - protein, 193 aa, Burkholderia vietnamiensis G4
MLHARTRGAPPRSRTAVPSTERGTAVIALSPDRTTFREAMSRIGAAVNIITTTTPSGDVGMTVSAVCSVTDDPATVLVCIGRSSRQYGHFSKAGIICVNVLSHEHEMLAPIFAGKGDVQMTERFTYGEWIRLVTGAPVLATAAASLDCTVDRSIDIGTHTVFFCAVQALHLGSACSGLVYHGRAYHRLPQQHA

SEQ ID NO: 739 - DNA, 603 bp, Mesorhizobium sp. BNC1
  CDS (1)..(603): transl_table=11
atgacgaaaacggctggaccggtgatacttggctgccggcgcttgacgacgcgtccacggtgcgggacgcggccgagtgagaacgcagtgatgggaaccgcagtctccaagaccgaattccgcgatgcgatggctcgggtctgcgctccggtcaacgtgatcaccaccaacggacccgccgggcggggcgggttcaccgccaccgcgatgtgctcggtcaccgatgagccgcccacgcttctggtctgcatgaacagccgctcggcccaggcaggtctcttcatcgagaaccgccgcttttgcgtcaacgtgcttacgcaggaacacaaggaccttgccggctatttcgccgggcagcaagcggacatggatgcccgctacgctgccgcggagtgggtcaatttgctctccggcaatctggcgctcagtgacgcaatcgtctctttcgactgccaattgatcgacgcgcgtcctgtcggcacgcacaatatcttcatgggccaggttgtcgaaattcgcacccgtaaggatggtcacgcccttctctatttcgaccgcaattttgtgcacgtgcctacccaaacgggcagcttcggcgggtaa

SEQ ID NO: 740 - protein, 200 aa, Mesorhizobium sp. BNC1
MTKTAGPVILGCRRLTTRPRCGTRPSENAVMGTAVSKTEFRDAMARVCAPVNVITTNGPAGRGGFTATAMCSVTDEPPTLLVCMNSRSAQAGLFIENRRFCVNVLTQEHKDLAGYFAGQQADMDARYAAAEWVNLLSGNLALSDAIVSFDCQLIDARPVGTHNIFMGQVVEIRTRKDGHALLYFDRNFVHVPTQTGSFGG

SEQ ID NO: 741 - DNA, 495 bp, Mesorhizobium sp. BNC1
  CDS (1)..(495): transl_table=11
gtgctgaagacgaacgacatagctccccaggattatcggaatgcgatggcccactttgcgggcgccgtccatgtgatcaccaccgatggccccgcaggaaggaggggggtgaccgtcattgccgcctgctcggtctccgacgatccgcccaccgtgcttgcctgcctcaaccgtcaaaatcccagcaacgatcttttcctgaacaacggcgtcttcgccttgaacacgttggccgcagggcatgaagaccttgcaaacgccttctccgggctgactggcctttcgcaggatgagcgtttcgcattggcgcaatgggatacgctatcgagcggcgccccgactctgctcggcgcaatcgccgttttcgattgccagctggtcgatgccaaggaacttgccacgcaccgggtttatttcggcaaggtgacaggtctgcgtatcggagctaacctcaggccgctcctttaccacgaccgagcctatcacgttctgtga

SEQ ID NO: 742 - protein, 164 aa, Mesorhizobium sp. BNC1
MLKTNDIAPQDYRNAMAHFAGAVHVITTDGPAGRRGVTVIAACSVSDDPPTVLACLNRQNPSNDLFLNNGVFALNTLAAGHEDLANAFSGLTGLSQDERFALAQWDTLSSGAPTLLGAIAVFDCQLVDAKELATHRVYFGKVTGLRIGANLRPLLYHDRAYHVL

SEQ ID NO: 743 - DNA, 519 bp, Photorhabdus luminescens
  CDS (1)..(519): transl_table=11
atgtctgtagaaaatgaacatcgccagcacttcagagatgcgatggcgagtctgtcagcagcggtgaatatcgtcaccaccgatggccatgcggatgctggtggcatcactgccaccgcggtatgctcaatcaccgatacgccacccacgctgatggtatgcattaaccgaagcagtgctatgaatccagtttttcaggaaaatggccgcctgtgcgtaaatattttaaaccacgaacaagaactgatggcacgccactttgccggtatgacccgggtcagcatggaagagcgtttttcgctgagtatctggcagacaggcccattaggccaaccagtgttatacggtacccttgcaagccttgaaggtgaaatcgaacaggttcaaagtggaggcacgcataacgtgtatctggttcagattaaacatatcacggtaagcgaacaaggccacggcctcatctatttcaagcgtaatttccgtccagtcatgttggaaattgaagccgccgcagtttaa

SEQ ID NO: 744 - protein, 172 aa, Photorhabdus luminescens
MSVENEHRQHFRDAMASLSAAVNIVTTDGHADAGGITATAVCSITDTPPTLMVCINRSSAMNPVFQENGRLCVNILNHEQELMARHFAGMTRVSMEERFSLSIWQTGPLGQPVLYGTLASLEGEIEQVQSGGTHNVYLVQIKHITVSEQGHGLIYFKRNFRPVMLEIEAAAV

SEQ ID NO: 745 - DNA, 540 bp, Burkholderia cepacia
  CDS (1)..(540): transl_table=11
atgcatgccggtgaagcggtccagcagctcaagaaagctttcgaaacggtcgcatcgtttgatttcagggatgcgctttcgaaagcgtcgacgcccgtcaccgtagtggcgacgaacgggccgttcgggctcgctggactcacctgttccgcagtctgctccgtctgtgacagaccgcccaccgttctgctctgcatcaaccgcaagagctatgccgccggcatcatcaagagcaacggcgtgctttccgtaaattggctggcggccgggcaggcggtcatatcccagactttcgctggcgtcggctccgtgccgatggaagagcgctttgccgacaagggttggcaaaccatcgcgaccggtgcgccataccggatggacgctgcagtctccttcgactgcaccatcgccaacatcgtcgacgttggatcacacagtgtgatcttcgcggaggtggtcgcacggaaccacgcagaagaatgcacgccgctgatctatcaccggcggcaatatgcgacgactagatcgctcgcggaataa

SEQ ID NO: 746 - protein, 179 aa, Burkholderia cepacia
MHAGEAVQQLKKAFETVASFDFRDALSKASTPVTVVATNGPFGLAGLTCSAVCSVCDRPPTVLLCINRKSYAAGIIKSNGVLSVNWLAAGQAVISQTFAGVGSVPMEERFADKGWQTIATGAPYRMDAAVSFDCTIANIVDVGSHSVIFAEVVARNHAEECTPLIYHRRQYATTRSLAE

SEQ ID NO: 747 - DNA, 513 bp, Escherichia coli
  CDS (1)..(513): transl_table=11
atgcaattagatgaacagcgcctgcgctttcgtgacgcgatggccagcctgtcggcagcggtaaatattatcaccaccgagggcgacgccggacaatgcgggattacggcaacggccgtctgctcggtcacggatacaccaccatcgctgatggtgtgcattaacgccaacagtgcgatgaacccggtttttcagggcaacggtaagttgtgcgtcaacgtcctcaaccatgagcaggaactgatggcacgccacttcgcgggcatgacaggcatggcgatggaagaacgttttaacctctcatgctggcaaaaaggtccgctggcgcagccggtgctgaaaggttcgctggccagtcttgaaggtgagatccgcgatgtgcaggcaattggcacacatctggtgtatctggtggagattaaaaacatcatcctcagtgcagaaggtcacggacttatctactttaaacgccgtttccatccggtgatgctggaaatggaagctgcgatttaa

SEQ ID NO: 748 - protein, 170 aa, Escherichia coli
MQLDEQRLRFRDAMASLSAAVNIITTEGDAGQCGITATAVCSVTDTPPSLMVCINANSAMNPVFQGNGKLCVNVLNHEQELMARHFAGMTGMAMEERFNLSCWQKGPLAQPVLKGSLASLEGEIRDVQAIGTHLVYLVEIKNIILSAEGHGLIYFKRRFHPVMLEMEAAI

SEQ ID NO: 749 - DNA, 519 bp, Photorhabdus luminescens
  CDS (1)..(519): transl_table=11
atgtctgtagaaaatgaacatcgcctgcgtttcagggatgcgatggcgagtctgtcagcagcggtgaatatcgtcaccaccgatggccgcgcgggatgctgtggtatcactgccacagcggtatgctcgatcaccgatacgccacccacgttgatggtatgcattaaccgaaacagtgctatgaataccgtttttcaggaaaatggccgcctgtgtgtaaatattttaaaccacgaacaagaattgatggcacgccactttgccggtatgaccggagtcagcatggaagagcgttttcgctggaatatctggcagacaggggtgttgggtcaaccagtgttaaccggcaccctcgcgagtcttgaaggtgaaattgaacaggttcaagaagtggggacgcataacgtgtatctggttcagattagacatatcacggtaagcgaacaaggccacggcctcatctatttcaagcgtaatttccgtccagttatgttggaaattgaagctgccgcagtttaa

SEQ ID NO: 750 - protein, 172 aa, Photorhabdus luminescens
MSVENEHRLRFRDAMASLSAAVNIVTTDGRAGCCGITATAVCSITDTPPTLMVCINRNSAMNTVFQENGRLCVNILNHEQELMARHFAGMTGVSMEERFRWNIWQTGVLGQPVLTGTLASLEGEIEQVQEVGTHNVYLVQIRHITVSEQGHGLIYFKRNFRPVMLEIEAAAV

SEQ ID NO: 751 - DNA, 513 bp, Escherichia coli
  CDS (1)..(513): transl_table=11
atgcaattagatgaacaacgcctgcgctttcgtgacgcaatggccagcctgtcggcagcggtaaatattatcaccaccgagggcgacgccggacaatgcgggattacggcaacggccgtctgctcggtcacggatacaccaccatcgctgatggtgtgcattaacgccaacagtgcgatgaacccggtttttcagggcaacggtaagttgtgcgtcaacgtcctcaaccatgagcaggaactgatggcacgccacttcgcgggcatgacaggcatggcgatggaagagcgttttagcctctcatgctggcaaaaaggtccgctggcgcagccggtgctaaaaggttcgctggccagtcttgaaggtgagatccgcgatgtgcaggcaattggcacacatctggtgtatctggtggagattaaaaacatcatcctcagtgcagaaggtcacggacttatctactttaaacgccgtttccatccggtgatgctggaaatggaagctgcgatttaa

SEQ ID NO: 752 - protein, 170 aa, Escherichia coli
MQLDEQRLRFRDAMASLSAAVNIITTEGDAGQCGITATAVCSVTDTPPSLMVCINANSAMNPVFQGNGKLCVNVLNHEQELMARHFAGMTGMAMEERFSLSCWQKGPLAQPVLKGSLASLEGEIRDVQAIGTHLVYLVEIKNIILSAEGHGLIYFKRRFHPVMLEMEAAI

SEQ ID NO: 753 - DNA, 513 bp, Salmonella dublin
  CDS (1)..(513): transl_table=11
atgcaagtagatgaacaacgtctgcattttcgcgatgcgatggcaagtctggcggcagcggtcaacatcgtaaccacggcgggtcacgccggacgctgcggtatcactgcaacagcggtctgttccgtcaccgatacgccgccctccgtaatggtatgtattaatgccaatagcgccatgaaccccgtttttcagggtaacggcaggctgtgcattaatgtacttaaccatgagcaggagctgatggcgcgccactttgcgggtatgacggggatggcgatggaagagcgttttcaccagccatgttggcaaaacgggccgctgggccagccggtacttaacggcgcgctggccggtcttgaaggcgagatcagcgaggtacaaaccattggcacgcatctggtgtatctggtggcgatcaaaaatattattcttagccaggatgggcatggcctgatttatttcaaacgccgttttcatccggtcagacttgagatggaagcgcctgtttaa

SEQ ID NO: 754 - protein, 170 aa, Salmonella dublin
MQVDEQRLHFRDAMASLAAAVNIVTTAGHAGRCGITATAVCSVTDTPPSVMVCINANSAMNPVFQGNGRLCINVLNHEQELMARHFAGMTGMAMEERFHQPCWQNGPLGQPVLNGALAGLEGEISEVQTIGTHLVYLVAIKNIILSQDGHGLIYFKRRFHPVRLEMEAPV

SEQ ID NO: 755 - DNA, 513 bp, Salmonella typhi
  CDS (1)..(513): transl_table=11
atgcaagtagatgaacaacgtctgcgttttcgcgatgcgatggcaagtctggcggcagcggtcaacatcgtaaccacggcgggtcacgccggacgctgcggtatcaccgcaacagcggtttgctcagtcactgatacgccgccctccgtgatggtatgtattaatgccaatagcgccatgaaccccgtttttcagggcaacggcaggctgtgcattaatgtacttaaccatgagcaggagctgatggcgcgccactttgtcggtatgacggggatggcgatggaggagcgttttcaccagccatgttggcaaaacgggccgctgggccagccggtacttaacggcgcgctggccagtcttgaaggcgagatcagcgaggtacaaaccattggcacgcatctggtgtatctggtggcgatcaaaaatattattcttagccaggaggggcatggcctgatttatttcaaacgccgttttcatccggtcagacttgagatggaagcgcctgtttaa

SEQ ID NO: 756 - protein, 170 aa, Salmonella typhi
MQVDEQRLRFRDAMASLAAAVNIVTTAGHAGRCGITATAVCSVTDTPPSVMVCINANSAMNPVFQGNGRLCINVLNHEQELMARHFVGMTGMAMEERFHQPCWQNGPLGQPVLNGALASLEGEISEVQTIGTHLVYLVAIKNIILSQEGHGLIYFKRRFHPVRLEMEAPV

SEQ ID NO: 757 - DNA, 513 bp, Salmonella typhimurium
  CDS (1)..(513): transl_table=11
atgcaagtagatgaacaacgtctgcgttttcgcgatgcgatggcaagtctggcggcagcggtcaacatcgtaaccacggcgggtcacgccggacgctgcggtatcaccgcaacagcggtctgttccgtcaccgatacgccgccctccgtaatggtatgtattaatgccaatagcgccatgaaccccgtttttcagggtaacggcaggctgtgcattaatgtacttaaccatgagcaggagctgatggcgcgccactttgccggtatgacggggatggcgatggaagagcgttttcaccagccatgttggcaaaacgggccgctgggccagccggtacttaacggcgcgctggccggtcttgaaggcgagatcagcgaggtacaaaccattggcacgcatctggtgtatctggtggcgatcaaaaatattattcttagccaggatgggcatggcctgatttatttcaaacgccgttttcatccggtcagacttgagatggaagcgcctgtttaa

SEQ ID NO: 758 - protein, 170 aa, Salmonella typhimurium
MQVDEQRLRFRDAMASLAAAVNIVTTAGHAGRCGITATAVCSVTDTPPSVMVCINANSAMNPVFQGNGRLCINVLNHEQELMARHFAGMTGMAMEERFHQPCWQNGPLGQPVLNGALAGLEGEISEVQTIGTHLVYLVAIKNIILSQDGHGLIYFKRRFHPVRLEMEAPV

SEQ ID NO: 759 - DNA, 20 bp, Artificial sequence
  primer
atgtcctgcatgggcgcggc

SEQ ID NO: 760 - DNA, 21 bp, Artificial sequence
  primer
ttaacaagcagggcgcatcag

SEQ ID NO: 761 - protein, 153 aa, Artificial sequence
  consensus sequence
  Variant (2)..(2): Xaa in position 2 is any amino acid
  Variant (5)..(9): Xaa in position 5 to 9 is any amino acid
  Variant (12)..(14): Xaa in position 12 to 14 is any amino acid
  Variant (17)..(17): Xaa in position 17 is any amino acid
  Variant (19)..(20): Xaa in position 19 to 20 is any amino acid
  Variant (22)..(23): Xaa in position 22 to 23 is any amino acid
  Variant (25)..(25): Xaa in position 25 is any amino acid
  Variant (28)..(28): Xaa in position 28 is any amino acid
  Variant (36)..(36): Xaa in position 36 is any amino acid
  Variant (40)..(41): Xaa in position 40 to 41 is any amino acid
  Variant (44)..(44): Xaa in position 44 is any amino acid
  Variant (46)..(53): Xaa in position 46 to 53 is any amino acid
  Variant (55)..(56): Xaa in position 55 to 56 is any amino acid
  Variant (58)..(60): Xaa in position 58 to 60 is any amino acid
  Variant (62)..(62): Xaa in position 62 is any amino acid
  Variant (64)..(64): Xaa in position 64 is any amino acid
  Variant (66)..(75): Xaa in position 66 to 75 is any amino acid
  Variant (77)..(84): Xaa in position 77 to 84 is any amino acid
  Variant (85)..(86): Xaa in position 85 to 86 is any or no amino acid
  Variant (89)..(92): Xaa in position 89 to 92 is any amino acid
  Variant (94)..(98): Xaa in position 94 to 98 is any amino acid
  Variant (99)..(100): Xaa in position 99 to 100 is any or no amino acid
  Variant (102)..(102): Xaa in position 102 is any amino acid
  Variant (104)..(104): Xaa in position 104 is any amino acid
  Variant (106)..(122): Xaa in position 106 to 122 is any amino acid
  Variant (126)..(134): Xaa in position 126 to 134 is any amino acid
  Variant (136)..(142): Xaa in position 136 to 142 is any amino acid
  Variant (143)..(147): Xaa in position 143 to 147 is any or no amino acid
  Variant (149)..(149): Xaa in position 149 is any amino acid
  Variant (151)..(152): Xaa in position 151 to 152 is any amino acid
RXAMXXXXXAVXXXTTXGXXGXXGXTAXAVCSVTDXPPTXXVCXNXXXXXXXXFXXNXXXCXNXLXXXXXXXXXXFXXXXXXXXXXRFXXXXWXXXXXXXGXPXLXXXXXXXXXXXXXXXXXGTHXXXXXXXXXIXXXXXXXXXXXXLXYXXR

SEQ ID NO: 762 - protein, 61 aa, Artificial sequence
  protein pattern
  Variant (2)..(2): Xaa in position 2 is Ala or Ser
  Variant (3)..(3): Xaa in position 3 is any amino acid
  Variant (4)..(4): Xaa in position 4 is Phe, Ile, Leu or Met
  Variant (5)..(5): Xaa in position 5 is Ala, Gly, Pro, Ser or Thr
  Variant (6)..(6): Xaa in position 6 is Ala, Gly, Ser or Thr
  Variant (9)..(9): Xaa in position 9 is any amino acid
  Variant (10)..(10): Xaa in position 10 is any or no amino acid
  Variant (12)..(12): Xaa in position 12 is any or no amino acid
  Variant (14)..(14): Xaa in position 14 is Ser or Thr
  Variant (15)..(15): Xaa in position 15 is any amino acid
  Variant (16)..(16): Xaa in position 16 is Gly or Thr
  Variant (17)..(18): Xaa in position 17 to 18 is any amino acid
  Variant (19)..(19): Xaa in position 19 is Asp or Gly
  Variant (20)..(21): Xaa in position 20 to 21 is any amino acid
  Variant (23)..(23): Xaa in position 23 is Phe, Ile, Leu, Met or Val
  Variant (24)..(24): Xaa in position 24 is Ala or Thr
  Variant (25)..(25): Xaa in position 25 is Ala, Ile or Val
  Variant (26)..(26): Xaa in position 26 is any amino acid
  Variant (27)..(27): Xaa in position 27 is Ala or Ser
  Variant (28)..(28): Xaa in position 28 is any amino acid
  Variant (29)..(29): Xaa in position 29 is Cys or Ser
  Variant (31)..(31): Xaa in position 31 is Ile, Leu or Val
  Variant (32)..(32): Xaa in position 32 is Ser or Thr
  Variant (34)..(34): Xaa in position 34 is Ala, Asp, Asn, Gln, Ser or Thr
  Variant (36)..(36): Xaa in position 36 is Ala, Gly or Pro
  Variant (37)..(37): Xaa in position 37 is Ser or Thr
  Variant (38)..(38): Xaa in position 38 is Leu, Met or Val
  Variant (39)..(39): Xaa in position 39 is Ile, Leu or Met
  Variant (40)..(40): Xaa in position 40 is any amino acid
  Variant (42)..(42): Xaa in position 42 is Ile, Leu, Met or Val
  Variant (43)..(45): Xaa in position 43 to 45 is any amino acid
  Variant (46)..(46): Xaa in position 46 is Ala, Asn or Ser
  Variant (47)..(51): Xaa in position 47 to 51 is any amino acid
  Variant (52)..(52): Xaa in position 52 is Phe, Ile, Leu or Val
  Variant (53)..(54): Xaa in position 53 to 54 is any amino acid
  Variant (55)..(55): Xaa in position 55 is Ala or Asn
  Variant (56)..(57): Xaa in position 56 to 57 is any amino acid
  Variant (58)..(58): Xaa in position 58 is Phe, Ile, Leu or Val
  Variant (59)..(59): Xaa in position 59 is any amino acid
  Variant (60)..(60): Xaa in position 60 is Ile, Leu or Val
MXXXXXAVXXIXTXXXXXXXXGXXXXXXXSXXDXPXXXXXCXXXXXXXXXXXXXXXXXXXN

SEQ ID NO: 763 - protein, 38 aa, Artificial sequence
  protein pattern
  Variant (2)..(2): Xaa in position 2 is any amino acid
  Variant (3)..(5): Xaa in position 3 to 5 is any or no amino acid
  Variant (7)..(7): Xaa in position 7 is any amino acid
  Variant (9)..(9): Xaa in position 9 is any amino acid
  Variant (10)..(10): Xaa in position 10 is Asp, Glu, Gly, Ser or Thr
  Variant (11)..(11): Xaa in position 11 is Ala, Cys, Ser or Thr
  Variant (12)..(13): Xaa in position 12 to 13 is any amino acid
  Variant (14)..(14): Xaa in position 14 is Ala, Cys, Gly, Asn, Ser or Val
  Variant (15)..(15): Xaa in position 15 is Phe or Leu
  Variant (16)..(16): Xaa in position 16 is Asp, Glu or Gln
  Variant (17)..(17): Xaa in position 17 is Cys or Gly
  Variant (18)..(18): Xaa in position 18 is any amino acid
  Variant (19)..(19): Xaa in position 19 is Ile, Leu or Val
  Variant (20)..(25): Xaa in position 20 to 25 is any amino acid
  Variant (26)..(26): Xaa in position 26 is Ala or Gly
  Variant (29)..(29): Xaa in position 29 is any amino acid
  Variant (30)..(30): Xaa in position 30 is Ile or Val
  Variant (31)..(31): Xaa in position 31 is any amino acid
  Variant (32)..(32): Xaa in position 32 is Phe, Ile, Leu or Met
  Variant (33)..(34): Xaa in position 33 to 34 is any amino acid
  Variant (35)..(35): Xaa in position 35 is Ile, Leu or Val
  Variant (36)..(37): Xaa in position 36 to 37 is any amino acid
  Variant (38)..(38): Xaa in position 38 is Ile, Leu, Met or Val
GXXXXPXLXXXXXXXXXXXXXXXXXXTHXXXXXXXXXX

SEQ ID NO: 764 - DNA, 99 bp, Escherichia coli
  CDS (1)..(99)
atggaacagtctacgtcgtcgtcgaataccccaggtatcgaactgatttttcgcctttcatacttgcaaaagcggagaatcagctatccttttccctga

SEQ ID NO: 765 - protein, 32 aa, Escherichia coli
MEQSTSSSNTPGIELIFRLSYLQKRRISYPFP

SEQ ID NO: 766 - DNA, 21 bp, Artificial sequence
  primer
atggaacagtctacgtcgtcg

SEQ ID NO: 767 - DNA, 26 bp, Artificial sequence
  primer
ttagggaaaaggatagctgattctcc

SEQ ID NO: 768 - DNA, 954 bp, Escherichia coli K12
  CDS (1)..(954): transl_table=11
atgtatacgaagattattggtactggcagctatctgcccgaacaagtgcggacaaacgccgatttggaaaaaatggtggacacctctgacgagtggattgtcactcgtaccggtatccgcgaacgccacattgccgcgccaaacgaaaccgtttcaaccatgggctttgaagcggcgacacgcgcaattgagatggcgggcattgagaaagaccagattggcctgatcgttgtggcaacgacttctgctacgcacgctttcccgagcgcagcttgtcagattcaaagcatgttgggcattaaaggttgcccggcatttgacgttgcagcagcctgcgcaggtttcacctatgcattaagcgtagccgatcaatacgtgaaatctggggcggtgaagtatgctctggtcgtcggttccgatgtactggcgcgcacctgcgatccaaccgatcgtgggactattattatttttggcgatggcgcgggcgctgcggtgctggctgcctctgaagagccgggaatcatttccacccatctgcatgccgacggtagttatggtgaattgctgacgctgccaaacgccgaccgcgtgaatccagagaattcaattcatctgacgatggcgggcaacgaagtcttcaaggttgcggtaacggaactggcgcacatcgttgatgagacgctggcggcgaataatcttgaccgttctcaactggactggctggttccgcatcaggctaacctgcgtattatcagtgcaacggcgaaaaaactcggtatgtctatggataatgtcgtggtgacgctggatcgccacggtaatacctctgcggcctctgtcccgtgcgcgctggatgaagctgtacgcgacgggcgcattaagccggggcagttggttctgcttgaagcctttggcggtggattcacctggggctccgcgctggttcgtttctag

SEQ ID NO: 769 - protein, 317 aa, Escherichia coli K12
MYTKIIGTGSYLPEQVRTNADLEKMVDTSDEWIVTRTGIRERHIAAPNETVSTMGFEAATRAIEMAGIEKDQIGLIVVATTSATHAFPSAACQIQSMLGIKGCPAFDVAAACAGFTYALSVADQYVKSGAVKYALVVGSDVLARTCDPTDRGTIIIFGDGAGAAVLAASEEPGIISTHLHADGSYGELLTLPNADRVNPENSIHLTMAGNEVFKVAVTELAHIVDETLAANNLDRSQLDWLVPHQANLRIISATAKKLGMSMDNVVVTLDRHGNTSAASVPCALDEAVRDGRIKPGQLVLLEAFGGGFTWGSALVRF

SEQ ID NO: 770 - DNA, 978 bp, Rhodopseudomonas palustris CGA009
  CDS (1)..(978): transl_table=11
gtgacggtgattcgttcggtcgtactgggctgcggcgcttacttgccggagcgggtcctcaccaacgaagaactggcccggacggtcgacacctcggacgaatggatcgtccagcgcaccggaatccgcgaacgccacatcgccgccgatggcgaattcacctcgcatctggccaccaaggccgcccaggcggcgctcgacaatgcgggcatcactgccgatcagatcgacctgatcgtgctggcgacctcgacccccgaccacaccttcccggcgactgcagtgcaggttcaggccgcgctcggcatgacccacggcgtcgccttcgacctgcaggcggtgtgctccggcttcgtgttcgcggtcgccactgcggacaattacctgcgcgcgggctcggccaagcgggcgctggtgatcggcgccgagaccttctcccgcatcctcgactggaatgatcgcggcacctgcgtgctgttcggcgacggtgccggcgcgatcgtgctcgaggcgcaggaaggctggagtacgtccgctgaccgcggcgtgctgaccacgcatctgcgctcggacggtcgtcacaaacacaagctgtatgtcgacggcggcccgtcgagcacccagaccgtcggccatctgcggatggaagggcgcgaggtgttcaagcacgcggtcggcatgatcaccggggtgatcgtcgacgctttcaacgcctccggcaccagcgccgacaatgtcgattggttcgtgccgcatcaggccaacaagcggatcatcgacgcctcggcgcagaagctgcacatcgcgcccgagaaggtggtgatgacggtcgaccgccacggaaatacctcagcggcctcgattccgctggcgttgtgcactgcggtcgctgacggccgcatccaaaagggccacttggttctgctcgaagcgatgggcggcggcttcacctggggcgccgcgctgctccgctggtag

SEQ ID NO: 771 - protein, 325 aa, Rhodopseudomonas palustris CGA009
MTVIRSVVLGCGAYLPERVLTNEELARTVDTSDEWIVQRTGIRERHIAADGEFTSHLATKAAQAALDNAGITADQIDLIVLATSTPDHTFPATAVQVQAALGMTHGVAFDLQAVCSGFVFAVATADNYLRAGSAKRALVIGAETFSRILDWNDRGTCVLFGDGAGAIVLEAQEGWSTSADRGVLTTHLRSDGRHKHKLYVDGGPSSTQTVGHLRMEGREVFKHAVGMITGVIVDAFNASGTSADNVDWFVPHQANKRIIDASAQKLHIAPEKVVMTVDRHGNTSAASIPLALCTAVADGRIQKGHLVLLEAMGGGFTWGAALLRW

SEQ ID NO: 772 - DNA, 978 bp, Geobacter sulfurreducens PCA
  CDS (1)..(978): transl_table=11
atgagagcaaggatcgtcgggaccggttcggccgtcccttccaaggtgcttaccaatttcgatctggagaagatggtcgatacctccgacgagtgggtaaccacgcgcaccggaatcaaagagcgccgcattgccgttgatggggaatatacttctacctttgcgacactggcagcggaacgggccctcgaaatggccggcgtcaaggcttcggatctcgatctgttgattgtcgcaactattacgcctgattttccgtttcccgccaccgcatgtgtggtccagagcaatctcaaggcaacgaaggcggctgcctatgatatctcggcagcttgctcaggctttatctacgcccttgctcaagcatctaatgcaatcagatcgggatccgcccggaaggctctggtcattggtgcggaagttctgtcgcggattatcgactggacagaccgcaacacctgccttcttttcggcgacggcgccggcgcggtggttctggaggcatgcgatgacggccatggggtcctgtccacccaccttcacagtgacggctcgtactgggaactgctctatcaacccggttgcggcaacagaaatcccgccgtccagaagactcttgacgaccgtcgtatctatctcatgatgcaggggaatgaggttttcaaactcgccgtgagggccatggaggatgccgcccttgaagcccttgatgcaaacgggctcacgcctgcagacatttcgttgttcatcccccatcaggccaatcgccgcatcattgatgccatcggcaaacgcctcggcttgccgggcgaaaaggtctacgtcaatctcgaccggttcggcaatacctcggcggcatccattccgctggcactggacgaagctaaccgctcgggccggatcaagcccaacgatgtagtggtattcgatgccttcggcggcgggcttacctggggatcggcactggtgcgctggtaa

SEQ ID NO: 773 - protein, 325 aa, Geobacter sulfurreducens PCA
MRARIVGTGSAVPSKVLTNFDLEKMVDTSDEWVTTRTGIKERRIAVDGEYTSTFATLAAERALEMAGVKASDLDLLIVATITPDFPFPATACVVQSNLKATKAAAYDISAACSGFIYALAQASNAIRSGSARKALVIGAEVLSRIIDWTDRNTCLLFGDGAGAVVLEACDDGHGVLSTHLHSDGSYWELLYQPGCGNRNPAVQKTLDDRRIYLMMQGNEVFKLAVRAMEDAALEALDANGLTPADISLFIPHQANRRIIDAIGKRLGLPGEKVYVNLDRFGNTSAASIPLALDEANRSGRIKPNDVVVFDAFGGGLTWGSALVRW

SEQ ID NO: 774 - DNA, 975 bp, Bartonella henselae str. Houston-1
  CDS (1)..(975): transl_table=11
atgattcgatctgttgtgcgtggtataggaggtgccttacccaaaaaaagcttatcgaatgatgatattgcgaagtttgttgaaacatcagattcttggattgttcagcgtacgggaatacgccaacgctacattgccaatgaaaaggaaacaacagtttctttgggagtagaagctgcacaagctgcacttataaatgctggtttaacaattaaagatattgattgtattattttggcgacatcaacaccaaatcacacttttcccgcttctgctgtcgaaattcaacatgctttgggaatgagccatggatttgcgtttgatattcaggctgtttgctcgggttttatttttgctttaacaacaggagatgcttatttacgctgtggaacagccaaaaggattttggttatcggatctgacacattttctcgaattttagattggcaagatcgtacgacatgtgttttgttcggtgatggtgcgggtgctgctgttttagaagcacaagaaattgagagaggcgttgcttctgatcatggcattttatctacaaaattgcgctctaatggtgcgtatatggataaactttatgttgatggtggtccttcaacaacgcaaaaaactggctatttacgtatggaaggacgagaagtttttaaatatgcagttggtatgataaccgatgtagttgatgagtgttttgcagctgcaggtatggattcttcacaattagattggtttgtacctcatcaggccaataaacgtattattgaagcgtcagctaaaaaactaggaatttctatagataaagtggtaatcaccgttgatcgacacggtaatacgtctgcagcatctgtgccattggctttaacaatggctatttgcgatggaaaaattaaaaaaggagatcttgtcatgttagaagctatgggaggagggtttacatggggtgcaattcttattcgttggtag

SEQ ID NO: 775 - protein, 324 aa, Bartonella henselae str. Houston-1
MIRSVVRGIGGALPKKSLSNDDIAKFVETSDSWIVQRTGIRQRYIANEKETTVSLGVEAAQAALINAGLTIKDIDCIILATSTPNHTFPASAVEIQHALGMSHGFAFDIQAVCSGFIFALTTGDAYLRCGTAKRILVIGSDTFSRILDWQDRTTCVLFGDGAGAAVLEAQEIERGVASDHGILSTKLRSNGAYMDKLYVDGGPSTTQKTGYLRMEGREVFKYAVGMITDVVDECFAAAGMDSSQLDWFVPHQANKRIIEASAKKLGISIDKVVITVDRHGNTSAASVPLALTMAICDGKIKKGDLVMLEAMGGGFTWGAILIRW

SEQ ID NO: 776 - DNA, 954 bp, Legionella pneumophila subsp. pneumophila str. Philadelphia 1
  CDS (1)..(954): transl_table=11
atgaaaaatgctgttattaatggcactggaagttactctccagagagacaaatgactaatgctgaactggaaaccatgcttgatactagcgatgaatggattgttaccaggactggtattagtagccgtagtgttgctcaagaacatgaaacaacatcttatatggcttccagagcagcagagcaagcactagaggcatcaggccttgatgctgaagaaattgatttgatattagtagcaacatgtaccccagattatttttttcctagcgttgcctgtcacgtacaacatgctttaggaatcaaaagacctattccggcttttgacattggagctgcatgcagcggttttgtttatgcgatggatgtagcgaaacaatacattgctacaggggctgccaaacacgttcttgtcgtaggcagcgagagcatgtcaagagcggtagattggactgatcgttctatttgtgtcttattcggagatggcgcaggcgctgttgttttaagcgcaagtgatcgccaagggattatgggtagtgttttacattctgcctatgactctgataaattactagtccttcgtaattcaacttttgaacaagatcgtgcaacgattggaatgcgaggtaatgaggtattcaaaattgctgttaatattatgggtaatattgttgatgaagtattagaagcaagtcatttaaaaaaatctgatattgattggctgatacctcatcaagccaatatacgcatcatacaagccatagctaaaaaattatctcttcctatgtcacatgttattgttacaattggtaaccaaggtaacacatcggctgcttctattcccttagcacttgattattctattaaaaataatcagattaaaagggatgaaatattattaattgaatcctttggtggtggaatgacctggggcgctatggttattcgttactaa

SEQ ID NO: 777 - protein, 317 aa, Legionella pneumophila subsp. pneumophila str. Philadelphia 1
MKNAVINGTGSYSPERQMTNAELETMLDTSDEWIVTRTGISSRSVAQEHETTSYMASRAAEQALEASGLDAEEIDLILVATCTPDYFFPSVACHVQHALGIKRPIPAFDIGAACSGFVYAMDVAKQYIATGAAKHVLVVGSESMSRAVDWTDRSICVLFGDGAGAVVLSASDRQGIMGSVLHSAYDSDKLLVLRNSTFEQDRATIGMRGNEVFKIAVNIMGNIVDEVLEASHLKKSDIDWLIPHQANIRIIQAIAKKLSLPMSHVIVTIGNQGNTSAASIPLALDYSIKNNQIKRDEILLIESFGGGMTWGAMVIRY

SEQ ID NO: 778 - DNA, 990 bp, Burkholderia mallei ATCC 23344
  CDS (1)..(990): transl_table=11
atggcccaatcgaccctctattcccgcgtgctcggcacgggtagctatctgccgcccgatcgcgtcacgaatcaagaactcgccgatcgtctcgcgaaggacggcatcgagacgagcgacgagtggatcgtcgcgcgcacgggcatccgcgcgcggcacttcgccgcgcccgacgtgacgacgagcgatctcgcgctcgtcgccgcgcagcgcgcgatcgaggcggccgacgtcgatccgcagtcgatcgacctcatcatcgtcgcgacgtcgacgcctgatttcgttttcccgagcaccgcgtgcctgctgcagaacaagctcggcatcaagaacggcggcgccgcgttcgacgtgcaggcggtatgttcgggcttcgcctacgcgctcgcgacggccgacagcttcatccgcacggggcagcaccgcacggcgctcgtcatcggcgcggaggcgttctcgcgcattctcgatttcaaggaccgtacgacctgcgtgctgttcggcgacggcgcgggcgccgtcgtgctgtcggcgtccgaagagccgggcatcctcggcagcgcgctgcatgcggacggcagctattcgaacattctctgcacgccgggcaacgtgaaccgcggcgtcatcgcgggcagcgcgttcctgcacatggacggccaggccgtcttcaagcttgccgtgaacgtgctcgagaaagtcgcggtcgaagcgctgtcgaaggcggagctcgcgtcggaacaggtcgattggctgattccgcaccaggccaatatccgtatcatgacaagcacgtgccgcaagctcggcctgccgcaggaacgcatgatcgtcaccgtcgacgagcacggcaacacgtccgccgcatcgattccgctcgcactcgacgtcgccgtgcgcgacggccgcatcaagcgcggccagcacgtgctgatcgaaggcgtcggcggcggcttcacgtggggcgcgtcggtcttccgcttctga

SEQ ID NO: 779 - protein, 329 aa, Burkholderia mallei ATCC 23344
MAQSTLYSRVLGTGSYLPPDRVTNQELADRLAKDGIETSDEWIVARTGIRARHFAAPDVTTSDLALVAAQRAIEAADVDPQSIDLIIVATSTPDFVFPSTACLLQNKLGIKNGGAAFDVQAVCSGFAYALATADSFIRTGQHRTALVIGAEAFSRILDFKDRTTCVLFGDGAGAVVLSASEEPGILGSALHADGSYSNILCTPGNVNRGVIAGSAFLHMDGQAVFKLAVNVLEKVAVEALSKAELASEQVDWLIPHQANIRIMTSTCRKLGLPQERMIVTVDEHGNTSAASIPLALDVAVRDGRIKRGQHVLIEGVGGGFTWGASVFRF

SEQ ID NO: 780 - DNA, 990 bp, Burkholderia pseudomallei K96243
  CDS (1)..(990): transl_table=11
atggcccaatcgaccctctattcccgcgtgctcggcacgggtagctatctgccgcccgatcgcgtcacgaatcaagaactcgccgatcgtctcgcgaaggacggcatcgagacgagcgacgagtggatcgtcgcgcgcacgggcatccgcgcgcggcacttcgccgcgcccgacgtgacgacgagcgatctcgcgctcgtcgccgcgcagcgcgcgatcgaggcggccgacgtcgatccgcagtcgatcgacctcatcatcgtcgcgacgtcgacgcctgatttcgttttcccgagcaccgcgtgcctgctgcagaacaagctcggcatcaagaacggcggcgccgcgttcgacgtgcaggcggtatgttcgggcttcgcctacgcgctcgcgacggccgacagcttcatccgcacggggcagcaccgcacggcgctcgtcatcggcgcggagacgttctcgcgcattctcgatttcaaggaccgtacgacctgcgtgctgttcggcgacggcgcgggcgccgtcgtgctgtcggcgtccgaagagccgggcatcctcggcagcgcgctgcatgcggacggcagctattcgaacatcctctgcacgccgggcaacgtgaatcgcggcgtcatcgcgggcagcgcgttcctgcacatggacggccaggccgtcttcaagcttgccgtgaacgtgctcgagaaagtcgcggtcgaagcgctgtcgaaggcggagctcgcgtcggaacaggtcgattggctgattccgcaccaggccaatatccgtatcatgacaagcacgtgccgcaagctcggcctgccgcaggaacgcatgatcgtcaccgtcgacgagcacggcaacacgtccgccgcatcgattccgctcgcactcgacgtcgccgtgcgcgacggccgcatcaagcgcggccagcacgtgctgatcgaaggcgtcggcggcggcttcacgtggggcgcgtcggtcttccgcttctga

SEQ ID NO: 781 - protein, 329 aa, Burkholderia pseudomallei K96243
MAQSTLYSRVLGTGSYLPPDRVTNQELADRLAKDGIETSDEWIVARTGIRARHFAAPDVTTSDLALVAAQRAIEAADVDPQSIDLIIVATSTPDFVFPSTACLLQNKLGIKNGGAAFDVQAVCSGFAYALATADSFIRTGQHRTALVIGAETFSRILDFKDRTTCVLFGDGAGAVVLSASEEPGILGSALHADGSYSNILCTPGNVNRGVIAGSAFLHMDGQAVFKLAVNVLEKVAVEALSKAELASEQVDWLIPHQANIRIMTSTCRKLGLPQERMIVTVDEHGNTSAASIPLALDVAVRDGRIKRGQHVLIEGVGGGFTWGASVFRF

SEQ ID NO: 782 - DNA, 966 bp, Methylococcus capsulatus str. Bath
  CDS (1)..(966): transl_table=11
gtgagccgttactcccgcatcgcgggcaccggcggctaccttccccggcaggtggtgaccaacgacgatctcgccatgcgggtcgagacgtcggacgaatggatcgtcgagcgcactggcatccgccgccgacacatcgcggctgctgacgaaacggcctccagcatggccgagattgcctcccggcaggcactggaggctgccgccatcgatccccacgatctcgatctgatcatcctcgcgaccagttcgccggaccgggtttttcccagcacggcatgcctcctgcagcagcgcttgggcgtgcgcagctgtgcggctttcgacgtgcaggcggcgtgttcggggttcatcttcgcgttgagcatcgccgaccagtacatttccgccggcaatgccaaccgcgtgttggtggtcggtacggaggtcaattcgcgttccgtggattgggacgaccgctcgacttgcattctgttcggtgacggtgccggggccgtggtgctcgaatctgccaccgagcccggcatcatgagcacccatatccattccgacggccattaccaagatctgctctatctgcccaatcccgccagcaacggcgaaggcagcgacgagagccgcaccatccggatgcagggcagcgaggttttcaaggtcgcggtcaacacactcggtcgcatcgtcgatgaaaccctggaacagaacggccttcagaaatctgacgtcgactggctggtgccccatcaggccaacatccgcatcatcgcggcgaccgcgaagaagctccagttgcccatggagcgggtggtcgtgacggtggacgagcagggcaacacttcttcggcatcgattcctctggctttcgacgaggccgttcgcgacggccgcatcaagcgcggacaaaccgtgcttatggaagccttcggcggcgggttcgcctggggctccgctcttctgcgctattaa

SEQ ID NO: 783 - protein, 321 aa, Methylococcus capsulatus str. Bath
MSRYSRIAGTGGYLPRQVVTNDDLAMRVETSDEWIVERTGIRRRHIAAADETASSMAEIASRQALEAAAIDPHDLDLIILATSSPDRVFPSTACLLQQRLGVRSCAAFDVQAACSGFIFALSIADQYISAGNANRVLVVGTEVNSRSVDWDDRSTCILFGDGAGAVVLESATEPGIMSTHIHSDGHYQDLLYLPNPASNGEGSDESRTIRMQGSEVFKVAVNTLGRIVDETLEQNGLQKSDVDWLVPHQANIRIIAATAKKLQLPMERVVVTVDEQGNTSSASIPLAFDEAVRDGRIKRGQTVLMEAFGGGFAWGSALLRY

SEQ ID NO: 784 - DNA, 966 bp, Azoarcus sp. EbN1
  CDS (1)..(966): transl_table=11
atgatctacgcacggatcgccggaactggcagctttctgccgggcgagccgataaccaacgatgacctggtggcgcgcggtatcgatacgtcggaccaatggatcatcgaacggaccggaatccgcagccgacatctggcgtcggcggaaatgtcgtcgagcgatctggccaagacggcgagcgagcgcgccctcgacgcggcaggagtgcggcccgacgacatcgacctgatcatcgtcgcgacctccacgcccgactgcatctttcccagcaccgccgcactgctccagtcgaagctcggcattcgcaatggcgctgccgcgttcgacgtgcaggcggtttgcagcggttttgtctatgggctgacgatcgccgagaagttcatccgctccggtagccacaagcgcgcgctggtcgtcggcgccgaagtgttctcgcgcattctcgactggtcggatcgcggcacctgcgtcctgttcggtgacggcgccggcgcggtcgtgctcgaagcggccgaggcgccgggaatcctcgcgagcgcgctgcatgccgacggaagccatcatccgattctctgcgttccgggtgcggtggcggccggccaggtcgtcggcgacccgttcctgcgcatggacggccaggccgtgttcaagttcgcggtccgggtgctgggcgacgtcgcgctggaagtgctcgatcaggcaggtgtcacggtggactccgtggactggctgattccccatcaggcgaatatccgcatcctgcaggcgactgcgcgccgtctcggcgtttcgatggacaaagtgatcacgaccgtcgatcaccacggcaacacttccgcggcatcgattccgctggcgctcgacctcgccgtccgcgatggccgtatccggccggggcaccgcttcatcatcgaaggggtaggcgggggcttcacgtggggcgcggcgctgctccaattctga

SEQ ID NO: 785 - protein, 321 aa, Azoarcus sp. EbN1
MIYARIAGTGSFLPGEPITNDDLVARGIDTSDQWIIERTGIRSRHLASAEMSSSDLAKTASERALDAAGVRPDDIDLIIVATSTPDCIFPSTAALLQSKLGIRNGAAAFDVQAVCSGFVYGLTIAEKFIRSGSHKRALVVGAEVFSRILDWSDRGTCVLFGDGAGAVVLEAAEAPGILASALHADGSHHPILCVPGAVAAGQVVGDPFLRMDGQAVFKFAVRVLGDVALEVLDQAGVTVDSVDWLIPHQANIRILQATARRLGVSMDKVITTVDHHGNTSAASIPLALDLAVRDGRIRPGHRFIIEGVGGGFTWGAALLQF

SEQ ID NO: 786 - DNA, 963 bp, Neisseria gonorrhoeae FA 1090
  CDS (1)..(963): transl_table=11
atgcagtatgcaaaaatttccggcacgggcagctatcttcctgccaaccgcgtcagcaatgacgaccttgcccaaaaggtagatacctctgacgagtggattaccgcgcgtacgggcatcaaattccgccatattgcagccgaaaacgaaaaaaccagcgatcttgcagccgaagcggcgcggcgcgctttggcagatgccaaattaaatataaacgacattgatttgattatcgtggcgacggcaacgccggatatgcagtttccttctaccgccaccatcgtgcagcaaaaattgggcatcaccaacggctgccccgcgtttgacgtgcaggcggtgtgcgcaggctttatgtacgcgctgactacggcaaatgcctacattaaaagcggtatggcgaaaaacgcgctggtcatcggcgcggaaaccttcagccgcatcgtcgattggaacgaccgcacaacctgcgtgctgttcggcgacggcgcgggcgcggtggttttaagcgcgtccgacaaaccgggcatcatccacagcaaactcaaagccgacggcaattatctgaaactcttaaacgtccccgggcaaatcgcctgcggcaaagtttccggttcgccgtacatttcgatggacggtcccggcgtgttcaagtttgccgtcaaaatgctgtccaaaatcgccgatgacgttatcgaagaagcaggttacaccgccgaacaaatcgactggattgttccccatcaggcaaaccgccgcattatcgaatcgaccgcgaaacatttgggtttgagtatggacaaagtcgtcctgaccgtccaagaccacggcaacacgtccgccgcatccattccgctggctttggacgcgggcatccgcagcggacaaatcaaacgcggtcaaaacctgctgctcgaaggcataggcggcggtttcgcgtggggcgcggtgctgttgcaatattga

SEQ ID NO: 787 - protein, 320 aa, Neisseria gonorrhoeae FA 1090
MQYAKISGTGSYLPANRVSNDDLAQKVDTSDEWITARTGIKFRHIAAENEKTSDLAAEAARRALADAKLNINDIDLIIVATATPDMQFPSTATIVQQKLGITNGCPAFDVQAVCAGFMYALTTANAYIKSGMAKNALVIGAETFSRIVDWNDRTTCVLFGDGAGAVVLSASDKPGIIHSKLKADGNYLKLLNVPGQIACGKVSGSPYISMDGPGVFKFAVKMLSKIADDVIEEAGYTAEQIDWIVPHQANRRIIESTAKHLGLSMDKVVLTVQDHGNTSAASIPLALDAGIRSGQIKRGQNLLLEGIGGGFAWGAVLLQY

SEQ ID NO: 788 - DNA, 960 bp, Dechloromonas aromatica RCB
  CDS (1)..(960): transl_table=11
atgtatgcacgcctgagtggcaccggcagttatctgccgggtaatcctgtcagcaacagcgatctagctgcgcgcggtatcgataccagcgacgagtggatcgtcactcgtaccggcattcgcagtcgctatctcgctccaccgggtactacttcgagcgaacttggcttgatcgccgcgcaaaaagcgctggaaatggccggcgtggcaggcgccgaccttgatctgatcatcgttgctacctcgactcccgatttcatctttccgagcactgcctgcctaatccaaggaaaacttggcaacaagggggctgcagcctttgatgttcaggcagtctgcgccggttttacctacgctctgggtattgccgaaaaattcatttgctccggcagccacaagaaagccttggttattggtgccgaggtgttttcgcgcatccttgactggaacgatagggggacctgcgtcctgtttggcgatggcgccggggctgtggttcttgaggccgctgataaaccaggcattctggctacggccatgcatgccgacggtagccagagcggtatcctgaatgtgccggggcaaatttgcggcggtcaggtgactggtgaccctttcctgcgcatggacggccaggcagtcttcaaatttgctgtgcgcgtgctggccgatatagccgagaaagtctgtcaagccgccgatattcaaaccagtgatgttgattggttgattcctcatcaggcaaatattcgaattatcgaagctaccggcaagaagctgggggtcgatcgcgataaggtgatcgttactgttgaccgccatggcaacacttccgccgcttctgtaccgctggcgctagatgaagcggtgcgcgacgggcgtatccagcgaggccagaaggtacttcttgaaggcgttggtggcggctttacttggggcgcagccctgcttgaattctga

SEQ ID NO: 789 - protein, 319 aa, Dechloromonas aromatica RCB
MYARLSGTGSYLPGNPVSNSDLAARGIDTSDEWIVTRTGIRSRYLAPPGTTSSELGLIAAQKALEMAGVAGADLDLIIVATSTPDFIFPSTACLIQGKLGNKGAAAFDVQAVCAGFTYALGIAEKFICSGSHKKALVIGAEVFSRILDWNDRGTCVLFGDGAGAVVLEAADKPGILATAMHADGSQSGILNVPGQICGGQVTGDPFLRMDGQAVFKFAVRVLADIAEKVCQAADIQTSDVDWLIPHQANIRIIEATGKKLGVDRDKVIVTVDRHGNTSAASVPLALDEAVRDGRIQRGQKVLLEGVGGGFTWGAALLEF

SEQ ID NO: 790 - DNA, 981 bp, Ralstonia eutropha JMP134
  CDS (1)..(981): transl_table=11
atgaccaagtacgcaaaaatcatcggtaccgggagctacctgcccccgcggcgtgtgaccaaccaggatctggcggcgcaactggccgagaagggcatcgagaccagcgacgagtggatcttctcgcgcagcggcatctcggcacgccactgggccgacccggacgtggccagcagcgacctggccgtcaaggcggccgagcaggcgatcgaagcggctggcatcgaccgccagagcatcgacctgatcctggtcgcgacgtcgacgccagacttcgtgttcccgagcaccgcgtgcatcatccagaacaagctgggcatcaataaccagtgcgccgccttcgacctgcaagcggtgtgctcgggcttcgtgtatgcgctggccacggccgacaagttcatccgcagtggttcgcaccgcaatgtgctggtgattggcaccgaagtgttctcgcggatcctggacttcaacgaccgtacgacttgtgtgctgtttggcgacggcgccggtgcagtcgtgctgtcggcatccgacgagcccggcatcctgtcgacggccatgcattccgatggcagccatgtgggcatcctgtgcgtgccgggcaacgtccacggcggcgcgatcgcaggcaatgctttcctgcacatggacggccaggcagtgttcaagcttgccgtgaccgtgctagacaaggtcgcgcgcgaaaccatggcggcggccgagatccagcccgagcagatcgactggctcattccccatcaggccaatatccgcatcatgcagggcaccgcgcgcaagctcggcctgcccgccgagcgcatgattgcggtcgtccacgaacacggcaatacctcggccgcgtcaattccgctggcactggatgccgcggtgcgcgacggccgcatccgtcccggccagaccgtgctgatggaaggcgtgggcgggggcttcacctggggcgctgcgctgctgcgcatgtaa

SEQ ID NO: 791 - protein, 326 aa, Ralstonia eutropha JMP134
MTKYAKIIGTGSYLPPRRVTNQDLAAQLAEKGIETSDEWIFSRSGISARHWADPDVASSDLAVKAAEQAIEAAGIDRQSIDLILVATSTPDFVFPSTACIIQNKLGINNQCAAFDLQAVCSGFVYALATADKFIRSGSHRNVLVIGTEVFSRILDFNDRTTCVLFGDGAGAVVLSASDEPGILSTAMHSDGSHVGILCVPGNVHGGAIAGNAFLHMDGQAVFKLAVTVLDKVARETMAAAEIQPEQIDWLIPHQANIRIMQGTARKLGLPAERMIAVVHEHGNTSAASIPLALDAAVRDGRIRPGQTVLMEGVGGGFTWGAALLRM

SEQ ID NO: 792 - DNA, 960 bp, Thiobacillus denitrificans ATCC 25259
  CDS (1)..(960): transl_table=11
ttgacctattcccgcattctcggcaccggcggttacctgccggcgcgcatcttgaccaacgccgaccttgagaagctcgtcgacaccaacgaccagtggatcgtcgaccgcaccggcatccgcgaacggcacatcgcggccgacggcgaattcacgagcgacctcgcgactgcggcagcccgcgcggcactcgaggcggcgaatctcgcggccgacgacatcgacctcctgctggtcgcgacgacgacgccggatctggtctttccaagcacggcctgcatcgtgcagtccaagctcggcatgaccaacggcaagccggccttcgatctacaggccgtctgcagcggcttcgtctacgcgctctcggtggccgaccagttcatcaagggcggcgcggcgaagcatgtgctcgtggtcggcgcggagaccttgtcgcgcatcaccgactggaacgaccgcagcaactgtattctgtggggggacggcgcaggcgccgtcgtcgtcggagcatcgtccgagccggggatcatcgcgacgcatatccacgccgatggccggcacaaggaattgctgcgcacgacgaccggcccttcgagcggctcgaaaacacccgcgctcatgcgcatggagggcaacgcggtgttcaagatggctgtcaacacgctcgatcgcattgttgacgagacgctcgaggcgaacggcctcgccaagaccgacatcgattggctggtgccgcatcaggccaacatccgcatcatctcggcgaccgcgaagaagctcggcatgagcatggacaacgtcgtgacgacggtcgccggacacggcaacacctcggccgcgtcggtgccgctcgcgttcgacgccgccgtgcgggacggccgtatcaagcgcggccagatcgtgctcatggaggcgttcggcggggggttcacctggggctcggcgctgcttaggtattga

SEQ ID NO: 793 - protein, 319 aa, Thiobacillus denitrificans ATCC 25259
MTYSRILGTGGYLPARILTNADLEKLVDTNDQWIVDRTGIRERHIAADGEFTSDLATAAARAALEAANLAADDIDLLLVATTTPDLVFPSTACIVQSKLGMTNGKPAFDLQAVCSGFVYALSVADQFIKGGAAKHVLVVGAETLSRITDWNDRSNCILWGDGAGAVVVGASSEPGIIATHIHADGRHKELLRTTTGPSSGSKTPALMRMEGNAVFKMAVNTLDRIVDETLEANGLAKTDIDWLVPHQANIRIISATAKKLGMSMDNVVTTVAGHGNTSAASVPLAFDAAVRDGRIKRGQIVLMEAFGGGFTWGSALLRY

SEQ ID NO: 794 - DNA, 990 bp, Burkholderia sp. 383
  CDS (1)..(990): transl_table=11
atggcccaatcgactctctattcccgcgtgctcggcacgggcagctacctgccgcctgaccgcgtcacgaaccagcagttgaccgatcgccttgcgaaggaaggcatcgagacgagcgatgaatggatcgttgcgcgcacgggtatccatgcgcgccatttcgccgcaccggacgtcacgaccagcgacctcgcgctcgaggcgtcgcgccgcgcgattgaagccgccggcatcgatccgcagtcgatcgacctgatcatcgtcgcgacttcgacccccgatttcgtgttcccgagcaccgcgtgcctgctgcagaacaagctcggcatcaagaacggcggcgcggcattcgacgtgcaggccgtgtgttcgggcttcgcgtacgcgatggcgacggccgacagcttcatccgcagcggccagcaccgcacggcgcttgtcatcggtgcggagacgttctcgcgcattctcgacttcaaggaccgcacgacctgcgtgctgttcggcgacggtgcgggcgcggtgatcctgtccgcgtcggaagagccgggcgtgctcggcagcgcactgcacgcggacggcagctattcgcacatcctctgcacgccgggcaacgtcaaccgcggcgtgatcgaaggcagcgcgttcctgtacatggacgggcaggccgtgttcaagctcgcggtcaacgtgctcgaaaaggtcgcgatcgaggcgctcgcgaaggcgaatctcgcgcccgagcagatcgactggctgattccgcaccaggccaacatccgcatcatgaccagcacctgccgcaagctcggcctgccgcaggagcgcatggtcgtgacggtcgaccagcacggcaacacgtcggctgcgtcgatcccgctggcattcgacaccgcggtgcgcgacggtcgcatccagcgcggccagcacgtgctgatcgaaggcgtcggcggcggcttcacctggggcgcgtcggtcttccgctactga

SEQ ID NO: 795 - protein, 329 aa, Burkholderia sp. 383
MAQSTLYSRVLGTGSYLPPDRVTNQQLTDRLAKEGIETSDEWIVARTGIHARHFAAPDVTTSDLALEASRRAIEAAGIDPQSIDLIIVATSTPDFVFPSTACLLQNKLGIKNGGAAFDVQAVCSGFAYAMATADSFIRSGQHRTALVIGAETFSRILDFKDRTTCVLFGDGAGAVILSASEEPGVLGSALHADGSYSHILCTPGNVNRGVIEGSAFLYMDGQAVFKLAVNVLEKVAIEALAKANLAPEQIDWLIPHQANIRIMTSTCRKLGLPQERMVVTVDQHGNTSAASIPLAFDTAVRDGRIQRGQHVLIEGVGGGFTWGASVFRY

SEQ ID NO: 796 - DNA, 981 bp, Geobacter metallireducens GS-15
  CDS (1)..(981): transl_table=11
atggccagagcgagaattatcggcacaggttcggccgtgcctgagatgatacggactaatttcgacctggaaaagatggtcgacaccaccgacgactggattaccaccaggactggcatcagggagcggcgcatcgctgctgaaggcgaatatacttcaactttcgcaacccgtgcggctgagcgggctctcgagatggctggtgttactgctgaagaaattgatctcctcattgttgcgaccgtcaccccagattttccctttccatctaccgcatgcatagttcagagcaatatcggagcgaaaagggccgctgcgtttgatgtctccgctgcctgttcggggtttctctatggactctcgttggcggacaatgccattcggtctgggggggcaagtaaagctctcatcatcggcgccgaggttctgagccgagttattgactggaccgacagaaatacctgccttcttttcggtgacggttccggggccgtagtggttgaagcatgcgaaagtgaacagggagttctttcaacgcacctgcatagcgacggttcctattgggaactcctttatcagcccggttgcggcaatcgaaaccccgccgttcagaagaccctggatgagaggaagaactttctccgaatgcaggggaatgaggtgttcaagcttgccgtgcgggctatggaagacgctgcccttcaagcactggaaaagaatggcctcactccctcggatatcagtatttttataccccaccaggctaatcgtagaatcatcgatgccatcggcaagcgtcttggtttaagcgatgacaaagtctacgttaatcttgatcgatatggaaacacctcttctgcttcaatcccgcttgcgcttgatgaagccaaccgtggtgggcggataaacgagggggatattgtcctctttgatgccttcggcggtggcctcacgtgggcctctgttctgctgcgctggtaa

SEQ ID NO: 797 - protein, 326 aa, Geobacter metallireducens GS-15
MARARIIGTGSAVPEMIRTNFDLEKMVDTTDDWITTRTGIRERRIAAEGEYTSTFATRAAERALEMAGVTAEEIDLLIVATVTPDFPFPSTACIVQSNIGAKRAAAFDVSAACSGFLYGLSLADNAIRSGGASKALIIGAEVLSRVIDWTDRNTCLLFGDGSGAVVVEACESEQGVLSTHLHSDGSYWELLYQPGCGNRNPAVQKTLDERKNFLRMQGNEVFKLAVRAMEDAALQALEKNGLTPSDISIFIPHQANRRIIDAIGKRLGLSDDKVYVNLDRYGNTSSASIPLALDEANRGGRINEGDIVLFDAFGGGLTWASVLLRW

SEQ ID NO: 798 - DNA, 975 bp, Rhodospirillum rubrum ATCC 11170
  CDS (1)..(975): transl_table=11
atgtggcgttccgtgatcgcgggatgcgggtcctacctgcccgcgaacaaggtgaccaacgccaatttggcggagcgggtggagaccaccgatgcttggatccgcgaaaggaccggcattctggtgcgccacttcgccgccgagggggaaaagacctctgatctggcgatggccgccgctagggccgccctggccgatgccggggtcgacgccgccgaggtcgatctgatcgttctggcgaccgccacccccgaccagaccttcccggccaccgccacccgggttcaggccggactgggctgtcggcccggcgcgccggccttcgatatccaggcggtctgttcgggttttctctatgccctcagcgtcgccgacgccctgatcaaggccggtcaggcgcgtaccgcgctggttatcggcgccgaaaccttctcgcgcattcttgatttcaccgaccgcaccacctgcgtgctgtttggcgatggcgccggggcggtggttttgcgggcgacgccctcgaccggcgacggcggcgagcgcggcatcttgtcgacccatctgcatgccgatggccgccaccatgatctgctctatgtcgatggcgggccgtcgtcgaccggcaccgtgggccatctgcggatgcagggccgcgaggttttccgccatgcggtgaccaatctttacgaggtcgtccttgaagccctggcggccaatggccttcaggccgacgccatcgactgggtggttccccatcaggccaatcagcgcatcctcgatggcaccgccaagaagctgggcatcgatccggccaaggtgatcagcaccatcgcccttcacgccaacacctcggccgcctcggtgccgctggcgctttgcgaggcccggcgcgatggccgcattcagcccggtcagttgattttgctcgaagccatgggcggcggtttcacctggggctcggccctggtccggctgtaa

SEQ ID NO: 799 - protein, 324 aa, Rhodospirillum rubrum ATCC 11170
MWRSVIAGCGSYLPANKVTNANLAERVETTDAWIRERTGILVRHFAAEGEKTSDLAMAAARAALADAGVDAAEVDLIVLATATPDQTFPATATRVQAGLGCRPGAPAFDIQAVCSGFLYALSVADALIKAGQARTALVIGAETFSRILDFTDRTTCVLFGDGAGAVVLRATPSTGDGGERGILSTHLHADGRHHDLLYVDGGPSSTGTVGHLRMQGREVFRHAVTNLYEVVLEALAANGLQADAIDWVVPHQANQRILDGTAKKLGIDPAKVISTIALHANTSAASVPLALCEARRDGRIQPGQLILLEAMGGGFTWGSALVRL

SEQ ID NO: 800 - DNA, 990 bp, Burkholderia thailandensis E264
  CDS (1)..(990): transl_table=11
atggcccaatcgaccctctattcccgcgtgctcggcacgggtagctatttgccgcccgaccgcgtcacgaatcaagaactcgccgatcgtctcgcgaaggacggcatcgagacgagcgacgagtggatcgtcgcacgcacgggcattcacgcgcggcacttcgccgcgcccgacgtgacgacgagcgatctcgcgttcgtcgccgcgcagcgcgcgatcgaggcggccgatgtcgatccgcagtcgatcgacctcatcattgtcgcgacgtcgacgcccgatttcgtgtttccgagcacggcgtgcctgctgcagaacaagcttggcatcaagaacggcggcgccgcattcgacgtgcaggccgtgtgctcgggtttcgcgtatgcgctcgcgatggccgacagcttcatccgcacggggcagcatcgcacggcgctcatcgtcggcgcggagacgttctcgcgcatcctcgacttcaaggaccgcacgacctgcgtgctgttcggcgacggcgcgggcgccgtcgtgctgtcggcttccgaagagccgggcatcctcggcagcgcgctgcacgcggacggcagctactcgaacatcctctgcacgccgggcaacgtgaaccgcggcgtcatcgcgggcagcgcgttcctgcacatggacggtcaggccgtcttcaagcttgccgtgaacgtgctcgagaaggtcgcggtagaagcgctgtcgaaggcggcgctcgcgccggagcagatcgattggctgattccgcaccaggccaatatccgtatcatgacgagcacgtgccgcaagctcggcctgccgcaggaacgcatgatcgtcaccgtcgacgagcacggcaacacgtccgccgcgtcgattccgctcgcactcgacgtcgccgtgcgcgacggccgcatcaagcgcggtcagcacgtgctgatcgaaggcgtcggcggcggcttcacgtggggcgcgtcggtcttccggtactga

SEQ ID NO: 801 - protein, 329 aa, Burkholderia thailandensis E264
MAQSTLYSRVLGTGSYLPPDRVTNQELADRLAKDGIETSDEWIVARTGIHARHFAAPDVTTSDLAFVAAQRAIEAADVDPQSIDLIIVATSTPDFVFPSTACLLQNKLGIKNGGAAFDVQAVCSGFAYALAMADSFIRTGQHRTALIVGAETFSRILDFKDRTTCVLFGDGAGAVVLSASEEPGILGSALHADGSYSNILCTPGNVNRGVIAGSAFLHMDGQAVFKLAVNVLEKVAVEALSKAALAPEQIDWLIPHQANIRIMTSTCRKLGLPQERMIVTVDEHGNTSAASIPLALDVAVRDGRIKRGQHVLIEGVGGGFTWGASVFRY

SEQ ID NO: 802 - DNA, 978 bp, Novosphingobium aromaticivorans DSM 12444
  CDS (1)..(978): transl_table=11
atgagcgtgcggtccgtaatccgtggcagcggttcggccctgccgcgtcgcgcggtatcgaatgccgaaatgaccaccatggtcgacacgaccgatgaatggatcgtcgagcgcaccggtatccgcaaccgctacatcgcgggcgaaggtgaaaccacctcgacgcttgccaccgaagcggcgcgcaaggcgctcgaagccgccggcgtagacgcctcgcgcatcgaccttatcgttctggcaacggcgacgcccgaccagaccttcccggcgaccgcaacgatcgtccagcacaacctcgggtgcaacggcggcatcgcctttgacgtggcggcggtctgctcgggcttcctttatgcgctcgccactgcggattcgatgatccgttccggcatggcgcgctgcgcgctggtgatcggcgccgagaccatgagccggctgctcgactgggaagatcgcacgacctgcgtccttttcggcgatggtgccggtgcggtcgtgcttgaagctgtcgatgtcgacgaaacggacccgaaggcgcccggcattctggcaacgcgcctccacgccgacggcgcgcacaacgagctgctctatgtcgatggcggtccctccacgacggggacggtcggcaagctgcgcatgaagggccgtgaggtcttccgtcacgccgtcaccaaccttgcgaatgtcctgaaggaagttcttgagacgacggggcatgacgcggaagaaatcgattgggtcgtaccacatcaggcgaacttccgcattctcgacgctaccgcgcgcaagctcgatcttcccgcggacaaggtgatcgtcacggtcgaccatcacgccaacaccagtgctgcctcggttccgctcgcctatgacaccgctgtgcgggacgggcggatcaagcccggcgacctcgtcatgttcgaggcgatgggcggtggattcacctggggcgccagtttggcccgggtgtga

SEQ ID NO: 803 - protein, 325 aa, Novosphingobium aromaticivorans DSM 12444
MSVRSVIRGSGSALPRRAVSNAEMTTMVDTTDEWIVERTGIRNRYIAGEGETTSTLATEAARKALEAAGVDASRIDLIVLATATPDQTFPATATIVQHNLGCNGGIAFDVAAVCSGFLYALATADSMIRSGMARCALVIGAETMSRLLDWEDRTTCVLFGDGAGAVVLEAVDVDETDPKAPGILATRLHADGAHNELLYVDGGPSTTGTVGKLRMKGREVFRHAVTNLANVLKEVLETTGHDAEEIDWVVPHQANFRILDATARKLDLPADKVIVTVDHHANTSAASVPLAYDTAVRDGRIKPGDLVMFEAMGGGFTWGASLARV

SEQ ID NO: 804 - DNA, 957 bp, Methylobacillus flagellatus KT
  CDS (1)..(957): transl_table=11
atgaccatctattcgcgcatcttgggaacgggcagctacttgcctgagaaaatactgaccaatgctgacctggagcgcatggttgacacaacggatgagtggatttatgcccgcactggcatccgccagcgccatattgctgcagagaaccagtttaccagtgacctggcttttcatgccgcacagcgtgcattggaagccgcgggtgtcgaagttgacgccatagacctgattattgttgccactacgacgcctgatcacgtattcccaagtacggcctgcctgttgcagcataaactgggtaatcgtggtgcgcctgcattcgatgtgcaggcggtatgcagcggcttcatttatgcggttgccactgccgacagctttatacggagtggtgcagcacgcacggcgcttgtggtgggcgccgaaaccatgtccaggatcactgactggactgaccgtagcaactgtatcctttggggagatggtgccggcgcggtagtgatgggggccagtgaccagcccggaatcatttccactcacctccatgccgatggcagctatacgcaattgcttaatgtgccaagcggtgtttcgaatccgggggcggagcggaccatccatatggaaggcaacgccgtgttcaagattgccgtgaatacattggatgccattgtcgatgaaaccctggcggctaacggcatgcaaaaatcggacatcgattggctggttccgcaccaggccaatatccgcattttgcaatcgaccgcacgcaagctcggtatggacatggcccgagtggttgtgaccgtggataagcacggcaatacttcagctgcatctgtacccctggccctggatgttgccgtacgtgatggtcgcatcaagcatggtgaaacggtcttgatggaagcctttggtggcggcttcacctggggctccatactcctcaagttttaa

SEQ ID NO: 805 - protein, 318 aa, Methylobacillus flagellatus KT
MTIYSRILGTGSYLPEKILTNADLERMVDTTDEWIYARTGIRQRHIAAENQFTSDLAFHAAQRALEAAGVEVDAIDLIIVATTTPDHVFPSTACLLQHKLGNRGAPAFDVQAVCSGFIYAVATADSFIRSGAARTALVVGAETMSRITDWTDRSNCILWGDGAGAVVMGASDQPGIISTHLHADGSYTQLLNVPSGVSNPGAERTIHMEGNAVFKIAVNTLDAIVDETLAANGMQKSDIDWLVPHQANIRILQSTARKLGMDMARVVVTVDKHGNTSAASVPLALDVAVRDGRIKHGETVLMEAFGGGFTWGSILLKF

SEQ ID NO: 806 - DNA, 990 bp, Burkholderia xenovorans LB400
  CDS (1)..(990): transl_table=11
atggctcaatcgacaatttattcccgcgtgctgggcacgggcagttatctgccgcccaaccgcgtcaccaatcaggatctggcgaaacgtctcgccgagcagggtatcgagacaagcgacgagtggatcgtcgcccgtaccggcatccacgcgcgctacttcgcggaaccggatgtcacgaccagcgatctggcgttcatcgcttcgcagcgcgcgatcgaagccgcggatatcgacccgcaatccatcgacctgatcatcgttgcaacctccacgcccgacttcgtgtttccgagcacggcgtgcctgttgcagaacaagcttggcatcaggaaccacggcgcggcgttcgacgtgcaggccgtctgttcgggttttgcctatgcggtggcgacggcggacagcttcattcgcagcggtcagcatcgtacggcgctcgtgatcggcgcggaaaccttctcgcgcattctcgacttcaaggaccggaccacctgcgtgctgttcggcgacggcgcgggcgcggtgatcctgcaggcgtccgacgaaccgggcgtgcttgccagcgcgttgcacgcggacggcagccattcgaacattctttgcacgccgggcaacgtgaacggcggtgtggtatccggcagcgcgttcctgcatatggacgggcaggccgtgttcaagctcgccgtcaacgtgctcgaaaaagtcgcggtcgaagcgctcgagaaagccaatctgtcggctgagcagatcgactggctgattccgcatcaggcgaatatccgcatcatgcaaagcacctgccgcaagctcggtttgccgcaggaacgcatgatcgtcacagtgggcgagcacggcaacacgtcggctgcgtccattccgctcgcactcgacgtcgcggtgcgcgacggccgcatcaagcgcggccagaacgtgctgatcgaaggcgtcggcggcggcttcacgtggggcgcgtcggttatccgctactga

SEQ ID NO: 807 - protein, 329 aa, Burkholderia xenovorans LB400
MAQSTIYSRVLGTGSYLPPNRVTNQDLAKRLAEQGIETSDEWIVARTGIHARYFAEPDVTTSDLAFIASQRAIEAADIDPQSIDLIIVATSTPDFVFPSTACLLQNKLGIRNHGAAFDVQAVCSGFAYAVATADSFIRSGQHRTALVIGAETFSRILDFKDRTTCVLFGDGAGAVILQASDEPGVLASALHADGSHSNILCTPGNVNGGVVSGSAFLHMDGQAVFKLAVNVLEKVAVEALEKANLSAEQIDWLIPHQANIRIMQSTCRKLGLPQERMIVTVGEHGNTSAASIPLALDVAVRDGRIKRGQNVLIEGVGGGFTWGASVIRY

SEQ ID NO: 808 - DNA, 1053 bp, Ralstonia metallidurans CH34
  CDS (1)..(1053): transl_table=11
ttgcccgctgcggcgggcagcctgcgcgaccgcgcacagggcgacccggtgagcatcacgatccgacacgacatgaccaagtacgcaaaaatcatcggtacagggagctatctgcctcctcggcgcgtcacgaacgccgacctggcggctcagctcgccgagaagggcatcgagaccagcgacgagtggatcgtctcgcgcagcggcatctcggcgcgttactgggccgagcccgacgtcacgtcgagcgacctggccgtcaaggcggccgaacgggcgatcgaggcggccggtatcgaccgtcaggacatcgacctgatcatcgtcgccacgtccacgcccgactacgttttcccgagcgccgcttgcctcgtgcagcagaagctcggcatcaccaaccaatgcgcggcattcgacctgcaggccgtctgctccggctttgtctatgcgctggccacggcggacaagttcatccgcagcggctcgcacaagaatgtgctcgtgatcggctccgaggtgttttcgcgcattctggacttcaacgatcgcaccacctgcgtgctatttggcgatggcgccggtgcggtggtcctgaccgcgtccgatgagccgggcatcctgtccacggccatgcattcggacggaagccacgtgggcatcctttgcgtgccgggcaatgtgtccggtggcgcgatcaccggcaatgcgttcctgcatatggacggacaagctgtgttcaagctggctgtgaccgtgctcgacaaggtcgcgcgcgaagccatcacggcggccgagatgcaggccgacgagatcgattggctgatcccgcaccaggccaacattcgcatcatgcagggcacggccaagaagctcggcctgccgagcgagcgcatgattgccaccgtgcatgaacacggcaatacctccgccgcttcgattccgctggcgctcgacgtcgcggtacgcgatggccgcatcaagcccgggcagaccgtgctgatggagggtgtgggcggcggctttacctggggcgcggtgctgctgcgcatgtaa

SEQ ID NO: 809 - protein, 350 aa, Ralstonia metallidurans CH34
MPAAAGSLRDRAQGDPVSITIRHDMTKYAKIIGTGSYLPPRRVTNADLAAQLAEKGIETSDEWIVSRSGISARYWAEPDVTSSDLAVKAAERAIEAAGIDRQDIDLIIVATSTPDYVFPSAACLVQQKLGITNQCAAFDLQAVCSGFVYALATADKFIRSGSHKNVLVIGSEVFSRILDFNDRTTCVLFGDGAGAVVLTASDEPGILSTAMHSDGSHVGILCVPGNVSGGAITGNAFLHMDGQAVFKLAVTVLDKVAREAITAAEMQADEIDWLIPHQANIRIMQGTAKKLGLPSERMIATVHEHGNTSAASIPLALDVAVRDGRIKPGQTVLMEGVGGGFTWGAVLLRM

SEQ ID NO: 810 - DNA, 975 bp, Magnetospirillum magnetotacticum MS-1
  CDS (1)..(975)
atgatcgtgcgctcccaaatcatcggatgcgggtcctatcttccgtcgcgtctggtcactaatgccgaattggcggccaaggtggacaccaccgacgagtggatcgtcgaacgctccggcatccgtcagcgccatatcgccgccgagggggagaccacctccgatctggccaccaatgccgcgctccgcgccctggaggctgccggtatcgccggttccgccgtggatctggtcattgtggccaccgccaccccggacaatacctttcccgccaccgctaccaaggtccagagccgcatcggcatgaagcatggcttcgccttcgacgttcaggcggtgtgttcgggcttcgtctatgccctgtccgtggccgataacttcatcaagtcggggcaggtgcagaccgccctggtgatcggtgcggaaaccttctcgcgcatcctcgactggaatgaccgcaccacctgcgtgctgttcggcgatggggcgggtgccgtggtactgcgcgccaatcgcggcaagggcagcagcgccgatcgcggtatcttgtccacccatctacattccgacggcagccactacgacctgctttacgtggatggcggtccctccagcacccagaccgtgggccatgtgcacatggaaggccgcgaggtgttccgccacgccgtcatcaacctcgcctcggtggtgggtgaggcgctgtcggccaatgacctcaaggcctccgatatcgattgggtggtgccccaccaggccaaccgccgcatcatcgagggcaccgccaagaagctgggttttcccttggacaagatggtgatgaccgtggaccgccacgccaacacctcggcagcctccattcccctggcgcttaccgaggcggtgagcgatggccgcatcaagccgggccaactggtcctgctggaagccatgggtggcggattcacctggggttcagccctggtgcggatgtaa

SEQ ID NO: 811 - protein, 324 aa, Magnetospirillum magnetotacticum MS-1
MIVRSQIIGCGSYLPSRLVTNAELAAKVDTTDEWIVERSGIRQRHIAAEGETTSDLATNAALRALEAAGIAGSAVDLVIVATATPDNTFPATATKVQSRIGMKHGFAFDVQAVCSGFVYALSVADNFIKSGQVQTALVIGAETFSRILDWNDRTTCVLFGDGAGAVVLRANRGKGSSADRGILSTHLHSDGSHYDLLYVDGGPSSTQTVGHVHMEGREVFRHAVINLASVVGEALSANDLKASDIDWVVPHQANRRIIEGTAKKLGFPLDKMVMTVDRHANTSAASIPLALTEAVSDGRIKPGQLVLLEAMGGGFTWGSALVRM

SEQ ID NO: 812 - DNA, 951 bp, Haemophilus somnus 2336
  CDS (1)..(951)
atgtacagtagaattttagcaaccggtagttatataccggctaatatcaggactaatgctgatttagaaaaaatggtagagacatctgatgaatggattactactcgttccggtataaaagagcgtcgtatcgccggtgaaaatgaaacagttgccacaatgggatttgaggccgctaaaaatgcacttcagttagccaatatttgccctaacgatatcgatttggttttggttgcgactaccagccactcctatgcttatccaagtgctgcatgccaaattcaaggtatgttggacattgatgatgcaatttctttcgatttggcggcagcttgcacggggtttatctatgctttaagtgttgcagatcaattcattaaaacaggtaaagtaaaaaaagctttagtgattggtgcagatattaattctcgtaagttagatgaaacggatcgtagcactgttattttatttggtgacggtgctggtgccgtgatcttggaaagcagcgatattgaagggattatttctactcatttacatgcttctttagataaaagtaacgccttaattcttcctcaaactcaacagggtgaagtacaatccggttatattcaaatgcaagggaatgcaacttttaaacttgcagtacgagaattatctaatgtagtagaagaaactttacgtgataatcacttagacaaagctgatttagattggttggtacctcatcaagcaaacttacgtattatcacggcaactgctgaaaaattgaatatgtctttagatcaagtggtaattactttagacaagtacggtaatacaagtgcggcgacagtacctgtggcattggatgaagctgtacgtgacgggcgtattaagcgtggtcaattattattattagaagcatttggtggcggttggacttggggttctgcgttggttcgtttctaa

SEQ ID NO: 813 - protein, 316 aa, Haemophilus somnus 2336
MYSRILATGSYIPANIRTNADLEKMVETSDEWITTRSGIKERRIAGENETVATMGFEAAKNALQLANICPNDIDLVLVATTSHSYAYPSAACQIQGMLDIDDAISFDLAAACTGFIYALSVADQFIKTGKVKKALVIGADINSRKLDETDRSTVILFGDGAGAVILESSDIEGIISTHLHASLDKSNALILPQTQQGEVQSGYIQMQGNATFKLAVRELSNVVEETLRDNHLDKADLDWLVPHQANLRIITATAEKLNMSLDQVVITLDKYGNTSAATVPVALDEAVRDGRIKRGQLLLLEAFGGGWTWGSALVRF

SEQ ID NO: 814 - DNA, 951 bp, Actinobacillus pleuropneumoniae serovar 1 str. 4074
  CDS (1)..(951)
atgtacagcaaaattctagcaacgggtagttatttacccgctcaaattcgtactaatgctgatttagaaaaaatggtcgatactagcgatgagtggatttttactcgttccggtatgaaagagcgtcgtattgccgccgcagatgaaacggttgcgacaatgggcgcgcaagcggctaaaaatgcactggaaatagcgaatatcgatcacaatgaaattgatctgattgttgtgggaactacaaccaactctcacgcctatccgagtgcggcttgccaaattcaaggtatgttagatatccaagatgcgattgcgtttgacgttgccgccgcttgtaccggttttgtgtatgcgttgagtgttgccgatcagtttatacgtagcggaaaaataaaaaaagcgttggtcatcggttcggatttaaattctcgtgcattagatgaaaccgatcgcagtaccgtggtgttattcggtgatggagccggtgcggttattcttgaagcaagtgaagagcagggtattatttcgactcatttacattcgtcttccgatactgaatatatgcttgctttaccggcacaaaagcgtggtgatgaaaaatccggctttattcaaatgcaaggaaacgccacctttaaattggcggtaggtcagctttcaagtgtggtggaagaaacccttgaagccaataacttacaaaaatcggatttagattggctagttcctcaccaagcgaatattcgtattattgccgcaacagcgaagaaactcgaaatggatatgtcgcaagtggtattgaccgttgagaaatacggtaataacagtgctgcaaccgtgcctgttgcattagatgaagcggtgcgtgacggacgtattcaacgcggtcaattattgctgcttgaagcctttggcggcggctggacttggggttccgctcttgttcgtttttaa

SEQ ID NO: 815 - protein, 316 aa, Actinobacillus pleuropneumoniae serovar 1 str. 4074
MYSKILATGSYLPAQIRTNADLEKMVDTSDEWIFTRSGMKERRIAAADETVATMGAQAAKNALEIANIDHNEIDLIVVGTTTNSHAYPSAACQIQGMLDIQDAIAFDVAAACTGFVYALSVADQFIRSGKIKKALVIGSDLNSRALDETDRSTVVLFGDGAGAVILEASEEQGIISTHLHSSSDTEYMLALPAQKRGDEKSGFIQMQGNATFKLAVGQLSSVVEETLEANNLQKSDLDWLVPHQANIRIIAATAKKLEMDMSQVVLTVEKYGNNSAATVPVALDEAVRDGRIQRGQLLLLEAFGGGWTWGSALVRF

SEQ ID NO: 816 - DNA, 951 bp, Haemophilus influenzae R2846
  CDS (1)..(951)
atgaatagtagaattttatccaccggtagctatctgccgagtcatattcgcacaaatgcggatttagaaaaaatggttgatacatcagatgaatggattgtcactcgttctggtatccgtgaacgtcgtatcgcagcggcagatgaaactgttgcaacaatgggatttgaagcggcaaaaaatgcgatcgaagctgctcaaattaatcctcaagatattgaactgattattgttgcaactacaagtcactcacatgcttatccaagtgcggcttgccaagtgcaaggtttattaaatattgatgatgcgatttcttttgatttagccgcagcttgcacaggctttgtctatgctttgagcgtagctgatcaatttattcgtgcaggcaaagtgaaaaaagccttagtgataggctcagatctcaattctcgtaaattagatgaaacagatcgcagcactgttgtgctatttggtgatggtgcgggtgctgtaattttagaagcgagtgaacaagaaggaattatctccacccatttacacgcttcagcagataaaaataatgcccttgttttagctcagccagaacgtggtatagaaaaatctggctatatcgagatgcaaggtaacgaaaccttcaaattggcagttcgtgaactttcaaatgtggtggaagaaacactttcagccaataatttagataaaaaagatttagactggcttgtgccacaccaagcaaatttacgtattattacagcaacagctaaaaaattagaaatggatatgtcgcaagtggtggtaacgttagataaatacgctaataacagtgcagcaactgttcctgtcgctttagatgaggctattcgagatggccgtattcaacgtgggcagttactattattagaagcctttggcggtggttggacttggggttcagcgttagtgagattttag

SEQ ID NO: 817 - protein, 316 aa, Haemophilus influenzae R2846
MNSRILSTGSYLPSHIRTNADLEKMVDTSDEWIVTRSGIRERRIAAADETVATMGFEAAKNAIEAAQINPQDIELIIVATTSHSHAYPSAACQVQGLLNIDDAISFDLAAACTGFVYALSVADQFIRAGKVKKALVIGSDLNSRKLDETDRSTVVLFGDGAGAVILEASEQEGIISTHLHASADKNNALVLAQPERGIEKSGYIEMQGNETFKLAVRELSNVVEETLSANNLDKKDLDWLVPHQANLRIITATAKKLEMDMSQVVVTLDKYANNSAATVPVALDEAIRDGRIQRGQLLLLEAFGGGWTWGSALVRF

SEQ ID NO: 818 - DNA, 951 bp, Haemophilus influenzae R2866
  CDS (1)..(951)
atgaatagtagaattttatccaccggtagctatctgccgagccatattcgcacaaatgcggatttagaaaaaatggttgatacatcagatgaatggattgtcactcgttctggtatccgtgaacgtcgtatcgcagcggaagatgaaactgttgcaacaatgggatttgaagcggcaaaaaatgcgatcgaagctgctcaaattaatcctcaagatattgaactgattattgttgcaactacaagtcactcacatgcttatccaagtgcggcttgccaagtgcaaggtttattaaatattgatgatgcgatttcttttgatttggcggcagcttgcacaggctttgtctatgctttgagcgtagctgatcaatttattcgtgcaggcaaagtgaaaaaagccttagtgataggctcagatctcaattctcgtaaattagatgaaacagatcgtagcactgttgtgctatttggtgatggtgcgggtgctgtaattttagaagcgagtgaacaagaaggaattatctccacccatttacacgcttcagcagataaaaataatgcccttgttttagctcagccagaacgtggtatagaaaaatctggctatatcgagatgcaaggtaacgaaaccttcaaattggcagttcgtgaactttcaaatgtagtggaagaaacactttcagccaataatttagataaaaaagatttagactggcttgtgccacaccaagcaaatttacgtattattacagcgacagctaaaaaattagaaatggatatgtcgcaagtggtggtaacgttagataaatacgctaataacagtgcagcaacagtgcctgtcgctttagatgagtctattcgagatggccgtattcaacgtgggcagttactattattagaagcctttggcggtggttggacttggggttcagcgttagtgagattttag

SEQ ID NO: 819 - protein, 316 aa, Haemophilus influenzae R2866
MNSRILSTGSYLPSHIRTNADLEKMVDTSDEWIVTRSGIRERRIAAEDETVATMGFEAAKNAIEAAQINPQDIELIIVATTSHSHAYPSAACQVQGLLNIDDAISFDLAAACTGFVYALSVADQFIRAGKVKKALVIGSDLNSRKLDETDRSTVVLFGDGAGAVILEASEQEGIISTHLHASADKNNALVLAQPERGIEKSGYIEMQGNETFKLAVRELSNVVEETLSANNLDKKDLDWLVPHQANLRIITATAKKLEMDMSQVVVTLDKYANNSAATVPVALDESIRDGRIQRGQLLLLEAFGGGWTWGSALVRF

SEQ ID NO: 820 - DNA, 999 bp, Rubrivivax gelatinosus PM1
  CDS (1)..(999)
atgaccccctctgcctcttcccttcctcgctacgcgcgcatcaccggcaccggcagctacttgccgccgcgtcgcctgaccaacgcccaactcgccgccgagctggctcagagcggcgtcgagacctccgatgaatggatcgtcgagcgcaccggtatccgcgctcgccacttcgcggcgaccgacgtcgcctgcagcgacctggccgtcgaagccgctcgccatgcgctcgaggcagcagggcggcaggcggccgaaatcgacctgatcatcgtggcgacctccacgcccgacatggtcttcccctcgacagcctgcatcgtgcagcacaagctcggtgtcgccggctgcccggccttcgacctgcaggcggtgtgttccggcttcgtctatgcgctgtcggtggccgatgccatgatccgcacgggcgccgccagcagggcgctcgtgatcggtgccgaggtgttctcccgcatcctcgatttcaaggatcgcaccacctgcgtgctgttcggcgacggtgccggtgccgtggtgctggaggccagcgacacgccgggcatcctggcgaccgaactgcatgccgacggcagccatgtgggcatcctgtgcgtgccgggcacggtcgctggcggccacgtcaccggcgatccgctgctcaagatggacggacaggcggtgttcaagctcgccgtccgggtgctcgacgaggcggcgcgcgcggtgctggccaaggccggccgccaggaggcggacgtcgactggctgattccgcaccaagccaacatccgcatcatgcagggcacggccaagaagctgaagctgccgctggagaagctggtcgtgaccgtcgacgagcacggcaatacgtcggccgcctcggtgccgctggcgctggaccacgcggtgcgcagcggccgggtcaagccgggcgacacggtgatgctcgaaggcgtgggcggcggcttcacctggggcgcggtgctgctcgacctgtga

SEQ ID NO: 821 - protein, 332 aa, Rubrivivax gelatinosus PM1
MTPSASSLPRYARITGTGSYLPPRRLTNAQLAAELAQSGVETSDEWIVERTGIRARHFAATDVACSDLAVEAARHALEAAGRQAAEIDLIIVATSTPDMVFPSTACIVQHKLGVAGCPAFDLQAVCSGFVYALSVADAMIRTGAASRALVIGAEVFSRILDFKDRTTCVLFGDGAGAVVLEASDTPGILATELHADGSHVGILCVPGTVAGGHVTGDPLLKMDGQAVFKLAVRVLDEAARAVLAKAGRQEADVDWLIPHQANIRIMQGTAKKLKLPLEKLVVTVDEHGNTSAASVPLALDHAVRSGRVKPGDTVMLEGVGGGFTWGAVLLDL

SEQ ID NO: 822 - DNA, 990 bp, Burkholderia vietnamiensis G4
  CDS (1)..(990): transl_table=11
atggcccaatcgactctctattcccgcgtgctcggcacgggcagctatttgccgcccgaccgcgtcacgaaccagcagcttgccgatcgtctcgcgaaggaaggcatcgagacgagcgatgaatggatcgtggcgcgcacgggcatccacgcgcgccatttcgccgcacccgacgtcacgaccagcgatctcgcgtaccaagccgcgcgccgtgcgatcgaggcggccgacatcgacccgcaatcgatcgacctgatcatcgtcgcgacgtcgactcccgatttcgtgttcccgagtacggcctgcctgctgcagaacaagctcggcatcaagagcggcggcgcggcattcgacgtgcaggccgtgtgttccggcttcgcgtacgcgatggcgatggccgacagcttcatccgcggcggccagcaccgcacggcgctcgtcgtcggcgcggagacgttctcgcggattctcgatttcaaggaccgcacgacctgcgtgctgttcggcgacggcgcgggcgcagtgatcctgtccgcatcggaagagccgggcgtgctcggcagcgcgctgcacgcggacggcagctattcgaacatcctgtgcacgccgggcaacgtcaatcgcggcgtgatcgaaggcagcgcgttcctgcacatggacgggcaggcggtgttcaagctcgcggtcaacgtgctggagaaggtcgcggtcgaagcgctcgcgaaggcgaatctcgcgcccgagcagatcgactggctgattccgcaccaggccaacatccgcatcatgaccagcacctgccgcaagctcggcctgccgcaggagcgcatggtcgtgacggtcgaccagcacggcaacacgtcggctgcgtcgatcccgatggcgctcgacgtcgcggtccgcgacggccgcatccagcgcggtcagcacgtgctgatcgagggcgtcggcggcggcttcacctggggcgcgtcggtcttccgcttctga

SEQ ID NO: 823 - protein, 329 aa, Burkholderia vietnamiensis G4
MAQSTLYSRVLGTGSYLPPDRVTNQQLADRLAKEGIETSDEWIVARTGIHARHFAAPDVTTSDLAYQAARRAIEAADIDPQSIDLIIVATSTPDFVFPSTACLLQNKLGIKSGGAAFDVQAVCSGFAYAMAMADSFIRGGQHRTALVVGAETFSRILDFKDRTTCVLFGDGAGAVILSASEEPGVLGSALHADGSYSNILCTPGNVNRGVIEGSAFLHMDGQAVFKLAVNVLEKVAVEALAKANLAPEQIDWLIPHQANIRIMTSTCRKLGLPQERMVVTVDQHGNTSAASIPMALDVAVRDGRIQRGQHVLIEGVGGGFTWGASVFRF

SEQ ID NO: 824 - DNA, 1041 bp, Magnetococcus sp. MC-1
  CDS (1)..(1041): transl_table=11
atgagcaccctgcgttcccgtattatcggaaccggaagctacctgccagagcgtcgcctgaccaatgacgagttggcggccatggtagagaccaccagtagctggatagaagagcggactggtattcaagagcggcgcattgccgcccccggtgaaatgacctccgatctggcggtcaaagccgccgaacaggccttgcaagctgcgggcattgcagcttgggagttggacctgatcttggtggcgaccacaaccccagacctgatttttccctctaccgccaccatcgtgcagaaacgtttgggggcagataaaacgcgtatccctgccttcgatatccaagcggtttgtaccggttttatctatgccctgaccacagccgaccaatttatccgggccggtagtgctaaacgggtgttggtgattggggcagagaccttttcgcggattatcaattggcaagaccgggggacttgtattctctttggcgatggcgcaggagcggtggtgttggaggcccatgaagcggtggatcaggggattctctccacccatatctatgccgatggcagctatctggatctgttgcgctgtaccactggggtttcagatggcggtagccgcgtgccagggggcgatgctcaaccccaatcgacggatgcgcgtggggtgcaggccatgctggagggctttggttatgtcaccatgcgcggaaatgaggtgtttaaacgcgcggtgatggctctggaacagatcgtggatgagaccttagaggcaaataatctgagtaaatccgatgtggattggttggtgccgcaccaagccaatatacggatcattaacagcaccgccaagcggctgggaatgagtatggatcaggtcgtcgtgacggtagaacgccatggtaatacatccgctgccagtgtgcctttagcgctagacgaagcggtgcgggatggacgtattaaaccgggtcagttggtgttgatggaagcctttggcgggggctttacctggggtagtgtgctggtgcgctggtaa

SEQ ID NO: 825 - protein, 346 aa, Magnetococcus sp. MC-1
MSTLRSRIIGTGSYLPERRLTNDELAAMVETTSSWIEERTGIQERRIAAPGEMTSDLAVKAAEQALQAAGIAAWELDLILVATTTPDLIFPSTATIVQKRLGADKTRIPAFDIQAVCTGFIYALTTADQFIRAGSAKRVLVIGAETFSRIINWQDRGTCILFGDGAGAVVLEAHEAVDQGILSTHIYADGSYLDLLRCTTGVSDGGSRVPGGDAQPQSTDARGVQAMLEGFGYVTMRGNEVFKRAVMALEQIVDETLEANNLSKSDVDWLVPHQANIRIINSTAKRLGMSMDQVVVTVERHGNTSAASVPLALDEAVRDGRIKPGQLVLMEAFGGGFTWGSVLVRW

SEQ ID NO: 826 - DNA, 975 bp, Xylella fastidiosa Dixon
  CDS (1)..(975): transl_table=11
atgagcaagcggatctacgctagaatcgcaggcacaggcggttatttgccggaaaaagtgctaactaatgacgatctggcccatatcgtcgataccagcgatgaatggatccgcactcgcactggtatccgtgagcggcatattgctgccgaaggcgaaacgaccagcgatttggcttatgaggctgcgatacgtgcacttgaagctgctgaggtgcggtccgctgatttggatttgattgttgtcgggaccacaacgccggacttgatttttccgtctactgcttgcttgttacaggcacgtcttggagctgttggttgtggtgcgttcgacgtgaatgctgcatgttccggttttgtatatgcgttgagcgtggcagaaaaatttgtgtcttcgggttgctccaaaacagtgttagttgtgggggccgataccttgacccgaattatcgattggagtgaccgcacgacttgcgtactattcggggatggtgccggagcggtggtgctcaaggctgatgaagatacagggattctcagtacccatctgcatgctgatgggagcaaaaaagaattgttgtgggatcctgttggtgtgtcagttggttttggtgaaggtaaagattgcggcgcgctgttgatgaagggaaatgaggtgtttaaatatgccgttaaagcccttgatagagtggttgatgagacgttggaagcgaatcatctggataagcacgaactcgattggttaattcctcaccaagccaacttacgcattatcgaagccaccgcaaggcgtttagatatgtcgatggatcaggtggtggtcacggttgatcgtcacggcaacacttccacggcttcggtgccactcgcgcttgacgaggctatccgttctggtcgtgtgcagcgtggtcagttactgctcctggaagcattcggtggtggttttacttggggatcggcgttactgcgctattaa

SEQ ID NO: 827 - protein, 324 aa, Xylella fastidiosa Dixon
MSKRIYARIAGTGGYLPEKVLTNDDLAHIVDTSDEWIRTRTGIRERHIAAEGETTSDLAYEAAIRALEAAEVRSADLDLIVVGTTTPDLIFPSTACLLQARLGAVGCGAFDVNAACSGFVYALSVAEKFVSSGCSKTVLVVGADTLTRIIDWSDRTTCVLFGDGAGAVVLKADEDTGILSTHLHADGSKKELLWDPVGVSVGFGEGKDCGALLMKGNEVFKYAVKALDRVVDETLEANHLDKHELDWLIPHQANLRIIEATARRLDMSMDQVVVTVDRHGNTSTASVPLALDEAIRSGRVQRGQLLLLEAFGGGFTWGSALLRY

SEQ ID NO: 828 - DNA, 975 bp, Xylella fastidiosa Ann-1
  CDS (1)..(975): transl_table=11
atgagcaagcggatctacgctagaatcgcaggcacaggcggttatttgccggaaaaagtgctaactaatgacgatctggcccatatcgtcgataccagcgatgaatggatccgcactcgcaccggtatccgtgagcggcatattgctgccgaaggcgaaacgaccagcgatttggcttatgaggctgcgatacgtgcacttgaagctgctgaggtgcggtctgctgatttggatttgattgttgttgggaccacaacgccggacttgatttttccgtctactgcttgcttgttacaggcacgtcttggagctgttggttgtggtgcgttcgacgtgaatgctgcatgttccggttttatatatgcgttgagcgtggcagaaaaatttgtgtcttcgggttgctccaaaacagtgttagttgtgggggccgataccttgacccgaattatcgactggagtgaccgcacgacttgcgtactattcggggatggtgccggagcggtggtgctcaaggctgatgaagatacagggattctcagtacccatctgcatgctgatgggagcaaaaaagaattgttgtgggatcctgttggtgtgtcagttggttttggtgaaggtaaagattgcggcgcgctgttgatgaagggaaatgaggtgtttaaatatgccgttaaagcccttgatagagtggttgatgagacgttggaagcgaatcatctggataagcacgaactcgattggttaattcctcaccaagcaaacttacgcattatcgaagccaccgcaaggcgtttagatatgtcgatggatcaggtggtggtcacggttgatcgtcacggcaacacttccacggcttcggtgccactcgcgcttgacgaggctatccgttctggtcgtgtgcagcgtggtcagttactgctcctggaagcattcggtggtggttttacttggggatcggcgttactgcgctattaa

SEQ ID NO: 829 - protein, 324 aa, Xylella fastidiosa Ann-1
MSKRIYARIAGTGGYLPEKVLTNDDLAHIVDTSDEWIRTRTGIRERHIAAEGETTSDLAYEAAIRALEAAEVRSADLDLIVVGTTTPDLIFPSTACLLQARLGAVGCGAFDVNAACSGFIYALSVAEKFVSSGCSKTVLVVGADTLTRIIDWSDRTTCVLFGDGAGAVVLKADEDTGILSTHLHADGSKKELLWDPVGVSVGFGEGKDCGALLMKGNEVFKYAVKALDRVVDETLEANHLDKHELDWLIPHQANLRIIEATARRLDMSMDQVVVTVDRHGNTSTASVPLALDEAIRSGRVQRGQLLLLEAFGGGFTWGSALLRY

SEQ ID NO: 830 - DNA, 972 bp, Alkalilimnicola ehrlichei MLHE-1
  CDS (1)..(972): transl_table=11
gtgagctacgcgcgtatcatcggcaccggcagctacctgccggacgaagtgattaccaatcacgatctcgagcggctcatcgacacctccgatgagtggatccgcgagcgcaccggtatcaccgagcgccgccgcgtggcgccggatcaaacctgcggtgacttggccgaggaggccgcccggcgtgccctggaggcggccgatgtctcgctgagcagcatcgatctggtgatcgtcggcacctgcacccccgatcgggtcttccccagcaccgcctgcctgctgcaggagcggctggggatgcggcacgggtcgctggccttcgacctgtccgccgcctgctccggtttcgtctatggcctcggtgtcgccgatcagttcttccggaccggtgccgtgcgccgcgccctggtgatcggcgccgagaccatgacccggatcctggactggaacgatcgcgccacctgtgtgctgttcggtgacggggccggcgccgtcgtcctggaccgcagtgaggaaccgggcattctctccacccatctgcactcggacgggcgctatcaggacctcctcggggtgccgtgggggccggggcaggggtatgagaagcgcgacgccctggggccctacatcaccatgcagggcaacgaggtcttcaaggttgcggtgcgcaccctcagccgtattgtcgatgagagcctcgccgccaacgggctggagaagcgcgacatcgactggctggtgccccaccaggccaacatccggatcatccaggccactgcccgcaagctggagatgcccatggagcgggtggtggtcaccgtggacaagcagggcaacacctcggcggcctccatccccatggccttggacacggccatccgtgacggccggatcaagcggggcgatttgctcctgctggaggccttcggtggcggctttacctggggctccgccctgatccggtactaa

SEQ ID NO: 831 - protein, 323 aa, Alkalilimnicola ehrlichei MLHE-1
MSYARIIGTGSYLPDEVITNHDLERLIDTSDEWIRERTGITERRRVAPDQTCGDLAEEAARRALEAADVSLSSIDLVIVGTCTPDRVFPSTACLLQERLGMRHGSLAFDLSAACSGFVYGLGVADQFFRTGAVRRALVIGAETMTRILDWNDRATCVLFGDGAGAVVLDRSEEPGILSTHLHSDGRYQDLLGVPWGPGQGYEKRDALGPYITMQGNEVFKVAVRTLSRIVDESLAANGLEKRDIDWLVPHQANIRIIQATARKLEMPMERVVVTVDKQGNTSAASIPMALDTAIRDGRIKRGDLLLLEAFGGGFTWGSALIRY

SEQ ID NO: 832 - DNA, 1008 bp, Croceibacter atlanticus HTCC2559
  CDS (1)..(1008): transl_table=11
atgtatcaatcaaaaatatcgggattaggcaaatatgtgcctgaaaatgtggtcacaaatgatgatctcgcaaagttaatggataccaatgatgcttggatacaagagcgtacaggtataaaagaacgtagacatataaaagattataatgaagagtctacagcttcaatgggcgttaaagcagcaaaaatcgcaattgaacgtgcaggtatttctaaagacgatatagactttattgtatttgcaacattatctccagactattattttcctggttgtggtgtacaggttcaagaagctttagatataaaaacgtgtccagctttagatgtaagaaaccaatgtagtggttttgtatacgcattatctgtagcagatcaatttattaaaaccggaatgtataaaaacgttttagtaataggtgcagaaaaccatagtggaggcttagattttactacaagaggcagaagtgtttctgtaatatttggagatggtgctggtgctgctgtattaactagaagtgatcacaatggtcaaggtattttatctacacacttacacagtgaaggtaaacatgcgctggagctttctttaaaaggaccaagtactcaaaaatgggtgccagaaattattgaagaaaacaatcaagacaatccagattactacccttatatgaatggtcaatttgtatttaaaaatgctgtgacaagattctctgaggtgatcatggaaggcttaaaggaaaatggtctggcagtttcagatattgatatgttaataccacaccaagctaatttaagaatctctcaatttatccagaagaaatttaagttgagtgatgataaagtttataataatatacagaagtatggtaatacaactgcagcatctatcccaattgctttaactgaagcttgggaagaaggaaagataaaagaaggagataaggtagttttagctgcctttggtagtggttttacttgggctagtgctgtaatgagctggtaa

SEQ ID NO: 833 - protein, 335 aa, Croceibacter atlanticus HTCC2559
MYQSKISGLGKYVPENVVTNDDLAKLMDTNDAWIQERTGIKERRHIKDYNEESTASMGVKAAKIAIERAGISKDDIDFIVFATLSPDYYFPGCGVQVQEALDIKTCPALDVRNQCSGFVYALSVADQFIKTGMYKNVLVIGAENHSGGLDFTTRGRSVSVIFGDGAGAAVLTRSDHNGQGILSTHLHSEGKHALELSLKGPSTQKWVPEIIEENNQDNPDYYPYMNGQFVFKNAVTRFSEVIMEGLKENGLAVSDIDMLIPHQANLRISQFIQKKFKLSDDKVYNNIQKYGNTTAASIPIALTEAWEEGKIKEGDKVVLAAFGSGFTWASAVMSW

SEQ ID NO: 834 - DNA, 951 bp, Rickettsiella grylli
  CDS (1)..(951)
atgaaatattcacgtattgcaggcacgggaagctatttacctgaaaaaatactcaccaatgctgaacttgagaaaaaagtggcgaccacgaatgaatggatagtcgcacggaccggtattcgtgaacgccgtattattggtcccgacgatagcacggcgagtatggcggtcgcggctgctcaacacgcgttgctcgcggcttccatatcccctaaaaatatacaacttattattgtcgccaccagtacaccggataaattttttccaagcaccgcctgtttagtacaagcgggtttgggttacgatgggtgtcctgcgtttgatatcgttgcagcctgcgctggatttaactatgccttaagcgttgctgacaaatttattcgcagcgggactgttgaaacggccttagtgatagggagtgaaagcatgtcaacaattattaattgggaagatcgttccacatgcgttttatttggtgatggtgccggtgccgttgtccttcaagcggcaaaagaacctggaattatttccgcacatttgcatgcggcgggttcctataaagatttattatcactcgataccggattaaaaaagggagatttaccacagcttaaaatgcaaggaagtgaggtgtttaaaattgcagtgaataaattaagttccgttttagaggaaacgttagcatcgaataaaatagataaagaagatatcgattggttcattcctcatcaagctaatttacgaattattaaagcgatggcgaataaacttaaaatgacgttagaccaagttgttatcaccttggatcaacagggcaatacgtcagcggcatcgattcctttagcattagatagagctgtgcgtgatggtcgcatccaacgtggacagttattactgatggaaagttttggtgcaggtttagcgtggggttccgctttagtacgttactaa

SEQ ID NO: 835 - protein, 316 aa, Rickettsiella grylli
MKYSRIAGTGSYLPEKILTNAELEKKVATTNEWIVARTGIRERRIIGPDDSTASMAVAAAQHALLAASISPKNIQLIIVATSTPDKFFPSTACLVQAGLGYDGCPAFDIVAACAGFNYALSVADKFIRSGTVETALVIGSESMSTIINWEDRSTCVLFGDGAGAVVLQAAKEPGIISAHLHAAGSYKDLLSLDTGLKKGDLPQLKMQGSEVFKIAVNKLSSVLEETLASNKIDKEDIDWFIPHQANLRIIKAMANKLKMTLDQVVITLDQQGNTSAASIPLALDRAVRDGRIQRGQLLLMESFGAGLAWGSALVRY

SEQ ID NO: 836 - DNA, 951 bp, Vibrio cholerae
  CDS (1)..(951): transl_table=11
atgtatagcaaaattttaggtactggcagctacttgccatctcaggtgcgtactaacgcagacttagagaaaatggtagagaccagtgatgagtggattgttgctcgtactggtattcgcgagcgtcgtattgcggctgacaatgaaaccgttgccgatatggcattcttcgctgcacaaaatgccataaacatggccggtattgataaacacgacatcgatatgattattgtggcgaccaccagtgcgagccacactttcccatcagccgcttgccaagtgcaaggcaaactgggaattaaaggatgtccagcgtttgatttggccgcagcgtgttctggttttatgtacgcgctctctattgctgatcagcatgtcaaatctggcatgtgcaaacatgttttggtgattggtgcggatgcgttgtccaaaacctgtgaccccacagatcgttcgaccattatcttatttggggatggtgctggcgcggtagtggtgggcgcaagtaacgagccgggcattctttctactcacatccacgcggatggcgagtttggtgatttactgagccttgaagtgcctgttcgtggtggtgatagcgataaatggctgcacatggcggggaacgaagtgttcaaagtcgcagtaactcaactatctaaactggtagttgatacgctgaaagccaacaacatgcacaagtctgagctcgattggttggtaccacatcaagcgaactaccggattatctcagcaaccgcgaaaaaactttcgatgtcgctcgatcaggtggtgattaccttagaccgtcatggcaacacctctgcggcgactgtgcctacagcgttggatgaagccgtgcgtgatggtcgtattcagcgtgggcagatgctactgctcgaagcttttggtggtggtttcacatggggctctgctctggtgaagttctaa

SEQ ID NO: 837 - protein, 316 aa, Vibrio cholerae
MYSKILGTGSYLPSQVRTNADLEKMVETSDEWIVARTGIRERRIAADNETVADMAFFAAQNAINMAGIDKHDIDMIIVATTSASHTFPSAACQVQGKLGIKGCPAFDLAAACSGFMYALSIADQHVKSGMCKHVLVIGADALSKTCDPTDRSTIILFGDGAGAVVVGASNEPGILSTHIHADGEFGDLLSLEVPVRGGDSDKWLHMAGNEVFKVAVTQLSKLVVDTLKANNMHKSELDWLVPHQANYRIISATAKKLSMSLDQVVITLDRHGNTSAATVPTALDEAVRDGRIQRGQMLLLEAFGGGFTWGSALVKF

SEQ ID NO: 838 - DNA, 951 bp, Vibrio parahaemolyticus
  CDS (1)..(951): transl_table=11
atgtatagcaaaattttaggtactggcagctacctgccatctcaagtgcgtactaacgcagacctagagaaaatggtagatacaagtgatgagtggatcgtagctcgtactggtattaaagagcgtcgaattgcagcagaagacgaaactgttgcggacatggcattctacgcagctgaaaacgctatcgatatggccggcattgataaaaatgatatcgacctaattatcgttgctaccacgagcagtagccatactttcccttcatctgcgtgtcaggtgcaggcaaagcttggcattaaaggttgtccggctttcgacttagccgctgcttgttctggttttgtttacgcattgtctgttgcggatcaacatatcaaatcaggtatgtgtaaaaacgtattggtgattggtgcagatgcactgtctaaaacgtgtgatccaactgaccgttcaacgatcattttgtttggtgacggtgcgggtgcagttgttgttggtgcaagccaagagcctggcattatctctacgcatatctacgcggatggccaatttggtgatttattaagtctacctgtaccagagcgtggtaaagatgttgataaatggcttcatatggctggtaacgaagtattcaaagttgcggtaactcaactgtctaaactcgttaaagatacgcttgaagcaaacgatatgcacaagtctgagctagactggctagtgccgcaccaagcgaactaccgtattatttcagcgacggcgaaaaaactgtcaatgtcactagaccaagttgttgtcacattagacagacacggtaacacgtcggcagcgacagttccgacagcgcttgatgaagcggttcgtgatggccgtattaagcgtggacaaacgttgctacttgaagcattcggtggcggtttcacatggggctctgctctggtgaaattctaa

SEQ ID NO: 839 - protein, 316 aa, Vibrio parahaemolyticus
MYSKILGTGSYLPSQVRTNADLEKMVDTSDEWIVARTGIKERRIAAEDETVADMAFYAAENAIDMAGIDKNDIDLIIVATTSSSHTFPSSACQVQAKLGIKGCPAFDLAAACSGFVYALSVADQHIKSGMCKNVLVIGADALSKTCDPTDRSTIILFGDGAGAVVVGASQEPGIISTHIYADGQFGDLLSLPVPERGKDVDKWLHMAGNEVFKVAVTQLSKLVKDTLEANDMHKSELDWLVPHQANYRIISATAKKLSMSLDQVVVTLDRHGNTSAATVPTALDEAVRDGRIKRGQTLLLEAFGGGFTWGSALVKF

SEQ ID NO: 840 - DNA, 951 bp, Vibrio vulnificus
  CDS (1)..(951): transl_table=11
atgtatagcaaaattttaggtactggcagctacctgccatctcagatccgcaccaatgccgatctagagaaaatggtagagacaagtgatgagtggattgttgcccgaactggtattaaagagcgtcgtattgctgctgaaaatgaaacggtagctgatatgggtttttatgcggctcaaaacgcgattgagatggcaggtatcgacaaaaatgatattgacctgatcatcgtcgcgacgacaagtggaagccatacttttccttcatctgcatgtcaggtgcaggcaaagcttggcatcaaaggttgtcctgcattcgatttagctgctgcgtgctctggctttgtctacgcactttctattgctgatcaacatattaaaacgggtatgtgtaaaaacgtactggttattggttctgacactttatcgaaaacttgcgatccaacggaccgctcgaccattatcttattcggtgatggtgcaggtgctgtggttgttggagcaagcgaagagccgggtattctgtctactcacatctacgcggatggtgagtttggtgatcttcttagcttagaagtacctgagcgcggcaaagatgccgacaaatggttacacatggcgggtaacgaagtattcaaagtagcggtgactcagttatcgaaactggtgaaagatactctagaagcgaacggcatgcataaatctgagttggattggttagttccacatcaggcgaactaccggatcatctcagcgacggcgaaaaaactgtctatgtcgctcgatcaagtggtaattacccttgatcgtcatggcaatacctctgcggcaaccgtaccgacggcattagatgaggccgtgcgtgatgggcgtattcagcgtggtcagacgctactactagaagcctttggtggcggtttcacctggggttcggcattagttcgcttttaa

SEQ ID NO: 841 - protein, 316 aa, Vibrio vulnificus
MYSKILGTGSYLPSQIRTNADLEKMVETSDEWIVARTGIKERRIAAENETVADMGFYAAQNAIEMAGIDKNDIDLIIVATTSGSHTFPSSACQVQAKLGIKGCPAFDLAAACSGFVYALSIADQHIKTGMCKNVLVIGSDTLSKTCDPTDRSTIILFGDGAGAVVVGASEEPGILSTHIYADGEFGDLLSLEVPERGKDADKWLHMAGNEVFKVAVTQLSKLVKDTLEANGMHKSELDWLVPHQANYRIISATAKKLSMSLDQVVITLDRHGNTSAATVPTALDEAVRDGRIQRGQTLLLEAFGGGFTWGSALVRF

SEQ ID NO: 842 - DNA, 957 bp, Blochmannia floridanus
  CDS (1)..(957): transl_table=11
atgtttactaaaattcttggaactggaagttatttaccaaaatatattagatctaatattattttagagaaaatggtagatacttctaatgcgtggattatagctcgtactggaattaaggaacgtcgtatttctaattctagtgagactgttgctaaaatgggttattttgcatctaaaaaagctttagatatgtcctgtattgaagcaaatgaaataggaattattattgttgctacaacatcatctagtcatgcctttcctagttcagcatgtcaaattcagcgtgatttaaaaatatcagataccattgcttttgatttatcggcagcttgttcaggttttgtatatgcattagatgtagctaatcaatatattaagaatggtgttgtaaaatatgctttgattgtaggatcagatattttaagtcattttttaaatcctaacgatcgtagtacattaattttatttggagatggagcaggagcagtaatattaggtcgttcgaaaagtccaggaattatttcaactcatctacatgcaaatggatattatggagatttattaactttgcctcattataatacacaaaatcctgaaaaattatctgtttacttaactatgtctggcaataaagtatttaaaatggcaattgctacgttaactggtattattaatgaaactttgcatgcaaataatttgcaacaagatgaattagattggttagtacctcatcaagctaatttgagaattatttctaaagcagctaaacgattgaatatagatatggaaaaaataataattactttacataaacatggaaatacttctgctgcttctattcctttagctttggatgaggctgtgcgtgatggacgtattaaatcaaatcaattgttattgctagaagcatttggagcagggttaacttggggttcagttttattaagattttaa

SEQ ID NO: 843 - protein, 318 aa, Blochmannia floridanus
MFTKILGTGSYLPKYIRSNIILEKMVDTSNAWIIARTGIKERRISNSSETVAKMGYFASKKALDMSCIEANEIGIIIVATTSSSHAFPSSACQIQRDLKISDTIAFDLSAACSGFVYALDVANQYIKNGVVKYALIVGSDILSHFLNPNDRSTLILFGDGAGAVILGRSKSPGIISTHLHANGYYGDLLTLPHYNTQNPEKLSVYLTMSGNKVFKMAIATLTGIINETLHANNLQQDELDWLVPHQANLRIISKAAKRLNIDMEKIIITLHKHGNTSAASIPLALDEAVRDGRIKSNQLLLLEAFGAGLTWGSVLLRF

SEQ ID NO: 844 - DNA, 990 bp, Bordetella bronchiseptica
  CDS (1)..(990): transl_table=11
ttgatggaaaaagctatgaaatacgccaagatcgccggttcgggcggctaccttcccgaacgcgtcgtcaccaacgacgatctggccgccgagctggcgacgcggcaaatttccacgtccgacgagtggatcgtcgagcgcaccggcatccggcagcgccacctggccgagcgtggcgtgaccaccagccagctggccaccgaggcggcgcgccgcgccatggacgacgccggggtgcaggccgacgagatcgacatgatcatcgtcgccacgtcgacgccggactacgtcttccccagcacggcctgcctggtgcaggccaacctgggcgccaagggcggcgcggccttcgacgtgcaggccgtctgcagcggcttcgtctacgccatgaccaccgccgacagcttcattcgcgccggccgcgcgcgctgcgcgctggtgatcggcgccgaagtcttctcgcgcattctcgactggaacgaccgcggcacctgcgtgctgttcggcgatggcgccggcgccgtcgtgctcaaggcggccgacgagccgggcatcctggccgcgcacctgcatgccgatggcagccagaccaagattctctgcgccgcgggcaacgtcgcgtacggggacgtcaccggcgatcccttcctgcgcatggacggccaggcggtgttcaagcaggcggtcacggtgctcgaccgttcggcgcgcgatgtctgcgccgaggctggcgtcgaggtcgacgatatcgattggctgatcccgcaccaggccaacgtgcgcatcctgaatttcctggcgcgcaagctgcgcgtgccgaccgaacgggtcgtcatcaccgtggaccagcatgccaacacctcggcggccagcgtgccgctggcgctggatgtcgcgcgccgcgacgggcgcgtcaagccgggccagctggtactcatgcaaggcgtgggcggcggcttcacctggggctccgtgctggcccgcatgtag

SEQ ID NO: 845 - protein, 329 aa, Bordetella bronchiseptica
MMEKAMKYAKIAGSGGYLPERVVTNDDLAAELATRQISTSDEWIVERTGIRQRHLAERGVTTSQLATEAARRAMDDAGVQADEIDMIIVATSTPDYVFPSTACLVQANLGAKGGAAFDVQAVCSGFVYAMTTADSFIRAGRARCALVIGAEVFSRILDWNDRGTCVLFGDGAGAVVLKAADEPGILAAHLHADGSQTKILCAAGNVAYGDVTGDPFLRMDGQAVFKQAVTVLDRSARDVCAEAGVEVDDIDWLIPHQANVRILNFLARKLRVPTERVVITVDQHANTSAASVPLALDVARRDGRVKPGQLVLMQGVGGGFTWGSVLARM

SEQ ID NO: 846 - DNA, 990 bp, Bordetella parapertussis
  CDS (1)..(990): transl_table=11
ttgatggaaaaagctatgaaatacgccaagatcgccggttcgggcggctaccttcccgaacgcgtcgtcaccaacgacgatctggccgccgagctggcgacgcggcaaatttccacgtccgacgagtggatcgtcgagcgcaccggcatccggcagcgccacctggccgagcgtggcgtgaccaccagccagctggccaccgaggcggcgcgccgcgccatggacgacgccggggtgcaggccgacgagatcgacatgatcatcgtcgccacgtcgacgccggactacgtcttccccagcacggcctgcctggtgcaggccaacctgggcgccaagggcggcgcgacctttgacgtgcaggccgtctgcagcggcttcgtctacgccatgaccaccgccgacagcttcattcgcgccggccgcgcgcgctgcgcgctggtgatcggcgccgaagtcttctcgcgcattctcgactggaacgaccgcggcacctgcgtgctgttcggcgatggcgccggcgccgtcgtgctcaaggcggccgacgagccgggcatcctggccgcgcacctgcatgccgatggcagccagaccaagattctctgcgccgcgggcaacgtcgcgtacggggacgtcaccggcgatcccttccttcgcatggacggccaggcggtgttcaagcaggcggtcacggtgctcgaccgttcggcgcgcgatgtctgcgccgaggctggcgtcgaggtcgacgatatcgattggctgatcccgcaccaggccaacgtgcgcatcctgaatttcctggcgcgcaagctgcgcgtgccgaccgaacgggtcgtcatcaccgtggaccagcatgccaacacctcggcggccagcgtgccgctggcgctggatgtcgcgcgccgcgacgggcgcgtcaagccgggccagctggtactcatgcaaggcgtgggcggcggcttcacctggggctccgtgctggcccgcatgtag

SEQ ID NO: 847 - protein, 329 aa, Bordetella parapertussis
MMEKAMKYAKIAGSGGYLPERVVTNDDLAAELATRQISTSDEWIVERTGIRQRHLAERGVTTSQLATEAARRAMDDAGVQADEIDMIIVATSTPDYVFPSTACLVQANLGAKGGATFDVQAVCSGFVYAMTTADSFIRAGRARCALVIGAEVFSRILDWNDRGTCVLFGDGAGAVVLKAADEPGILAAHLHADGSQTKILCAAGNVAYGDVTGDPFLRMDGQAVFKQAVTVLDRSARDVCAEAGVEVDDIDWLIPHQANVRILNFLARKLRVPTERVVITVDQHANTSAASVPLALDVARRDGRVKPGQLVLMQGVGGGFTWGSVLARM

SEQ ID NO: 848 - DNA, 987 bp, Bordetella pertussis
  CDS (1)..(987): transl_table=11
atggaaaaagctatgaaatacgccaagatcgccggttcgggcggctaccttcccgaacgcgtcgtcaccaacgacgatctggccgccgagctggcgacgcggcaaatttccacgtccgacgagtggatcgtcgagcgcaccggcatccggcagcgccacctggccgagcgtggcgtgaccaccagccagctggccaccgaggcggcgcgccgcgccatggacgacgccggggtgcaggccgacgagatcgacatgatcatcgtcgccacgtcgacgccggactacgtcttccccagcacggcctgcctggtgcaggccaacctgggcgccaagggcggcgcggccttcgacgtgcaggccgtctgcagcggcttcgtctacgccatgaccaccgccgacaacttcattcgcgccggccgcgcgcgctgcgcgctggtgatcggcgccgaagtcttctcgcgcattctcgactggaacgaccgcggcacctgcgtgctgttcggcgatggcgccggcgccgtcgtgctcaaggcggccgacgagccgggcatcctggctgcgcacctgcatgccgatggcagccagaccaagattctctgcgccgcgggcaacgtcgcgtacggggacgtcaccggcgatcccttcctgcgcatggacggccaggcggtgttcaagcaggcggtcacggtgctcgaccgttcggcgcgcgacgtctgcgccgaggctggcgtcgaggtcgatgacatcgattggctgatcccgcaccaggccaacgtgcgcatcctgaatttcctggcgcgcaagttgcgcgtgccgaccgaacgggtcgtcatcaccatggaccagcatgccaacacctcggcggccagcgtgccgctggcgctcgatgtcgcgcgccgcgacgggcgcgtcaagccgggccagctggtactcatgcaaggcgtgggcggcggcttcacctggggctccgtgctggcccgcatgtag

SEQ ID NO: 849 - protein, 328 aa, Bordetella pertussis
MEKAMKYAKIAGSGGYLPERVVTNDDLAAELATRQISTSDEWIVERTGIRQRHLAERGVTTSQLATEAARRAMDDAGVQADEIDMIIVATSTPDYVFPSTACLVQANLGAKGGAAFDVQAVCSGFVYAMTTADNFIRAGRARCALVIGAEVFSRILDWNDRGTCVLFGDGAGAVVLKAADEPGILAAHLHADGSQTKILCAAGNVAYGDVTGDPFLRMDGQAVFKQAVTVLDRSARDVCAEAGVEVDDIDWLIPHQANVRILNFLARKLRVPTERVVITMDQHANTSAASVPLALDVARRDGRVKPGQLVLMQGVGGGFTWGSVLARM

SEQ ID NO: 850 - DNA, 981 bp, Bradyrhizobium japonicum
  CDS (1)..(981): transl_table=11
gtgaccaaaattcgttcggtcgtgctgggctgcggctcttacctgccggagcaggtggtgaccaacgcccaattggcggcgcgtatcgacacgtccgacgagtggatcgtccagcgtaccggcattcgcgagcggcacattgcggccgagggcgagttcacctcgcacttggcgatcaaggccgcgcaggccgcgctcaccgatgccggcgtggacgcgcagtcgatcgacctgatcgtgctggcgacctcgacgcctgacaacaccttccccgcgacggcggtcgccgtgcagcacgggctcggcatcaaccacggcgcggccttcgatctgcaggcggtgtgctcgggcttcgtgttcgcgctcgccactgccgacaatttcctgcgcaccggcgccttcaagcgcgcgctggtgatcggcgccgagaccttctcgcgcatcctcgactggaacgaccgcggcacctgcgtgctgttcggcgacggcgccggcgcggtcgtgctggaggcccaggagcagccgggcagtgccgcgaccgaccgcggtgtcgtcaccacgcatctgcgctccgacggccgccacaaggcaaagctgttcgtcgacggcggcccgtcctcgacccagaccgtcggccatctgcgcatggagggccgcgaggttttcaagcacgcggtcggcatgatcaccgacgtgatcgtcgatgccttcgaggcgaccgggctcaatgccgacagcatcgactggttcgtgccgcaccaggccaacaagcgaatcatcgacgcctccgcgcacaagctgcacatcgcgccggagaaggtggtgctgacggtggaccgtcacggcaacacgtcggcggcctcgatcccgctggcgctggcggtggcgcgcaaggacggccgcatcaagcgcggcgacctgattctgctcgaggccatgggcggcggcttcacctggggctcggcgctggtgcgctggtag

SEQ ID NO: 851 - protein, 326 aa, Bradyrhizobium japonicum
MTKIRSVVLGCGSYLPEQVVTNAQLAARIDTSDEWIVQRTGIRERHIAAEGEFTSHLAIKAAQAALTDAGVDAQSIDLIVLATSTPDNTFPATAVAVQHGLGINHGAAFDLQAVCSGFVFALATADNFLRTGAFKRALVIGAETFSRILDWNDRGTCVLFGDGAGAVVLEAQEQPGSAATDRGVVTTHLRSDGRHKAKLFVDGGPSSTQTVGHLRMEGREVFKHAVGMITDVIVDAFEATGLNADSIDWFVPHQANKRIIDASAHKLHIAPEKVVLTVDRHGNTSAASIPLALAVARKDGRIKRGDLILLEAMGGGFTWGSALVRW

SEQ ID NO: 852 - DNA, 960 bp, Chromobacterium violaceum
  CDS (1)..(960): transl_table=11
atgggctattcccgcattctcggcaccggcagcttcctgccgtcccaggtgcttaccaatgcgcagttggccgaacgggtggaaaccagcgacgagtggatcgtctctcgtaccggcatccgcgcgcgccatattgccgacgaagggcacaagaccagcgatctggcgctgagggcggcgcaagccgccatcgccagcgccggcatcgacaagggcgagatcgacctgatcatcgtcgccaccaccacccccgacatggtttttcccagcaccgcctgcatcctgcaggagaagctgggattgcccggcgtgcaggcctttgacgtgcaggccgtgtgcgccggcttcgtctacgcgctgaccacggccaacgcctacatcaagagcggcctggccaagaaggcgctggtggtcggcgccgaaatcatgtcgcgcgtgctggactgggatgatcgccgcacctgcgtgctgttcggcgacggcgccggcgccgtggtactgggcgagtccgacgagcctggcatcctgcatgccaagctggcggcggacggccgctaccagggcttgctcaacacgccggcgcagatttccggcggcaagatccagggcatcccctatctgcacatggacggcccggcggtgttcaagttcgccgtcaagtcgctgtccgagatcgccaccgccacgctggccgaggccggcgtcgaacaggccagcctggactggctggtgccgcaccaggccaatctgcgcatcatcgaatccaccgccaagcatcttggcctgccgatggacaaggtggtcgtcaccttgccggagcagggcaatacctcggcggcttccattccgctggcgctggacgtcgcggtgcgcgacggacgcatccggcgcggccagaccgtgatgctggaaggcattggcggcggtttcgcctggggcgcggtgctgctgaccttctga

SEQ ID NO: 853 - protein, 319 aa, Chromobacterium violaceum
MGYSRILGTGSFLPSQVLTNAQLAERVETSDEWIVSRTGIRARHIADEGHKTSDLALRAAQAAIASAGIDKGEIDLIIVATTTPDMVFPSTACILQEKLGLPGVQAFDVQAVCAGFVYALTTANAYIKSGLAKKALVVGAEIMSRVLDWDDRRTCVLFGDGAGAVVLGESDEPGILHAKLAADGRYQGLLNTPAQISGGKIQGIPYLHMDGPAVFKFAVKSLSEIATATLAEAGVEQASLDWLVPHQANLRIIESTAKHLGLPMDKVVVTLPEQGNTSAASIPLALDVAVRDGRIRRGQTVMLEGIGGGFAWGAVLLTF

SEQ ID NO: 854 - DNA, 960 bp, Coxiella burnetii
  CDS (1)..(960): transl_table=11
atgacctacgcgcgtatccagggtgttggcagttatattcctcagcaaatattaagtaatgcagatttagaaaaaatggttaataccacggatgagtggatcatgcagcgggtcggcgtgcgtgagcgtcatgtcattgctaatagccctgataataccaccacgatggcggtcgatgcggcaaaacgtgcaattgaaatggcgggaatagaccccgccgttatcgacatgattatcgtggggactgcaacagcagaatattattttcctagtacggcttgtttggtccaaaaacatttaaatttgcgtgaggatatccccgcctttgacataaatgcggcgtgcgcaggttttgtgtacgctttaagcattgctgatcaatacatccgaaacgaaggcgccaagcatattctcgttattggtgtggattctttaacaaaggtagtggattggaaagatcgcagcacctgtattttattcggtgatggtgcaggagcggttattttacaagcccacaaagaacccggcattttaaacactattttacatgcgaatggtgattacagtgatttaattactgctaaaagtggagtttgggagcgggaatctgtgcctcatttgcacatgtatgggaaagaagtttttaaactagcggtaactaaattaggagaaattgtcgatgagattattgagaaaagcggactcaagcaatcagacatcgattggttaattccccatcaagcgaatttacgtattattgaagcaacagcgaaacgattagggctgccaagagaacgggttattttgacaattgagcaacatggtaacacttccgctgcttctattcctttggcgctcgatgcggctgttcgtgccggcaagattaagcgcggcgatacgctgctgttagaagcttttggtgcaggccttgcctggggcgctgcgctacttaaattgtag

SEQ ID NO: 855 - protein, 319 aa, Coxiella burnetii
MTYARIQGVGSYIPQQILSNADLEKMVNTTDEWIMQRVGVRERHVIANSPDNTTTMAVDAAKRAIEMAGIDPAVIDMIIVGTATAEYYFPSTACLVQKHLNLREDIPAFDINAACAGFVYALSIADQYIRNEGAKHILVIGVDSLTKVVDWKDRSTCILFGDGAGAVILQAHKEPGILNTILHANGDYSDLITAKSGVWERESVPHLHMYGKEVFKLAVTKLGEIVDEIIEKSGLKQSDIDWLIPHQANLRIIEATAKRLGLPRERVILTIEQHGNTSAASIPLALDAAVRAGKIKRGDTLLLEAFGAGLAWGAALLKL

SEQ ID NO: 856 - DNA, 954 bp, Erwinia carotovora subsp
  CDS (1)..(954): transl_table=11
atgtatacaaaaataatcggaacaggcagctatctgcctgaagaaatcaggacgaacgctgatttagaaaaaatggtggaaacgacggacgaatggatcgtcacacgtactggaatccgtgagcgccgtattgctgcgccggatgaaaacgtagcgaccatgggataccgtgccgcgcagaaagcgctggagatggcgaatgtcgatgcttctgaagtcggccttctgattgttgctacaacatcatcaagccatgctttccctagctcagcctgtcaggttcagcagttattagggatcaaagatacgattgctttcgatctggctgctgcctgtgcgggttttacctatgcgctgagcgttgccgatcaatacgttaaaagcggtgcggtgaaatacgcactggtgatcggttccgatacgttgtctcgtacattggatcctgaagatcgcggtacgcttattctgtttggtgatggtgcgggtgccgtgttgttaacaacatcagagcaaccgggtattctttccacccatcttcatgccgatggccgctatggcgagttgttgacgttgcctcatcaggatcgtaaccatactgataagcctgcttatctgacgatggcgggtaatgaagtctttaaagtggctgtgactgaactggcacacattgttgaagaaacgctgcaagcggctcaactggacaaaagtgaattagactggctggtgcctcatcaggctaacctgcgtatcatcagtgccacggcgaaaaagctgggcatggggatggacaaagtggttgtgacgctggatcgtcatggtaatacctctgcggcttccgtgccttcagcgcttgatgaagcggtacgcgatgggcgtattaaaccaggacaactggtgctgcttgaagccttcggtggtggctttacttggggttccgcgctggttcgcttttaa

SEQ ID NO: 857 - protein, 317 aa, Erwinia carotovora subsp
MYTKIIGTGSYLPEEIRTNADLEKMVETTDEWIVTRTGIRERRIAAPDENVATMGYRAAQKALEMANVDASEVGLLIVATTSSSHAFPSSACQVQQLLGIKDTIAFDLAAACAGFTYALSVADQYVKSGAVKYALVIGSDTLSRTLDPEDRGTLILFGDGAGAVLLTTSEQPGILSTHLHADGRYGELLTLPHQDRNHTDKPAYLTMAGNEVFKVAVTELAHIVEETLQAAQLDKSELDWLVPHQANLRIISATAKKLGMGMDKVVVTLDRHGNTSAASVPSALDEAVRDGRIKPGQLVLLEAFGGGFTWGSALVRF

SEQ ID NO: 858 - DNA, 951 bp, Haemophilus ducreyi
  CDS (1)..(951): transl_table=11
atgtacagtaagattcttgcgacggggagttacttgccaaaacaagtaagatccaatgctgatttagaaaagatggtcgatacaacagatgagtggatttttactcgttcaggtatgaaagagcgccgtattgcggccgctgatgaaacggtagccacaatgggcgccgccgccgctcataaggcgtgtgaaatggcagccattgatgtgaatgagattgagttgattgtggtggcaactactactcattcgcatgcttatccaagtgcggcgtgtcaaattcagggcatgttggccattgaagatgcgattgcatttgatgtggcagcggcgtgtacggggtttatttatgcgttgagtgtggcagatcaatttattcgtgccggtaaggtgaagacggcgtttgtggttggcgcagatgttaattctcgtgtgttagacgaggcagatcgcggtactgtggtgttatttggcgatggtgcaggggcggtgattttgcaagcgagtgaacaagcgggtattttatctactcatttgcattcttcagccgatacggacaatatgttggcgttgccgattcaagaacgcggaaatgcacaatctggttttattcagatgcagggtaatgcgacgtttaaactggcagtcagtcggcttgcaaatgtggtagaagagacattacaagctaataatttgcagaaggcggatttggattggttggtgcctcatcaagcaaatattcggattattgcggcaacagctaagaagttggaaatggaaatgtcgcaggtggtgttaacggttgagaaatatggtaataatagtgcggcaaccgtgcctgtggcattagatgaagcggtgcgagatgggcggattcaacgtgggcagttgttgctgttggaagctttcggcggtggttggacttggggttcgggattagtcagattctaa

SEQ ID NO: 859 - protein, 316 aa, Haemophilus ducreyi
MYSKILATGSYLPKQVRSNADLEKMVDTTDEWIFTRSGMKERRIAAADETVATMGAAAAHKACEMAAIDVNEIELIVVATTTHSHAYPSAACQIQGMLAIEDAIAFDVAAACTGFIYALSVADQFIRAGKVKTAFVVGADVNSRVLDEADRGTVVLFGDGAGAVILQASEQAGILSTHLHSSADTDNMLALPIQERGNAQSGFIQMQGNATFKLAVSRLANVVEETLQANNLQKADLDWLVPHQANIRIIAATAKKLEMEMSQVVLTVEKYGNNSAATVPVALDEAVRDGRIQRGQLLLLEAFGGGWTWGSGLVRF

SEQ ID NO: 860 - DNA, 951 bp, Haemophilus influenzae
  CDS (1)..(951): transl_table=11
atgaatagtagaattttatccaccggtagctatctgccgagccatattcgcacaaatgcggatttagaaaaaatggttgatacatcagatgaatggattgtcactcgttctggtatccgtgaacgtcgtatcgcagcggaagatgaaactgttgcaacaatgggatttgaagcggcaaaaaatgcgatcgaagctgctcaaattaatcctcaagatattgaactgattattgttgcaactacaagtcactcacatgcttatccaagtgcggcttgccaagtgcaaggtttattaaatattgatgatgcgatttcttttgatttggcggcagcttgcacaggctttgtctatgctttgagcgtagctgatcaatttattcgtgcaggcaaagtgaaaaaagccttagtgataggctcagatctcaattctcgtaaattagatgaaacagatcgcagcactgttgtgctatttggtgatggtgcgggtgctgtaattttagaagcgagtgaacaagaaggaattatctccacccatttacacgcttcagcagataaaaataatgcccttgttttagctcagccagaacgtggtatagaaaaatctggctatatcgagatgcaaggtaacgaaacgttcaaattggcagttcgtgaactttcaaatgtggtggaagaaacacttttagccaataatttagataaaaaagatttagactggcttgtgccacaccaagcaaatttacgtattattacagcaacagctaaaaaattagaaatggatatgtcgcaagtggtggtaacgttagataaatacgctaataacagtgcagcaactgttcctgttgctttagatgaggctattcgagatggccgtattcaacgtgggcagttactattattagaagcctttggcggtggttggacttggggttcagcgttagtgagattttag

SEQ ID NO: 861 - protein, 316 aa, Haemophilus influenzae
MNSRILSTGSYLPSHIRTNADLEKMVDTSDEWIVTRSGIRERRIAAEDETVATMGFEAAKNAIEAAQINPQDIELIIVATTSHSHAYPSAACQVQGLLNIDDAISFDLAAACTGFVYALSVADQFIRAGKVKKALVIGSDLNSRKLDETDRSTVVLFGDGAGAVILEASEQEGIISTHLHASADKNNALVLAQPERGIEKSGYIEMQGNETFKLAVRELSNVVEETLLANNLDKKDLDWLVPHQANLRIITATAKKLEMDMSQVVVTLDKYANNSAATVPVALDEAIRDGRIQRGQLLLLEAFGGGWTWGSALVRF

SEQ ID NO: 862 - DNA, 963 bp, Neisseria meningitidis serogroup A
  CDS (1)..(963): transl_table=11
atgcagtatgccaaaatttccggcacgggcagctatcttcccgccaaccgcgtcagcaatgacgaccttgcccaaaaagtggatacctcggacgagtggattaccgcgcgcacgggcatcaaattccgccatattgcagccgaaaacgaaaaaaccagcgaccttgccgccgaagcggcgcgccgcgcgctggatgccgcaggtttgaacggcaatgaaatcgacctgattatcgtggcgacggcaacgccggatatgcagtttccgtctactgcgaccatcgtgcagcaaaaattgggcataaccaacggctgccccgcgtttgacgtacaggcggtgtgcgccggctttatgtacgcgctgaccacggcaaacgcctacattaaaagtggcatggcgaaaaacgcgctggtcatcggcgcggaaaccttcagccgcatcgtcgattggaacgaccgcacaacctgcgtattgttcggcgacggcgcgggcgcggtggttttaagcgcgtcggacacgccgggcatcatccacagcaaactcaaggccgacggcaattatctgaaactcttaaacgtccccgggcaaatcgcctgcggcaaagtttccggttcgccgtacatttcgatggacggtcccggcgtgttcaagtttgccgtcaaaatgctgtccaaaatcgccgatgacgttatcgaagaagccggttataccgccgctcaaatcgactggatcgtgccgcatcaggcaaaccgccgcattatcgaatcgaccgcgaaacatttaggtttgagtatggacaaagtcgtcctgaccgtccaagaccacggcaacacatccgccgcatcgattccgctggctttggatacgggcatccgcagcggacaaatcaaacgcggtcaaaacctgctgctcgaaggcatcggcggcggtttcgcgtggggcgcggtgctgttgcaatattga

SEQ ID NO: 863 - protein, 320 aa, Neisseria meningitidis serogroup A
MQYAKISGTGSYLPANRVSNDDLAQKVDTSDEWITARTGIKFRHIAAENEKTSDLAAEAARRALDAAGLNGNEIDLIIVATATPDMQFPSTATIVQQKLGITNGCPAFDVQAVCAGFMYALTTANAYIKSGMAKNALVIGAETFSRIVDWNDRTTCVLFGDGAGAVVLSASDTPGIIHSKLKADGNYLKLLNVPGQIACGKVSGSPYISMDGPGVFKFAVKMLSKIADDVIEEAGYTAAQIDWIVPHQANRRIIESTAKHLGLSMDKVVLTVQDHGNTSAASIPLALDTGIRSGQIKRGQNLLLEGIGGGFAWGAVLLQY

SEQ ID NO: 864 - DNA, 963 bp, Neisseria meningitidis serogroup B
  CDS (1)..(963): transl_table=11
atgcagtatgcaaaaatttccggcacaggcagctatcttcccgccaaccgcgtcagcaatgacgaccttgcccaaaaggtagatacctctgacgagtggattaccgcgcgcacgggcatcaaattccgccatattgcagccgaaaacgaaaaaaccagcgatcttgccgccgaagcggcgcaccgcgcgctggatgcagccggattagacagcggcgaaatcgatttgattatcgtggcaacggcaacgccggatatgcagtttccgtctactgcgaccatcgtgcaacaaaaattgggcatcaccaacggctgccccgcgtttgacgtacaggcggtgtgcgccggctttatgtacgcgctgaccacggcaaacgcctacattaaaagcggtatggcgaaaaacgcgctggtcatcggcgcggaaaccttcagccgcattgtagactggaacgaccgcacaacctgcgtattgttcggcgacggcgcgggcgcggtggttttaagcgcgtcggacacgccgggcatcatccacagcaaactcaaggccgacggcaattatctgaaactcttaaacgtccccgggcaaatcgcctgcggcaaagtttccggttcgccgtacatttcgatggacggtcccggcgtgttcaagtttgccgtcaaaatgctgtccaaaatcgccgatgacgttatcgaagaagcaggttacaccgccgctcaaatcgactggattgttccccatcaggcaaaccgccgcattatcgaatcgaccgcgaaacatttaggtttgagtatggacaaagtcgtcctgaccgtccaagaccacggcaacacatccgccgcatcgattccgctggctttggatacgggcatccgcagcggacaaatcaaacgcggtcaaaacctgctgctcgaaggcatcggcggcggtttcgcgtggggcgcggtgctgttgcaatattga

SEQ ID NO: 865 - protein, 320 aa, Neisseria meningitidis serogroup B
MQYAKISGTGSYLPANRVSNDDLAQKVDTSDEWITARTGIKFRHIAAENEKTSDLAAEAAHRALDAAGLDSGEIDLIIVATATPDMQFPSTATIVQQKLGITNGCPAFDVQAVCAGFMYALTTANAYIKSGMAKNALVIGAETFSRIVDWNDRTTCVLFGDGAGAVVLSASDTPGIIHSKLKADGNYLKLLNVPGQIACGKVSGSPYISMDGPGVFKFAVKMLSKIADDVIEEAGYTAAQIDWIVPHQANRRIIESTAKHLGLSMDKVVLTVQDHGNTSAASIPLALDTGIRSGQIKRGQNLLLEGIGGGFAWGAVLLQY

SEQ ID NO: 866 - DNA, 957 bp, Nitrosomonas europaea
  CDS (1)..(957): transl_table=11
atgtattcacggatcattggcaccggcagttacctgccggagaaagttctgaccaatcaggacctcgaatcgatggttgataccagcgatgaatggatacggacgcgtaccggtatcgaacgacggcatattgctgcagaaggccagatggcaagtgatcttgcgctggaagcgagccggaatgccattgaggctgcagatatccaggcaaaggacatcgatctgatcatcgtcgcaacgacgacaccggacatgatctttccaagcacagcctgtattctgcagaacaagcttggtatgtccaacgggccggcctttgatgtgcaggctgtctgcagcggattcatttatgcactggccacggcagacatgtttgtcagctccgggaaagcgcgtaatgcgctggttgttggtgctgaagtctactctcgtatcatggactggaacgaccgcagtacctgtgtcctgtttggtgacggtgcaggagcagtgattctcactcgtgatcagaaaccggggatcctttcatcccatctgcatgcagatgggagttacagccaggttctcacagcacctgcgtcgatccattccggtaaaatacaagggacccctttcattaccatggaaggcggtacagtcttcaaattcgcggtcaaagtcctggaagaagccgcactggaagcactgcaagcgaatcagctgcaaccttccgatatcgactggctgattccacatcaggccaatattcgcatcattacctcgacagcaaagaaactgggtatccctgaagaaaaagtggtagcaacggtttcacaacacggcaacacctcggctgcttccgttccactggcactcgaccaggcagtacgtgacggtcgtatccaaccggaccagcatatcgtgctggaaggtgtaggaggaggattcacctggggatcagttctggtacgctggtaa

SEQ ID NO: 867 - protein, 318 aa, Nitrosomonas europaea
MYSRIIGTGSYLPEKVLTNQDLESMVDTSDEWIRTRTGIERRHIAAEGQMASDLALEASRNAIEAADIQAKDIDLIIVATTTPDMIFPSTACILQNKLGMSNGPAFDVQAVCSGFIYALATADMFVSSGKARNALVVGAEVYSRIMDWNDRSTCVLFGDGAGAVILTRDQKPGILSSHLHADGSYSQVLTAPASIHSGKIQGTPFITMEGGTVFKFAVKVLEEAALEALQANQLQPSDIDWLIPHQANIRIITSTAKKLGIPEEKVVATVSQHGNTSAASVPLALDQAVRDGRIQPDQHIVLEGVGGGFTWGSVLVRW

SEQ ID NO: 868 - DNA, 954 bp, Pasteurella multocida
  CDS (1)..(954): transl_table=11
atgtatagtaaaatcttatccaccgggagttatttacccaaacatatccgtacgaatgccgatttagaaaaaatggtggacacctctgatgaatggatttcggaacgtactggcatcaaagaacgtcgcattgctgaagcaagcgaaactgtggcaaccatgggatttgaagctgcccagaattgcttagcggtatcgcctatggatgtcaatgagattgatcttattgtcgtcgcgacgactagcgcaacacatgcttttccaagtacggcatgtcaaattcagaaaatgctcggcataaaagacgcgattgcgtttgatgtcgcagcggcctgttcgggctttgtttacgccttaaccgttgccgatcaatttatccgtaccggaaaagtaaaaaaagccctcgtgattggggcggatctcttttcccgcgcgttaaatccagaggatcgaggcacgattattttatttggtgatggtgccggtgctgtgattttagaagcaagtgagcaagcggggatcatttcaacgcatttacatgcaacaggcgaaagtgctgaagtcttaaccttagctaatcaggcgcgcggtattgaatccgatcctgcctatttagaaatgcagggtaacgcaacttttaaaattgcagtacgcgaattagcaaatgtggtggaagaaaccttagaagccaaccagttagataagaaagatattgattggttagttccacatcaggcgaacttgcggattatttccgctaccgcaaaaaaattagatatggatatgtcacaagtcgtggttacacttgatcgccatggcaatacgtctgcaggcagtattccaagtgcgcttgatgaggcagtgcgtgatggacgtattcagcgtggacaattgttgttattagaagcattcggcggtggtctgacttggggatcggcgttagttaggttttaa

SEQ ID NO: 869 - protein, 317 aa, Pasteurella multocida
MYSKILSTGSYLPKHIRTNADLEKMVDTSDEWISERTGIKERRIAEASETVATMGFEAAQNCLAVSPMDVNEIDLIVVATTSATHAFPSTACQIQKMLGIKDAIAFDVAAACSGFVYALTVADQFIRTGKVKKALVIGADLFSRALNPEDRGTIILFGDGAGAVILEASEQAGIISTHLHATGESAEVLTLANQARGIESDPAYLEMQGNATFKIAVRELANVVEETLEANQLDKKDIDWLVPHQANLRIISATAKKLDMDMSQVVVTLDRHGNTSAGSIPSALDEAVRDGRIQRGQLLLLEAFGGGLTWGSALVRF

SEQ ID NO: 870 - DNA, 954 bp, Photorhabdus luminescens subsp
  CDS (1)..(954): transl_table=11
atgtatacaaaaattttaggtacaggtagttatctgcctgcgcaagtgcgtactaatgctgatttagaaaaaatggtggatacttctgatgagtggattgttacccgtacaggtgtccgcgaacgtcgtcttgctactgatgatgaaactgttgcggttatggggttccgggctgcaaagaaagcaattgaaatgtcgggcattgataaagagcagattgatttaatcattgttgcaacagcttcatccacccatgctttccccagttctgcgtgccaaattcagcacatgttgggtacccaaaattcagcggcttttgatatttctgctgcttgttctggttttgtttatgcactgagtattgctgataagtttattaaaaccggtgtggcaaaacatgcattggttattggttctgattctattaccagaacacttgatccagaagatcgcggaacacttgtcctgtttggcgatggtgcaggtgctatggtggtaggggcttctgatgagccaggaattctttcaactcaccttcatgcaaacggtagctatggtgaattgctggtattgccttatcaggagcgtcagaatctaaaagagcccgcatatgctagtatgatcggtaatgaagtatttaagattgcagtccgtgaattggctaacatagttgatgagactttagaagcaaataacttaccatatagtgagttggattggctggtacctcatcaggctaatttgcgtattatcgcagcgacagctaaaaaattaaacatgacaatggataaagtagtggtaacgctagatcgttacggtaatacttctgcggcatcggtacccacagcatttgatgaagcagtacgtgatggccggattaagcgtggtcagttaatcttaattgaggcttttggtggtggccttacttggggttcggcactgatacgtttttaa

SEQ ID NO: 871 - protein, 317 aa, Photorhabdus luminescens subsp
MYTKILGTGSYLPAQVRTNADLEKMVDTSDEWIVTRTGVRERRLATDDETVAVMGFRAAKKAIEMSGIDKEQIDLIIVATASSTHAFPSSACQIQHMLGTQNSAAFDISAACSGFVYALSIADKFIKTGVAKHALVIGSDSITRTLDPEDRGTLVLFGDGAGAMVVGASDEPGILSTHLHANGSYGELLVLPYQERQNLKEPAYASMIGNEVFKIAVRELANIVDETLEANNLPYSELDWLVPHQANLRIIAATAKKLNMTMDKVVVTLDRYGNTSAASVPTAFDEAVRDGRIKRGQLILIEAFGGGLTWGSALIRF

SEQ ID NO: 872 - DNA, 981 bp, Ralstonia solanacearum
  CDS (1)..(981)
atgacacgttacgcaaggatcatcggcacgggcagctatctgccgcccaagcgggtcaccaatcacgagctggccgcccagctggccgagcaaggcatcgagacgagcgacgaatggatcgtcacgcgcagcggcatccgcgcgcgccattacgccgagcctgatgtcacgtgcagcgacctggccgcgaaggccgccgagcgcgccatcgaagctgccggcatcgatcgcgccgagatcgacctgattctggtggcgacgtccacgccggacttcgtcttccccagcgccgcctgcctggtgcagcagaagctgggcctgtccaaccactgcgcggcgttcgatctgcaggccgtgtgctcgggcttcgtctacgggctggcgaccgccgacaagttcatccgcgccggcggttaccgcaacgcgctggtgatcggcgcggaagtcttctcgcgcattctcgatttcaatgaccgcaccacgtgcgtgctgttcggcgacggcgccggcgcggtggtattgcaggcatccgacgagcccggcattctgtcgaccgccttgcatgccgacggcagccatgcggatatcctctgcgtgcccggcaacgtggccggcggcgcgatcaagggcagtgccttcctgtacatggacgggcaggcggtcttcaagctggccgtcaacgtgctcgacaaggtggcgcgcgaagcgctggcgctggcggaggtcgagtcctcgcagatcgactggctgatcccgcaccaggccaacatccgcatcatgcagggcaccgccaagaagctcggtctgcccggcgagcgcatggtggtgacggtcgatgagcacggcaacacgtcggccgcgtcgattccgctggcgctggacgccgccgtacgcgacgggcgtatccagaagggccaccatgtgctgctcgagggcgtgggcggcggcttcacctggggtgccgcgttgctgcgcttctga

SEQ ID NO: 873 - protein, 326 aa, Ralstonia solanacearum
MTRYARIIGTGSYLPPKRVTNHELAAQLAEQGIETSDEWIVTRSGIRARHYAEPDVTCSDLAAKAAERAIEAAGIDRAEIDLILVATSTPDFVFPSAACLVQQKLGLSNHCAAFDLQAVCSGFVYGLATADKFIRAGGYRNALVIGAEVFSRILDFNDRTTCVLFGDGAGAVVLQASDEPGILSTALHADGSHADILCVPGNVAGGAIKGSAFLYMDGQAVFKLAVNVLDKVAREALALAEVESSQIDWLIPHQANIRIMQGTAKKLGLPGERMVVTVDEHGNTSAASIPLALDAAVRDGRIQKGHHVLLEGVGGGFTWGAALLRF

SEQ ID NO: 874 - DNA, 954 bp, Salmonella typhi
  CDS (1)..(954): transl_table=11
atgtatacgaagattattggtactggcagctatctgcccgaacaagtgcggactaacgccgatttggaaaaaatggttgagacctctgacgagtggattgtcactcgtacaggtattcgtgaacgccatatcgccgcgccgaatgaaactgtcgcgacgatgggctttaccgctgcgaatcgcgcgattgagatggcggggatcgataaagaccaaattggcttgattgtggtagcgaccacatcagcaacgcatgcatttccaagcgcggcatgtcagattcaaagtatgctcggtattaaaggttgcccggcgtttgatgtcgcggcagcgtgcgcaggtttcacctacgcgttaagtatcgccgaccagtacgttaaatccggcgtggttaaacacgcgctggtggtcggttccgatgtattagcccgcacttgcgatcctggcgatcgcggtacgatcattattttcggcgatggcgcaggcgcggccgtactgagcgcttctgaagaaccgggtattatctccactcatcttcatgccgatggccgttacggtgaattactgaccctgccgaatgccgatcgtgtaaatccggataacccgatttacctgacgatggcgggtaatgaagtctttaaagtggcggtcactgaactggcgcatattgtcgatgagacgctggcggctaataacctggatcgctcagaactcgattggctggtgccgcatcaggctaacctgcgtatcattagcgcgacagcgaaaaaactcggcatgtcgatggacaatgtcgtcgtcacgctggacaggcacggcaatacctccgcggcttctgtgccgtgcgcgctggatgaagccgtgcgtgacgggcgaattaaagccggtcagctggtattgcttgaagccttcgggggtggattcacctggggctccgcgctgattcgtttctag

SEQ ID NO: 875 - protein, 317 aa, Salmonella typhi
MYTKIIGTGSYLPEQVRTNADLEKMVETSDEWIVTRTGIRERHIAAPNETVATMGFTAANRAIEMAGIDKDQIGLIVVATTSATHAFPSAACQIQSMLGIKGCPAFDVAAACAGFTYALSIADQYVKSGVVKHALVVGSDVLARTCDPGDRGTIIIFGDGAGAAVLSASEEPGIISTHLHADGRYGELLTLPNADRVNPDNPIYLTMAGNEVFKVAVTELAHIVDETLAANNLDRSELDWLVPHQANLRIISATAKKLGMSMDNVVVTLDRHGNTSAASVPCALDEAVRDGRIKAGQLVLLEAFGGGFTWGSALIRF

SEQ ID NO: 876 - DNA, 954 bp, Salmonella typhimurium
  CDS (1)..(954): transl_table=11
atgtatacgaagattattggtactggcagctatctgcccgaacaagtgcggactaacgccgatctggaaaaaatggttgagacctctgacgagtggattgtcactcgtacaggtattcgtaaacgccatatcgccgcgccgaatgaaactgtcgcgacgatgggctttaccgctgcgaatcgcgcgattgagatggcggggatcgataaagaccaaattggcttgattgtggtggctaccacatcagcaacgcatgcatttccaagcgcggcatgtcagattcaaagtatgctcggtattaaaggttgcccggcgtttgatgtcgcggcagcgtgcgcaggtttcacctacgcgttaagcatcgccgaccagtacgttaaatccggcgcggttaaacacgcgctggtggtcggttccgatgtattagcccgcacttgcgatcctggcgatcgcggtacgatcattattttcggcgatggcgcaggcgcggccgtactgagcgcttctgaagaaccgggtattatctccactcatcttcatgccgatggccgttacggtgaattactgaccctgccgaatgccgatcgcgtaaatccggataacccgatttacctgacaatggcgggcaatgaagtctttaaagtggcggtcactgaactggcgcatattgtcgatgagacgctggcggctaataacctggatcgctcagaactcgattggctggtgccgcatcaggctaacctgcgtatcattagcgcgacagcgaaaaaactcggcatgtcgatggacaatgtcgtcgtcacgctggacaggcacggcaatacctccgcggcttctgtgccgtgcgcgctggatgaagccgtgcgtgacgggcgaattaaagccggtcagctggtattgcttgaagccttcgggggtggattcacctggggctccgcgctgattcgtttctag

SEQ ID NO: 877 - protein, 317 aa, Salmonella typhimurium
MYTKIIGTGSYLPEQVRTNADLEKMVETSDEWIVTRTGIRKRHIAAPNETVATMGFTAANRAIEMAGIDKDQIGLIVVATTSATHAFPSAACQIQSMLGIKGCPAFDVAAACAGFTYALSIADQYVKSGAVKHALVVGSDVLARTCDPGDRGTIIIFGDGAGAAVLSASEEPGIISTHLHADGRYGELLTLPNADRVNPDNPIYLTMAGNEVFKVAVTELAHIVDETLAANNLDRSELDWLVPHQANLRIISATAKKLGMSMDNVVVTLDRHGNTSAASVPCALDEAVRDGRIKAGQLVLLEAFGGGFTWGSALIRF

SEQ ID NO: 878 - DNA, 960 bp, Shewanella oneidensis
  CDS (1)..(960): transl_table=11
atgcatacaaaaattctcggaactggtagttacgtaccggtgcaggtgcgtagtaatcaagatttggaaaaaatggtggaaaccagtgaccaatggattgtggaacgcactggtatttcagagcgtcgcattgcggcgcaagatgaaacagtctcaactatgggctatctggcggcattaaatgcgctagagatggccggcatagaagcatcagatttagatatgatcatttgtggcaccaccagtgcggcaaatgcattcccagcagcagcatgcgaaattcaagcgatgcttggcgttcataccattccggcctttgatattgcggcggcctgttccggttttgtctatgccttatctgtagcagaccaattcgttaaaaatggtaccgcgaaaaaagtgctcgtcattggtgcagacgtattgtcccgcctatgcgagccagaagatcgcaccaccattattctgtttggtgatggcgcgggtgcggcaattatcggtgcctccgatgagcctgggattatctctacccatatttacgctgatggtcgtcaaggtgacttgctgaaatgtgcttttccaccgcgtcaaggagaaacttccgaagcggtagggtttatgaccatgaaaggtaatgacgtctttaaagtggctgtcacgcagttatctcatgtcgtgactgaaacattacgccttaataatatcgacaagtcggaaatcgactggttggtgccgcatcaggcgaatttccgcattattaatgccacggcgaaaaagctcgatatgagcttagataaagtggtattaacactggctaagcacggtaacacgtcagcggcatcggtgccgattgccttggatgaagccgttcgtgatggccggatccaacgtggccagttgttgctgctcgaagcctttggtgctggttttgcgtggggcagtgcgctcgtccgtttttaa

SEQ ID NO: 879 - protein, 319 aa, Shewanella oneidensis
MHTKILGTGSYVPVQVRSNQDLEKMVETSDQWIVERTGISERRIAAQDETVSTMGYLAALNALEMAGIEASDLDMIICGTTSAANAFPAAACEIQAMLGVHTIPAFDIAAACSGFVYALSVADQFVKNGTAKKVLVIGADVLSRLCEPEDRTTIILFGDGAGAAIIGASDEPGIISTHIYADGRQGDLLKCAFPPRQGETSEAVGFMTMKGNDVFKVAVTQLSHVVTETLRLNNIDKSEIDWLVPHQANFRIINATAKKLDMSLDKVVLTLAKHGNTSAASVPIALDEAVRDGRIQRGQLLLLEAFGAGFAWGSALVRF

SEQ ID NO: 880 - DNA, 978 bp, Xanthomonas axonopodis pv
  CDS (1)..(978): transl_table=11
atgagcaagcggatctattccagaatcgcgggcacgggtagttatttgcccgaaaaggtgttgaccaacgacgacatgtcgaagattgtcgacaccagcgatgaatggatcttctcgcgcactggcatccgtgaacgtcacatcgtcgccgacgaccagaccaccagcgatctggcgtatttcgcctcgctgagggcgatggaagcggccggtgtgaccgccgatgagatcgatctgatcgtcatcggcaccaccacccctgacctgatctttccgtcgaccgcctgtttgctgcaggcccgactgggtaacatcggttgcggtgcgatggacgtcaacgctgcatgctcgggttttgtctacgcgctcagcgtggccgacaagttcgtgcgcagtggcgacgccaagaccgtgctggtggttggcgcagaaaccttgacccgcatcgtcgactggaccgatcgcaccacctgcgtgctgttcggcgatggcgccggcgcggtgatcctcaaggccgacgaagagaccggcatcctcagcacccatttgcacgccgatggcagcaagaaagagctgctgtgggacccggtgggggtctcggtgggattcggcgaaggcaagaatggcggcggtgcattgctgatgaagggcaacgacgtcttcaagtatgcggtcaaggcgctggactcggtggtcgatgagaccctggcggccagtggctatgacaagcacgacctggattggctgattccgcatcaggccaacctgcgcatcatcgaagccactgccaagcggatggagttgccgatggagcaggtggtcgtcaccgtagatcgccatggcaacacgtcgtctgcctcggtgccgctggcgctggacgaagcggtgcgctccggtcgcgtgcagcgcggccagttgttgttgctggaagccttcggtggcgggtttacctggggctcggcgctgctgcgctactga

SEQ ID NO: 881 - protein, 325 aa, Xanthomonas axonopodis pv
MSKRIYSRIAGTGSYLPEKVLTNDDMSKIVDTSDEWIFSRTGIRERHIVADDQTTSDLAYFASLRAMEAAGVTADEIDLIVIGTTTPDLIFPSTACLLQARLGNIGCGAMDVNAACSGFVYALSVADKFVRSGDAKTVLVVGAETLTRIVDWTDRTTCVLFGDGAGAVILKADEETGILSTHLHADGSKKELLWDPVGVSVGFGEGKNGGGALLMKGNDVFKYAVKALDSVVDETLAASGYDKHDLDWLIPHQANLRIIEATAKRMELPMEQVVVTVDRHGNTSSASVPLALDEAVRSGRVQRGQLLLLEAFGGGFTWGSALLRY

SEQ ID NO: 882 - DNA, 978 bp, Xanthomonas campestris pv
  CDS (1)..(978): transl_table=11
atgagcaagcggatctactccagaatcgcgggcacgggtagttatttgcccgaaaaggtgttgaccaacgacgatatgtccaagatcgtcgacaccagcgatgaatggatccgctcgcgtaccggcatccgtgaacgtcacatcgttgccgacgaccagaccaccagcgacctggcgtacttcgcctcgctgaaggcgatggaagcagccggtgtcactgccgacgagatcgacctgatcgttgtcggcaccaccaccccggacctgattttcccgtccactgcgtgcctgttgcaggcgcggctgggcaatgtcggctgcggtgccttcgacgtcaacgcggcctgctcgggcttcgtctacgcgctcagcgtggccgacaagttcgttcgcagtggcgacgccaagaccgtgctggtcgttggcgccgaaacgctgacccggatcgtcgactggaccgatcgcaccacctgcgtgctgtttggcgacggtgcgggcgcggtcgtgctcaaggccgacgaagacaccggcatcctcagcacccatctgcatgccgacggcagcaagaaggaattgctgtgggatccggtcggtgtgtctgttggcttcggcgaaggcaagaacggcggtggcgcgttgctgatgaagggtaacgacgtgttcaagtacgccgtcaaggcgctggactcggtggtcgatgaaaccctcgccgccaatggcctggacacgcacgacctggactggttgatcccgcatcaggccaatctgcgcattatcgaagccaccgccaagcggctggatctgccgatggagcaggtggtggtcaccgtcgaccggcatggcaatacctcgtcggcctcggtgccgctcgcgctggacgaagcggttcgctccggtcgcgtgcagcgtggccagttgctgctgctggaagccttcgggggcggatttacctggggctcggcgctgctgcgctactga

SEQ ID NO: 883 - protein, 325 aa, Xanthomonas campestris pv
MSKRIYSRIAGTGSYLPEKVLTNDDMSKIVDTSDEWIRSRTGIRERHIVADDQTTSDLAYFASLKAMEAAGVTADEIDLIVVGTTTPDLIFPSTACLLQARLGNVGCGAFDVNAACSGFVYALSVADKFVRSGDAKTVLVVGAETLTRIVDWTDRTTCVLFGDGAGAVVLKADEDTGILSTHLHADGSKKELLWDPVGVSVGFGEGKNGGGALLMKGNDVFKYAVKALDSVVDETLAANGLDTHDLDWLIPHQANLRIIEATAKRLDLPMEQVVVTVDRHGNTSSASVPLALDEAVRSGRVQRGQLLLLEAFGGGFTWGSALLRY

SEQ ID NO: 884 - DNA, 975 bp, Xylella fastidiosa
  CDS (1)..(975): transl_table=11
atgagcaagcggatctacgctagaatcgcaggcacaggcggttatttgccggaaaaagtgctaactaatgacgatctggcccatatcgtcgataccagcgatgaatggatccgcactcgcactggtatccgtgagcggcatattgctgccgaaggcgaaacgaccagcgatttggcttatgaggctgcgatatgtgcacttgaagctgctgaggtgcggtccgctgatttggatttgattgttgtcgggaccacaacgccggacttgatttttccgtctactgcttgcttgttacaggcacgtctgggagctgttggttgtggtgcgttcgacgtgaatgctgcatgttccggttttgtatatgcgttgagcgtggcagaaaaatttgtgtcttcgggttgctccaaaacagtgttagttgtgggggccgataccttgacccgaattatcgactggagtgaccgcacaacttgcgtactattcggggatggtgccggggcggtggtgctcaaggctgatgaagatacagggattctcagtacccatctgcatgctgatgggagcaaaaaagaattgttgtgggatcctgttggtgtgtcagttggttttggtgaaggcaaagattgcggtgcgttgttgatgaagggaaatgaggtgtttaaatatgccgttaaagcccttgatagagtggttgatgagacgttggaagcgaatcatctggataagcacgaactcgattggttaattcctcaccaagccaacttacgcattatcgaagccaccgcaaggcgtttagatatgtcgatggatcaggtggtggtcacggttgatcgtcacggcaacacttccacggcttcggtgccactcgcgcttgacgaggctatccgttctggtcgtgtgcagcgtggtcagttactgctcctggaagcattcggtggtggttttacttggggatcggcgttactgcgctattga

SEQ ID NO: 885 - protein, 324 aa, Xylella fastidiosa
MSKRIYARIAGTGGYLPEKVLTNDDLAHIVDTSDEWIRTRTGIRERHIAAEGETTSDLAYEAAICALEAAEVRSADLDLIVVGTTTPDLIFPSTACLLQARLGAVGCGAFDVNAACSGFVYALSVAEKFVSSGCSKTVLVVGADTLTRIIDWSDRTTCVLFGDGAGAVVLKADEDTGILSTHLHADGSKKELLWDPVGVSVGFGEGKDCGALLMKGNEVFKYAVKALDRVVDETLEANHLDKHELDWLIPHQANLRIIEATARRLDMSMDQVVVTVDRHGNTSTASVPLALDEAIRSGRVQRGQLLLLEAFGGGFTWGSALLRY

SEQ ID NO: 886 - DNA, 975 bp, Xylella fastidiosa
  CDS (1)..(975): transl_table=11
atgagcaagcggatcttcgctagaatcgcaggcacaggcggttatttgccggaaaaagtgctaactaataacgatctggcccatatcgtcgataccagcgatgaatggatccgcactcgcactggtatccgtgagcggcatattgctgccgaaggcgaaacgaccagcgatttggcttatgaggctgcgatacgtgcacttgaagctgctgaggtgcggtccgctgatttggatttgattgttgtcgggaccacaacgccggacttgatttttccgtctactgcttgcttgttacaggcacgtcttggagctgttggttgtggtgcgttcgacgtgaatgctgcatgttccggttttgtatatgcgttgagcgtggcagaaaaatttgtgtcttcgggttgctccaaaacagtgttagttgtgggggccgataccttgacccgaattatcgattggagtgaccgcacgacttgcgtactattcggggatggtgccggagcggtggtgctcaaggctgatgaagatacagggattctcagtacccatctgcatgctgatgggagcaaaaaagaattgttgtgggatcctgttggtgtgtcagttggttttggtgaaggtaaagattgcggcgcgctgttgatgaagggaaatgaggtgtttaaatatgccgttaaagcccttgatagagtggttgatgagacgttggaagcgaatcatctggataagcacgaactcgattggttaattcctcaccaagcaaacttacgcattatcgaagccaccgcaaggcgtttagatatgtcgatgaatcaggtggtggtcacggttgatcgtcacggcaacacttccacggcttcggtgccactcgcgcttgacgaggctatccgttctggtcgtgtgcagcgtggtcagttactgctcctggaagcattcggcggtggttttacttggggatcggcgttactgcgctattaa

SEQ ID NO: 887 - protein, 324 aa, Xylella fastidiosa
MSKRIFARIAGTGGYLPEKVLTNNDLAHIVDTSDEWIRTRTGIRERHIAAEGETTSDLAYEAAIRALEAAEVRSADLDLIVVGTTTPDLIFPSTACLLQARLGAVGCGAFDVNAACSGFVYALSVAEKFVSSGCSKTVLVVGADTLTRIIDWSDRTTCVLFGDGAGAVVLKADEDTGILSTHLHADGSKKELLWDPVGVSVGFGEGKDCGALLMKGNEVFKYAVKALDRVVDETLEANHLDKHELDWLIPHQANLRIIEATARRLDMSMNQVVVTVDRHGNTSTASVPLALDEAIRSGRVQRGQLLLLEAFGGGFTWGSALLRY

SEQ ID NO: 888 - DNA, 951 bp, Yersinia pestis
  CDS (1)..(951): transl_table=11
atgtatactaagattctcggtacggggagttatctgcccgtacaagtgcgcagcaatgctgatttagaaaaaatggtggatacgtcagatgagtggattgtcactcgtactggtatccgtgagcggcgtattgcaggccttgacgaaacagtcgcgactatgggcttccaggcggcagaaaaagcgctggaaatggccggtattgataaggacgatatcgggttgattatcgttgcgaccacctcttcaagccatgctttcccaagttcggcttgccaggtgcagcgaatgctcggtatcaaagatgcagcttcttttgatttggctgcggcttgcgcgggttttacctatgcgctgagtgttgctgaccagtatgttaagagtggtgcggtcaagcatgccattgttattgggtcagatgtattgtcccgtgcattggatccagaagatcgtggtacgatcattctgtttggcgatggcgctggcgcggtggtacttggtgcatctgagcaaccaggtattatgtctacgcatttacatgctgatggtcgttatggcgagttgctcgctttaccgtatccagaccgtcagcaggaccaacctgcctacgtcacgatggcaggcaatgaagtttttaaagttgcggtaacggaactggcccacattgtggatgaaacattgcaggctaataatctggatcgcactgcgctcgattggttggtgccacatcaggctaacctgcgtattattagcgctacggctaaaaagttaggcatggggatggataaagtggtgatcacgcttgatcgccatgggaacacctccgcggcatcagtgccttcggcattcgatgaagcagtgcgagatgggcgaattcaacgtgggcagttggtattgcttgaggcgtttggcggtggatttacctggggttctgcactggttcgtttttga

SEQ ID NO: 889 - protein, 316 aa, Yersinia pestis
MYTKILGTGSYLPVQVRSNADLEKMVDTSDEWIVTRTGIRERRIAGLDETVATMGFQAAEKALEMAGIDKDDIGLIIVATTSSSHAFPSSACQVQRMLGIKDAASFDLAAACAGFTYALSVADQYVKSGAVKHAIVIGSDVLSRALDPEDRGTIILFGDGAGAVVLGASEQPGIMSTHLHADGRYGELLALPYPDRQQDQPAYVTMAGNEVFKVAVTELAHIVDETLQANNLDRTALDWLVPHQANLRIISATAKKLGMGMDKVVITLDRHGNTSAASVPSAFDEAVRDGRIQRGQLVLLEAFGGGFTWGSALVRF

SEQ ID NO: 890 - DNA, 1215 bp, Brassica napus
  CDS (1)..(1215)
atggcgaatgcatctggcttcttcactcatccttcgatttcctcaatgcgaagaagaacccacctcccgattcaagtttctggatctgggttttgcgtctcgaaacgattctccaaaagggtcctctgctctagcctcagctccctcgataacaatgcttctccttctccctctcaataccgaccacccaggctagtaccgagtggctgcaaactgattggatctggttcagctgtcccaagtcttctgatttctaatgatgatctcgcaaagatagtcgatactaatgatgaatggatagctactcgcactggtatccgcaaccgcagagttgtatcaggcaaagatagcttggttggcttagcagtggaagcagcaaccaaagcccttgaaatggcagaggttgctcctgaggatattgacttagtcttgatgtgtacctccactcctgatgatctcttcggtgctgctccacagattcagaaggcgcttggttgcacaaagaaccctttggcatatgatatcacagctgcttgtagtggatttgttttgggtctagtctcagctgcttgtcatataagaggaggcggttttaagaatgttttagtgattggagctgattctttatctcggtttgttgattggactgatagaggaacttgcatcctctttggagatgctgctggtgctgtggttgttcaggcttgtgacattgaggatgatgggttatatagtttcgatgtacacagcgatggagacggtcgtagacatttgaatgcttctattaaagaatcccaaaccaatggtgacttgagctccaacggatcagcgttgggagacttccaaccgaaacaagcttcatactcttgcattcagatgaatggaaaagaagtctttcgctttgctgtcaaatgcgttccccaatctattgaatctgctttacaaaaagccggtcttcctgcttccgccatcgactggctcctcctccaccaggcaaaccagagaataatagactctgtggctacaaggctgcagttcccaccagaaagagtcatatcaaacttggctaattacggtaacacaagcgctgcttctatccctctagctcttgatgaggcggtgagaagcgggaaagttaaaccgggacataccatagccacttccggttttggagccggtttaacttggggttcagcaattatcaggtggagatga

SEQ ID NO: 891 - protein, 404 aa, Brassica napus
MANASGFFTHPSISSMRRRTHLPIQVSGSGFCVSKRFSKRVLCSSLSSLDNNASPSPSQYRPPRLVPSGCKLIGSGSAVPSLLISNDDLAKIVDTNDEWIATRTGIRNRRVVSGKDSLVGLAVEAATKALEMAEVAPEDIDLVLMCTSTPDDLFGAAPQIQKALGCTKNPLAYDITAACSGFVLGLVSAACHIRGGGFKNVLVIGADSLSRFVDWTDRGTCILFGDAAGAVVVQACDIEDDGLYSFDVHSDGDGRRHLNASIKESQTNGDLSSNGSALGDFQPKQASYSCIQMNGKEVFRFAVKCVPQSIESALQKAGLPASAIDWLLLHQANQRIIDSVATRLQFPPERVISNLANYGNTSAASIPLALDEAVRSGKVKPGHTIATSGFGAGLTWGSAIIRWR

SEQ ID NO: 892 - DNA, 1194 bp, Glycine max
  CDS (1)..(1194)
atggcgaatgcatctgggttcttcagcccttcggttccccacttcaaagtgagggttaagcctctcaccactgccattggattctccgccaaagtcgtttgcgttggaaacatcgaaggagctgaaaaacatgcttccaccgtttccccttcttcccaatctccaatacccaggcttgtcagcaaagggtgcaagttagttggatgtggctctgctgtgccagctcttcagatttctaatgacgatctttcgaaaatggttgatactaatgatgaatggatatctgttcgcaccgggattcgtagacggcgtgttctttcaggcaaagataacttgacaggtttagcagtagaggcagctaggaaagctcttgagatggcaaaggtagaccctgatgatcttgacctaatattgatgtgcacatctacgccagaggatctttttggtagtgctccacagattcaaaaacaacttggctgcaaagcaaatccattgtcttatgacattacagctgcatgtagtggatttgtgttgggtttaatatcagctgcttgtcacattaggggaggtggatttaataatgttctagttattggggcggatgctctctcacgatatgttgattggacagacagagggacctgtattctttttggggatgctgctggtgctgtactagtacaggcctgcaacagtgaagaagatggtttatttggttttgatttgcatagtgatggcagtggtcaaaggcacttgaatgcttccattaaagaaaatgagtcaaataatgcattggattcaaatggttctgtgtttggctttcctcccaagcagtcctcatattcatgcattcaaatgaacggcaaagaagtctttcgctttgctgtacgatgtgtaccacagtcaattgaatctgcccttgaaaaggctggtctccctgcatctagcattgattggctacttctccatcaggcaaaccagaggattattgatgcagttgccactcggttagaactcccctcagaacgggtgatatcaaacttagctaattatggtaacacaagtgcagcttccattcccttggctttagatgaagcggttcgaagtggtaaggttaaggcaggccaaactattgcaacggccggcttcggtgccggtcttacttggggttcagcaattattcgttggggctga

SEQ ID NO: 893 - protein, 397 aa, Glycine max
MANASGFFSPSVPHFKVRVKPLTTAIGFSAKVVCVGNIEGAEKHASTVSPSSQSPIPRLVSKGCKLVGCGSAVPALQISNDDLSKMVDTNDEWISVRTGIRRRRVLSGKDNLTGLAVEAARKALEMAKVDPDDLDLILMCTSTPEDLFGSAPQIQKQLGCKANPLSYDITAACSGFVLGLISAACHIRGGGFNNVLVIGADALSRYVDWTDRGTCILFGDAAGAVLVQACNSEEDGLFGFDLHSDGSGQRHLNASIKENESNNALDSNGSVFGFPPKQSSYSCIQMNGKEVFRFAVRCVPQSIESALEKAGLPASSIDWLLLHQANQRIIDAVATRLELPSERVISNLANYGNTSAASIPLALDEAVRSGKVKAGQTIATAGFGAGLTWGSAIIRWG

SEQ ID NO: 894 - DNA, 1206 bp, Zea mays
  CDS (1)..(1206)
atggtcgccgcctccggcctcgcgctgccgcgggtgtccgcaccatgcccggtgcgcacgcgtggtggcctccgccccgccttcctccgagtcgcgcagcccgtgacgctgccaccgccccagctccggtgctgcgcgtccaccgtcgacgatggcgtggtgtccgctgcggcttccaagtcccgcctccccagggtggttggtatgggttcaaagctcgttggatgtggatcagccatcccaacacttagcgtttcaaatgatgacctttcgaagatagttgaaacatcagatgaatggattgcggctcgaactgggattcgtaacaggcgagttctttcaggagatgaaacattgcggggactctcaataaaagcagctcaaagggcacttgaaatggccaaagtaaaagctgaagatgttgaccttgttctcctttgtacatctactccagatgatttgtttggaggtgccactcaggtgctgacggacgtggggtgcacaaaggcttttggatttgatattacagctgcttgcagtgggtttatagttggcttaatcacagctactcgttttatcaaaggtggaggttttcagaatatcctagtaattggtgctgatgctctttcaaaatatgtggattggacagacagaggtacatgcatcctttttggtgatgctgctggtgctgtgttggtacaggcatgcagcgctgatgaagatggcttgctaggtttttgtgttcaaagtgatggcaatgggcaaaaacacctaaatgccgcaacggcaaacgatgagtcaatcttgtccaataccaatggtgttcctggatttccgccaaagaaggcaacctactcatgcattcagatgaacggaaaggaagttttccgctttgctgtccgatgtgtgccacagtccattgagaaggcactccaagaagctggtttgcccgcctccagtatagactggttgttgttacatcaagctaatcagcggattattgatgcggctgccagtcgattagatatcccgtccgacaaggttatttcaaatcttgccaactatggcaataccagcgcggcatccatcccgttagctttggatgaggctgttcgcagcggcaaggtgaaggctggcgatattattgcggcgtcaggttttggtgctggacttacctggggttcagctattgtcaagtggggctaa

SEQ ID NO: 895 - protein, 401 aa, Zea mays
MVAASGLALPRVSAPCPVRTRGGLRPAFLRVAQPVTLPPPQLRCCASTVDDGVVSAAASKSRLPRVVGMGSKLVGCGSAIPTLSVSNDDLSKIVETSDEWIAARTGIRNRRVLSGDETLRGLSIKAAQRALEMAKVKAEDVDLVLLCTSTPDDLFGGATQVLTDVGCTKAFGFDITAACSGFIVGLITATRFIKGGGFQNILVIGADALSKYVDWTDRGTCILFGDAAGAVLVQACSADEDGLLGFCVQSDGNGQKHLNAATANDESILSNTNGVPGFPPKKATYSCIQMNGKEVFRFAVRCVPQSIEKALQEAGLPASSIDWLLLHQANQRIIDAAASRLDIPSDKVISNLANYGNTSAASIPLALDEAVRSGKVKAGDIIAASGFGAGLTWGSAIVKWG

SEQ ID NO: 896 - DNA, 25 bp, Artificial sequence
  primer
atgtatacgaagattattggtactg

SEQ ID NO: 897 - DNA, 23 bp, Artificial sequence
  primer
ttagaaacgaaccagcgcggagc

SEQ ID NO: 898 - protein, 348 aa, Artificial sequence
  consensus sequence
  Variant (2)..(2): Xaa in position 2 is any amino acid
  Variant (8)..(12): Xaa in position 8 to 12 is any amino acid
  Variant (14)..(21): Xaa in position 14 to 21 is any amino acid
  Variant (22)..(26): Xaa in position 22 to 26 is any or no amino acid
  Variant (28)..(28): Xaa in position 28 is any amino acid
  Variant (33)..(34): Xaa in position 33 to 34 is any amino acid
  Variant (39)..(40): Xaa in position 39 to 40 is any amino acid
  Variant (42)..(43): Xaa in position 42 to 43 is any amino acid
  Variant (44)..(44): Xaa in position 44 is any or no amino acid
  Variant (46)..(57): Xaa in position 46 to 57 is any amino acid
  Variant (58)..(58): Xaa in position 58 is any or no amino acid
  Variant (61)..(62): Xaa in position 61 to 62 is any amino acid
  Variant (64)..(66): Xaa in position 64 to 66 is any amino acid
  Variant (68)..(74): Xaa in position 68 to 74 is any amino acid
  Variant (78)..(78): Xaa in position 78 is any amino acid
  Variant (80)..(80): Xaa in position 80 is any amino acid
  Variant (82)..(87): Xaa in position 82 to 87 is any amino acid
  Variant (91)..(91): Xaa in position 91 is any amino acid
  Variant (93)..(95): Xaa in position 93 to 95 is any amino acid
  Variant (97)..(98): Xaa in position 97 to 98 is any amino acid
  Variant (101)..(105): Xaa in position 101 to 105 is any amino acid
  Variant (106)..(107): Xaa in position 106 to 107 is any or no amino acid
  Variant (111)..(112): Xaa in position 111 to 112 is any amino acid
  Variant (114)..(114): Xaa in position 114 is any amino acid
  Variant (116)..(116): Xaa in position 116 is any amino acid
  Variant (119)..(119): Xaa in position 119 is any amino acid
  Variant (123)..(124): Xaa in position 123 to 124 is any amino acid
  Variant (126)..(131): Xaa in position 126 to 131 is any amino acid
  Variant (133)..(137): Xaa in position 133 to 137 is any amino acid
  Variant (140)..(140): Xaa in position 140 is any amino acid
  Variant (142)..(145): Xaa in position 142 to 145 is any amino acid
  Variant (148)..(149): Xaa in position 148 to 149 is any amino acid
  Variant (151)..(152): Xaa in position 151 to 152 is any amino acid
  Variant (155)..(155): Xaa in position 155 is any amino acid
  Variant (156)..(157): Xaa in position 156 to 157 is any or no amino acid
  Variant (159)..(160): Xaa in position 159 to 160 is any amino acid
  Variant (170)..(170): Xaa in position 170 is any amino acid
  Variant (172)..(172): Xaa in position 172 is any amino acid
  Variant (174)..(177): Xaa in position 174 to 177 is any amino acid
  Variant (178)..(184): Xaa in position 178 to 184 is any or no amino acid
  Variant (187)..(190): Xaa in position 187 to 190 is any amino acid
  Variant (193)..(194): Xaa in position 193 to 194 is any amino acid
  Variant (196)..(200): Xaa in position 196 to 200 is any amino acid
  Variant (202)..(216): Xaa in position 202 to 216 is any amino acid
  Variant (217)..(240): Xaa in position 217 to 240 is any or no amino acid
  Variant (242)..(242): Xaa in position 242 is any amino acid
  Variant (244)..(245): Xaa in position 244 to 245 is any amino acid
  Variant (249)..(249): Xaa in position 249 is any amino acid
  Variant (252)..(253): Xaa in position 252 to 253 is any amino acid
  Variant (255)..(272): Xaa in position 255 to 272 is any amino acid
  Variant (276)..(276): Xaa in position 276 is any amino acid
  Variant (282)..(282): Xaa in position 282 is any amino acid
  Variant (285)..(288): Xaa in position 285 to 288 is any amino acid
  Variant (290)..(291): Xaa in position 290 to 291 is any amino acid
  Variant (293)..(298): Xaa in position 293 to 298 is any amino acid
  Variant (300)..(301): Xaa in position 300 to 301 is any amino acid
  Variant (303)..(306): Xaa in position 303 to 306 is any amino acid
  Variant (314)..(314): Xaa in position 314 is any amino acid
  Variant (316)..(316): Xaa in position 316 is any amino acid
  Variant (320)..(320): Xaa in position 320 is any amino acid
  Variant (322)..(322): Xaa in position 322 is any amino acid
  Variant (324)..(324): Xaa in position 324 is any amino acid
  Variant (327)..(329): Xaa in position 327 to 329 is any amino acid
  Variant (331)..(333): Xaa in position 331 to 333 is any amino acid
  Variant (335)..(335): Xaa in position 335 is any amino acid
  Variant (337)..(338): Xaa in position 337 to 338 is any amino acid
  Variant (342)..(342): Xaa in position 342 is any amino acid
  Variant (346)..(347): Xaa in position 346 to 347 is any amino acid
GXGSYLPXXXXXNXXXXXXXXXXXXXTXDEWIXXRTGIXXRXXXAXXXXXXXXXXXXXAAXXAXXXAXXXXXXXDLIXVXTXXXXXXFPSXAXXXQXXLGXXXXXXXAFDXXAXCXGFXYALXXAXXXXXXGXXXXXLVXGXXXXSRXXDXXDRXXXTXXLFGDGAGAVXLXAXXXXXXXXXXXGIXXXXLHXXGXXXXXLXXXXXXXXXXXXXXXXXXXXXXXXXXXXXXXXXXXXXXXMXGXXVFKXAVXXLXXXXXXXXXXXXXXXXXXDWLXPHQANXRIXXXXAXXLXXXXXXVXXTXXXXGNTSAASXPXALDXAXRXGRXXXGXXXLXEXXGGGXTWGXXL

SEQ ID NO: 899 - protein, 58 aa, Artificial sequence
  protein pattern
  Variant (3)..(3): Xaa in position 3 is Phe, Ile, Leu or Val
  Variant (4)..(4): Xaa in position 4 is Ile or Val
  Variant (10)..(10): Xaa in position 10 is any amino acid
  Variant (13)..(13): Xaa in position 13 is Ile, Leu or Met
  Variant (14)..(16): Xaa in position 14 to 16 is any amino acid
  Variant (17)..(17): Xaa in position 17 is Ala, Cys or Gly
  Variant (18)..(18): Xaa in position 18 is any amino acid
  Variant (19)..(19): Xaa in position 19 is His, Lys or Arg
  Variant (21)..(21): Xaa in position 21 is any amino acid
  Variant (22)..(22): Xaa in position 22 is Phe, Ile, Leu, Met or Val
  Variant (23)..(24): Xaa in position 23 to 24 is any amino acid
  Variant (25)..(25): Xaa in position 25 is Ala, Asp, Glu, Asn or Ser
  Variant (26)..(26): Xaa in position 26 is any amino acid
  Variant (27)..(27): Xaa in position 27 is Leu, Met or Val
  Variant (28)..(28): Xaa in position 28 is Ile or Val
  Variant (29)..(29): Xaa in position 29 is any amino acid
  Variant (31)..(31): Xaa in position 31 is Ile, Leu, Met or Val
  Variant (32)..(34): Xaa in position 32 to 34 is any amino acid
  Variant (35)..(35): Xaa in position 35 is Ala or Gly
  Variant (37)..(37): Xaa in position 37 is Asn or Thr
  Variant (39)..(39): Xaa in position 39 is Ala, Ser or Thr
  Variant (41)..(41): Xaa in position 41 is Ser or Thr
  Variant (42)..(42): Xaa in position 42 is Ile or Val
  Variant (44)..(44): Xaa in position 44 is any amino acid
  Variant (46)..(46): Xaa in position 46 is any amino acid
  Variant (47)..(47): Xaa in position 47 is Ala, Cys, Asp or Thr
  Variant (48)..(48): Xaa in position 48 is any amino acid
  Variant (49)..(49): Xaa in position 49 is Ala, Gly or Ser
  Variant (50)..(51): Xaa in position 50 to 51 is any amino acid
  Variant (52)..(52): Xaa in position 52 is Ala, Asp or Ser
  Variant (54)..(54): Xaa in position 54 is any amino acid
  Variant (55)..(55): Xaa in position 55 is Ile or Val
  Variant (56)..(57): Xaa in position 56 to 57 is any amino acid
DWXXPHQANXRIXXXXXXXLXXXXXXXXXTXXXXXNXSXAXXPXAXXXXXXXGXXXXG

SEQ ID NO: 900 - protein, 46 aa, Artificial sequence
  protein pattern
  Variant (3)..(3): Xaa in position 3 is Ile, Leu or Val
  Variant (4)..(4): Xaa in position 4 is Ala, Gly, Asn, Gln or Ser
  Variant (6)..(6): Xaa in position 6 is Ala or Val
  Variant (8)..(8): Xaa in position 8 is Ala, Ser or Thr
  Variant (11)..(12): Xaa in position 11 to 12 is any or no amino acid
  Variant (14)..(14): Xaa in position 14 is Leu, Met or Val
  Variant (15)..(15): Xaa in position 15 is Ala, Asp, Gly, Ser or Thr
  Variant (16)..(16): Xaa in position 16 is any amino acid
  Variant (18)..(20): Xaa in position 18 to 20 is any amino acid
  Variant (21)..(21): Xaa in position 21 is Ile, Leu or Val
  Variant (22)..(22): Xaa in position 22 is any amino acid
  Variant (23)..(23): Xaa in position 23 is Ala, Gly, Asn, Ser or Thr
  Variant (24)..(24): Xaa in position 24 is Glu or Gly
  Variant (25)..(28): Xaa in position 25 to 28 is any amino acid
  Variant (29)..(29): Xaa in position 29 is Ala, Ile or Val
  Variant (30)..(30): Xaa in position 30 is Phe, Ile or Leu
  Variant (31)..(32): Xaa in position 31 to 32 is Ile or Val
  Variant (34)..(34): Xaa in position 34 is Ala, Ser, Thr or Val
  Variant (35)..(35): Xaa in position 35 is Asp or Glu
  Variant (36)..(37): Xaa in position 36 to 37 is any amino acid
  Variant (38)..(38): Xaa in position 38 is Ala, Ser or Thr
  Variant (39)..(39): Xaa in position 39 is His, Lys or Arg
  Variant (40)..(41): Xaa in position 40 to 41 is any amino acid
  Variant (42)..(42): Xaa in position 42 is Asp, Glu or Asn
  Variant (43)..(44): Xaa in position 43 to 44 is any amino acid
FDXXAXCXGFXXAXXXAXXXXXXXXXXXXXXXGXXXXXXXXXXXDR

SEQ ID NO: 901 - protein, 33 aa, Artificial sequence
  protein pattern
  Variant (2)..(6): Xaa in position 2 to 6 is any amino acid
  Variant (7)..(8): Xaa in position 7 to 8 is any or no amino acid
  Variant (10)..(11): Xaa in position 10 to 11 is any amino acid
  Variant (12)..(12): Xaa in position 12 is any or no amino acid
  Variant (14)..(14): Xaa in position 14 is Ile, Leu or Met
  Variant (15)..(15): Xaa in position 15 is Ala, Asp, Glu, Asn, Gln or Thr
  Variant (16)..(16): Xaa in position 16 is any amino acid
  Variant (18)..(18): Xaa in position 18 is any amino acid
  Variant (19)..(19): Xaa in position 19 is Ile, Leu or Val
  Variant (20)..(23): Xaa in position 20 to 23 is any amino acid
  Variant (24)..(24): Xaa in position 24 is Ile, Leu or Val
  Variant (25)..(25): Xaa in position 25 is Asp, Glu or Gly
  Variant (26)..(26): Xaa in position 26 is Phe, Leu or Met
  Variant (27)..(28): Xaa in position 27 to 28 is Ile, Leu or Val
  Variant (29)..(29): Xaa in position 29 is any amino acid
  Variant (30)..(30): Xaa in position 30 is Ala, Cys or Gly
  Variant (32)..(32): Xaa in position 32 is any amino acid
  Variant (33)..(33): Xaa in position 33 is Ser or Thr
TXXXXXXXAXXXAXXXAXXXXXXXXXXXXXTXX

SEQ ID NO: 902 - protein, 20 aa, Artificial sequence
  protein pattern
  Variant (2)..(2): Xaa in position 2 is Asn, Ser or Thr
  Variant (7)..(8): Xaa in position 7 to 8 is any or no amino acid
  Variant (10)..(10): Xaa in position 10 is any amino acid
  Variant (11)..(12): Xaa in position 11 to 12 is any or no amino acid
  Variant (14)..(14): Xaa in position 14 is Ile, Met or Val
  Variant (15)..(16): Xaa in position 15 to 16 is any amino acid
  Variant (18)..(19): Xaa in position 18 to 19 is any amino acid
  Variant (20)..(20): Xaa in position 20 is Ala, Leu or Val
TXDEWIXXRXXXGXXXRXXX

SEQ ID NO: 903 - protein, 20 aa, Artificial sequence
  protein pattern
  Variant (2)..(2): Xaa in position 2 is any amino acid
  Variant (4)..(4): Xaa in position 4 is any amino acid
  Variant (5)..(5): Xaa in position 5 is Ala, Asp, Glu, Gly or Thr
  Variant (6)..(6): Xaa in position 6 is Thr or Val
  Variant (9)..(9): Xaa in position 9 is any amino acid
  Variant (12)..(13): Xaa in position 12 to 13 is any amino acid
  Variant (14)..(18): Xaa in position 14 to 18 is any or no amino acid
  Variant (20)..(20): Xaa in position 20 is Ala, Asp, Glu, Gly, Gln or Ser
MXGXXXFKXAVXXXXXXXLX

SEQ ID NO: 904 - protein, 14 aa, Artificial sequence
  protein pattern
  Variant (2)..(2): Xaa in position 2 is Gly or Ser
  Variant (3)..(3): Xaa in position 3 is Phe or Tyr
  Variant (4)..(4): Xaa in position 4 is Ile, Leu or Val
  Variant (6)..(9): Xaa in position 6 to 9 is any amino acid
  Variant (10)..(10): Xaa in position 10 is Ser or Thr
  Variant (12)..(13): Xaa in position 12 to 13 is any amino acid
GXXXPXXXXXNXXL

SEQ ID NO: 905 - protein, 12 aa, Artificial sequence
  protein pattern
  Variant (3)..(3): Xaa in position 3 is Ala or Ser
  Variant (4)..(4): Xaa in position 4 is Ala, Ser, Thr or Val
  Variant (6)..(6): Xaa in position 6 is Ala, Cys, Thr or Val
  Variant (7)..(7): Xaa in position 7 is any amino acid
  Variant (8)..(8): Xaa in position 8 is Ile, Leu or Val
  Variant (10)..(11): Xaa in position 10 to 11 is any amino acid
FPXXAXXXQXXL

SEQ ID NO: 906 - protein, 15 aa, Artificial sequence
  protein pattern
  Variant (2)..(2): Xaa in position 2 is Ile, Leu or Met
  Variant (3)..(3): Xaa in position 3 is Glu or Gln
  Variant (4)..(4): Xaa in position 4 is Ala, Gly or Ser
  Variant (5)..(5): Xaa in position 5 is Phe, Ile, Met or Val
  Variant (7)..(7): Xaa in position 7 is Ala or Gly
  Variant (9)..(9): Xaa in position 9 is any amino acid
  Variant (10)..(10): Xaa in position 10 is Ala or Thr
  Variant (13)..(13): Xaa in position 13 is Ala or Ser
  Variant (14)..(14): Xaa in position 14 is any amino acid
  Variant (15)..(15): Xaa in position 15 is Leu or Val
LXXXXGXGXXWGXXX

SEQ ID NO: 907 - DNA, 405 bp, Escherichia coli K12
  CDS (1)..(405): transl_table=11
atggatcaggtcgttgtttttcaaaagatgtttgagcaagtgagaaaagagcaaaacttctcctggttttattcagaattaaaacatcaccgtattgcacattacatttattatctggctacggataacatcagaattattactcacgatgatacggttttgttattaagaggaaccaggaacctgttaaaagttagtacgaccaagaaccctgctaaaataaaagaggccgcattgcttcatatttgcggaaaatctacatttcgggaatactgttcaacactggcaggcgcgggcgttttccggtgggttactgatgttaatcataacaaacgcagttactacgccattgataatacgcttttatatattgaagatgtagaaaataataaaccattaatctag

SEQ ID NO: 908 - protein, 134 aa, Escherichia coli K12
MDQVVVFQKMFEQVRKEQNFSWFYSELKHHRIAHYIYYLATDNIRIITHDDTVLLLRGTRNLLKVSTTKNPAKIKEAALLHICGKSTFREYCSTLAGAGVFRWVTDVNHNKRSYYAIDNTLLYIEDVENNKPLI

SEQ ID NO: 909 - DNA, 453 bp, Escherichia coli O157:H7 EDL933
  CDS (1)..(453): transl_table=11
atgcaaactacgcgccctcgtatcacatggaaggttttaccaatggctcaggttgccatttttaaagaaatattcgatcaagtgcgaaaagatttaaactgtgaattgttttattctgaactaaaacgtcacaatgtctcacattatatttactatctagccacagataatattcacattgtgttagaaaacgataacactgtgttaataaaaggacttaaaaaggttgtgaatgttaaattctcaagaaatacgcatcttatagaaacgtcctatgataggttgaaatcaagagaaatcacatttcagcaatacagggaaaatcttgctaaagcaggagttttccgatgggttacaaatatccacgaacataaaagatattactatgcctttgataattcattactatttactgagagcattcagaacactacacaaatctttccacgctaa

SEQ ID NO: 910 - protein, 150 aa, Escherichia coli O157:H7 EDL933
MQTTRPRITWKVLPMAQVAIFKEIFDQVRKDLNCELFYSELKRHNVSHYIYYLATDNIHIVLENDNTVLIKGLKKVVNVKFSRNTHLIETSYDRLKSREITFQQYRENLAKAGVFRWVTNIHEHKRYYYAFDNSLLFTESIQNTTQIFPR

SEQ ID NO: 911 - DNA, 411 bp, Escherichia coli K12
  CDS (1)..(411): transl_table=11
atggctcaggttgccatttttaaagaaatattcgatcaagtgcgaaaagatttaaactgtgaattgttttattctgaactaaaacgtcacaatgtctcacattatatttactatctagccacagataatattcacattgtgttagaaaacgataacaccgtgttaataaaaggacttaaaaaggttgtaaatgttaaattctcaagaaatacgcatcttatagaaacgtcctatgataggttgaaatcaagagaaatcacatttcagcaatacagggaaaatcttgctaaagcaggagttttccgatggattacaaatatccacgaacataaaagatattactatacctttgataattcattactatttactgagagcattcagaacactacacaaatctttccacgctaa

SEQ ID NO: 912 - protein, 136 aa, Escherichia coli K12
MAQVAIFKEIFDQVRKDLNCELFYSELKRHNVSHYIYYLATDNIHIVLENDNTVLIKGLKKVVNVKFSRNTHLIETSYDRLKSREITFQQYRENLAKAGVFRWITNIHEHKRYYYTFDNSLLFTESIQNTTQIFPR

SEQ ID NO: 913 - DNA, 396 bp, Salmonella enterica subsp. enterica serovar Typhi str. CT18
  CDS (1)..(396): transl_table=11
atggaattacagcttatgcttaaccactttttcgagcgtgtcagaaaggatgcaaatttcaacgcatttctaatcgatctggaatataataatatcgcttattacatctattttgttgctaccggtaatgtgaaaattatcactcatgcaggccatttcatttctattaaaagcaatagaaagctgattaaagtcaattcaacaccaaatacgcaattaataaaattgacttcagctaaacacttttcgggcgagcattcctatgaaaaatactgtaccgatctggcaacggcaggcgtttttaaatggattgtggaattaaacaaaaaaactcgacaatactggtcgaaagacaaccaattattatatatagaaaatgtggtcatgccgctttaa

SEQ ID NO: 914 - protein, 131 aa, Salmonella enterica subsp. enterica serovar Typhi str. CT18
MELQLMLNHFFERVRKDANFNAFLIDLEYNNIAYYIYFVATGNVKIITHAGHFISIKSNRKLIKVNSTPNTQLIKLTSAKHFSGEHSYEKYCTDLATAGVFKWIVELNKKTRQYWSKDNQLLYIENVVMPL

SEQ ID NO: 915 - DNA, 396 bp, Salmonella typhimurium LT2
  CDS (1)..(396): transl_table=11
atggaattacagcttatgcttaaccactttttcgagcgcgtcagaaaggatgcaaatttcaacgcatttctaatcgatctggaatataataatatcgcttattacatctattttgttgctaccggcaatgtgaaaattatcactcatgcaggccacttcatttctattaaaagcaatagaaagctgattaaagtcaattcaacaccgaatacgcaattaataaaattgatttcagctaaacacttttcgggggagcattcctatgaaaaatactgtactgatctggcaacggcaggcgtttttaaatggattgttgaattaaaccaaaaaactcgacaatactggtcgaaagacaaccaattattatatatagaaaatgtggtcatgccgctttaa

SEQ ID NO: 916 - protein, 131 aa, Salmonella typhimurium LT2
MELQLMLNHFFERVRKDANFNAFLIDLEYNNIAYYIYFVATGNVKIITHAGHFISIKSNRKLIKVNSTPNTQLIKLISAKHFSGEHSYEKYCTDLATAGVFKWIVELNQKTRQYWSKDNQLLYIENVVMPL

SEQ ID NO: 917 - DNA, 426 bp, Escherichia coli CFT073
  CDS (1)..(426): transl_table=11
atggaaggtttatctatggatcaggtagtcatttttaaacaaatatttgataaagttcgaaacgatttaaactatcaatggttttattctgagctaaaacgtcacaatgtctcacattacatttactatttagccacagagaatgttcatattgtattaaaaaatgataatacagtgttattaaagggcctaaaaaacattgtgtctgtcaaattttcaaaggataggcatcttatagaaacgacctctaataagctgaaatccagagagatcacatttcaggaatacagaagaaaccttgctaaagcaggagtttttcggtgggttacaaatatccacgaacaaaaaagatattactatacctttgataattcattactctttactgaaaacatacagagcacatcacaaatgtttccacactaa

SEQ ID NO: 918 - protein, 141 aa, Escherichia coli CFT073
MEGLSMDQVVIFKQIFDKVRNDLNYQWFYSELKRHNVSHYIYYLATENVHIVLKNDNTVLLKGLKNIVSVKFSKDRHLIETTSNKLKSREITFQEYRRNLAKAGVFRWVTNIHEQKRYYYTFDNSLLFTENIQSTSQMFPH

SEQ ID NO: 919 - DNA, 453 bp, Escherichia coli
  CDS (1)..(453): transl_table=11
atgcaaactacgcgccctcgtatcacatggaaggttttaccaatggctcaggttgccatttttaaagaaatattcgatcaagtgcgaaaagatttaaactgtgaattgttttattctgaactaaaacgtcacaatgtctcacattatatttactatctagccacagataatattcacatcgtgttagaaaacgataacaccgtgttaataaaaggacttaaaaaggttgtaaatgttaaattctcaagaaatacgcatcttatagaaacgtcctatgataggttgaaatcaagagaaatcacatttcagcaatacagggaaaatcttgctaaagcaggagttttccgatggattacaaatatccacgaacataaaagatattactatacctttgataattcattactatttactgagagcattcagaacactacacaaatctttccacgctaa

SEQ ID NO: 920 - protein, 150 aa, Escherichia coli
MQTTRPRITWKVLPMAQVAIFKEIFDQVRKDLNCELFYSELKRHNVSHYIYYLATDNIHIVLENDNTVLIKGLKKVVNVKFSRNTHLIETSYDRLKSREITFQQYRENLAKAGVFRWITNIHEHKRYYYTFDNSLLFTESIQNTTQIFPR

SEQ ID NO: 921 - DNA, 411 bp, Escherichia coli
  CDS (1)..(411): transl_table=11
atggatcaggtagtcatttttaaacaaatatttgataaagttcgaaacgatttaaactatcaatggttttattctgagctaaaacgtcacaatgtctcacattacatttactatttagccacagagaatgttcatattgtattaaaaaatgataatacagtgttattaaagggcctaaaaaacattgtgtctgtcaaattttcaaaggataggcatcttatagaaacgacctctaataagctgaaatccagagagatcacatttcaggaatacagaagaaaccttgctaaagcaggagtttttcggtgggttacaaatatccacgaacaaaaaagatattactatacctttgataattcattactatttactgaaagcatccagaaaactacacagatcttaccacgctaa

SEQ ID NO: 922 - protein, 136 aa, Escherichia coli
MDQVVIFKQIFDKVRNDLNYQWFYSELKRHNVSHYIYYLATENVHIVLKNDNTVLLKGLKNIVSVKFSKDRHLIETTSNKLKSREITFQEYRRNLAKAGVFRWVTNIHEQKRYYYTFDNSLLFTESIQKTTQILPR

SEQ ID NO: 923 - DNA, 25 bp, Artificial sequence
  primer
atggatcaggtcgttgtttttcaaa

SEQ ID NO: 924 - DNA, 28 bp, Artificial sequence
  primer
ttagattaatggtttattattttctaca

SEQ ID NO: 925 - protein, 125 aa, Artificial sequence
  consensus sequence
  Variant (2)..(10): Xaa in position 2 to 10 is any amino acid
  Variant (12)..(13): Xaa in position 12 to 13 is any amino acid
  Variant (16)..(16): Xaa in position 16 is any amino acid
  Variant (18)..(18): Xaa in position 18 is any amino acid
  Variant (20)..(22): Xaa in position 20 to 22 is any amino acid
  Variant (24)..(26): Xaa in position 24 to 26 is any amino acid
  Variant (28)..(30): Xaa in position 28 to 30 is any amino acid
  Variant (32)..(34): Xaa in position 32 to 34 is any amino acid
  Variant (38)..(39): Xaa in position 38 to 39 is any amino acid
  Variant (42)..(42): Xaa in position 42 is any amino acid
  Variant (44)..(45): Xaa in position 44 to 45 is any amino acid
  Variant (47)..(56): Xaa in position 47 to 56 is any amino acid
  Variant (58)..(64): Xaa in position 58 to 64 is any amino acid
  Variant (66)..(72): Xaa in position 66 to 72 is any amino acid
  Variant (75)..(82): Xaa in position 75 to 82 is any amino acid
  Variant (84)..(84): Xaa in position 84 is any amino acid
  Variant (86)..(90): Xaa in position 86 to 90 is any amino acid
  Variant (92)..(94): Xaa in position 92 to 94 is any amino acid
  Variant (97)..(97): Xaa in position 97 is any amino acid
  Variant (102)..(102): Xaa in position 102 is any amino acid
  Variant (104)..(111): Xaa in position 104 to 111 is any amino acid
  Variant (113)..(113): Xaa in position 113 is any amino acid
  Variant (115)..(117): Xaa in position 115 to 117 is any amino acid
  Variant (120)..(120): Xaa in position 120 is any amino acid
  Variant (123)..(124): Xaa in position 123 to 124 is any amino acid
MXXXXXXXXXFXXVRXDXNXXXFXXXLXXXNXXXYIYXXATXNXXIXXXXXXXXXXKXXXXXXXVXXXXXXXLIXXXXXXXXSXEXXXXXYXXXLAXAGVFXWXXXXXXXXRXYXXXDNXLLXXE

SEQ ID NO: 926 - protein, 9 aa, Artificial sequence
  protein pattern
  Variant (3)..(3): Xaa in position 3 is any amino acid
  Variant (8)..(8): Xaa in position 8 is Lys or Arg
LAXAGVFXW

SEQ ID NO: 927 - DNA, 1542 bp, Escherichia coli K12
  CDS (1)..(1542): transl_table=11
atggagatctcctggggccgcgcgctatggcgcaattttttgggccagtcccccgactggtacaaactcgccctcatcattttcttaatcgtaaacccgttaattttcctcatcagccctttcgtcgcgggctggttgctggtagcggaatttattttcactctggcgatggccctgaaatgctacccgctgctccccggtggtctgttggctatcgaagcggtattcatcggcatgaccagcgcggaacacgtccgtgaagaggtggcggcaaatcttgaagtcttgctgttactgatgtttatggtggcgggtatctattttatgaaacagctgttgctgttcatatttacccgtttgctgttaagcattcgctccaaaatgctgctgtcgctctctttttgcgtggcggctgcgttcctctccgcgttcctcgatgccttaaccgtcgtggcggtggtgatcagcgttgcagtcggtttttatggtatttatcaccgcgtagcctcttcccgtaccgaagacaccgacctgcaagacgatagtcatatcgacaagcattacaaagtggttctggaacagttccgtggctttctgcgtagcctgatgatgcatgccggtgtcggcaccgcattaggcggcgtaatgaccatggtgggcgaaccacagaacctgatcatcgctaaagcggctggctggcattttggcgatttcttcctgcgcatgtcgccggtgaccgttccggttctgatttgtggcctgttaacctgcctgctggtagagaagctgcgttggtttggctacggtgaaacgctgccggagaaagtccgcgaagtgttgcaacagtttgacgatcaaagccgccaccagcgtacccgtcaggataaaatccgtctgattgtccaggcgattattggcgtctggctggtgactgcgctggcgttgcatctggcggaagttggcttgattggtttgtcagtcattattctggcaacatcattgaccggtgtcaccgatgagcatgctatcggtaaagccttcaccgaatctctgccattcaccgcactgttgacggtgtttttctcggtagtcgcggtgattatcgaccaacaactgttttcgccaattattcagtttgtgttgcaggcatcggaacatgctcagctgtcgctgttctatattttcaacggtctgctgtcatccatttcggataacgtcttcgtggggacgatttatatcaacgaagcgaaagcggcaatggaaagtggcgctatcacgttgaagcaatacgagctgctggcggtcgccattaataccggtaccaatctgccctccgtcgctacgccgaacggtcaggctgcgttcctgttcctgctgacctctgcactcgcgccattgattcgcctctcttatggccgcatggtgtggatggccctgccttacaccctcgtcctgacactcgtcggcttgctctgcgtcgagtttacgcttgcccctgtaaccgaatggtttatgcaaatgggctggatagcaacgctttga

SEQ ID NO: 928 - protein, 513 aa, Escherichia coli K12
MEISWGRALWRNFLGQSPDWYKLALIIFLIVNPLIFLISPFVAGWLLVAEFIFTLAMALKCYPLLPGGLLAIEAVFIGMTSAEHVREEVAANLEVLLLLMFMVAGIYFMKQLLLFIFTRLLLSIRSKMLLSLSFCVAAAFLSAFLDALTVVAVVISVAVGFYGIYHRVASSRTEDTDLQDDSHIDKHYKVVLEQFRGFLRSLMMHAGVGTALGGVMTMVGEPQNLIIAKAAGWHFGDFFLRMSPVTVPVLICGLLTCLLVEKLRWFGYGETLPEKVREVLQQFDDQSRHQRTRQDKIRLIVQAIIGVWLVTALALHLAEVGLIGLSVIILATSLTGVTDEHAIGKAFTESLPFTALLTVFFSVVAVIIDQQLFSPIIQFVLQASEHAQLSLFYIFNGLLSSISDNVFVGTIYINEAKAAMESGAITLKQYELLAVAINTGTNLPSVATPNGQAAFLFLLTSALAPLIRLSYGRMVWMALPYTLVLTLVGLLCVEFTLAPVTEWFMQMGWIATL

SEQ ID NO: 929 - DNA, 1593 bp, Vibrio cholerae O1 biovar eltor str. N16961
  CDS (1)..(1593): transl_table=11
atgccgatgtccctcggaaacgcgtttatcaagaatttccttggtaaagcgcctgattggtacaaagttgccatcattgcttttcttattattaacccaatagtgttcttctttattaatcccttcctcgcgggttggttattagtggttgagtttatttttactctggccatggcactgaaatgctaccctctacaaccgggtggtttacttgcgattgaagcgattgcgattgggatgacaagtccggggcaagttaagcatgaactggttgccaatatcgaggtattgctactgttggtgtttatggtggcaggcatctattttatgaagcaactgctgctgtttattttcactaaaattctgcttggcattcgctccaaagttctcctttcgatagcctttagtgttacggcagcgtttctctctgccttcctagatgcgctgacagtgattgcggtcatcatcagtgtggcggtgggtttctactcgatttatcacaaggttgcttcgggtcaaagtgttcactcttctcacgatcacacccatgatgaaggtatttcagaattaactcgtgatgacttagaaaactatcgtgcatttttacgttcactgctgatgcacgcaggtgtgggtacagcactgggtggtgtcaccactatggtcggtgaaccacaaaacctgatcattgctgaccaagcaggctggcaatttggtgagttcctactccgcatggcccccgttaccgtacccgtgtttattgcaggtatgctgacctgtatgttggttgagaaattccgcatttttggctacggagctcgtcttcctgccaatgttcgtcaaattctgctcgattttgactcagaagagcgcaaaaaccgcacaaaccaagacgttgccaaactctgggtgcaaggtgctatcgcggtttggttgattgtgggcttagctcttcacttagccgccgttggtcttattggtttgtcggtgattattctcgccacagcttttactggtgtgattgaagaacattcgctaggtaaagcgtttgaagaagcgctaccgtttaccgcattgctggcggttttcttctcgattgttgcagttattatcgaccaagagctgttcaaacccgtgattgatgcggtactaaatgtcgaagaccatggcactcagctcgcactcttctatgtggcgaatggtctactttccatggtgtcagacaacgtgtttgtggggacggtttacatcactgaagtaaaaaccgcactgatggaaggcatgatttcacgtgaccaatttgatttgttggccgtcgccatcaataccggcaccaacttaccttcagtagccacaccgaacggtcaagcggccttcttattcttgctcacttcggctttggcgccactaatccgtctctcttacggtcgtatggtcatcatggcgtttccttatacgctggcgctttcactggttggttttattggcatcatgttcttacttgagccaatgactgaagtgttctatagcctaggttggatcagccatcatgtcgcgccagctgcagatgcactactgcaaagtggccactaa

SEQ ID NO: 930 - protein, 530 aa, Vibrio cholerae O1 biovar eltor str. N16961
MPMSLGNAFIKNFLGKAPDWYKVAIIAFLIINPIVFFFINPFLAGWLLVVEFIFTLAMALKCYPLQPGGLLAIEAIAIGMTSPGQVKHELVANIEVLLLLVFMVAGIYFMKQLLLFIFTKILLGIRSKVLLSIAFSVTAAFLSAFLDALTVIAVIISVAVGFYSIYHKVASGQSVHSSHDHTHDEGISELTRDDLENYRAFLRSLLMHAGVGTALGGVTTMVGEPQNLIIADQAGWQFGEFLLRMAPVTVPVFIAGMLTCMLVEKFRIFGYGARLPANVRQILLDFDSEERKNRTNQDVAKLWVQGAIAVWLIVGLALHLAAVGLIGLSVIILATAFTGVIEEHSLGKAFEEALPFTALLAVFFSIVAVIIDQELFKPVIDAVLNVEDHGTQLALFYVANGLLSMVSDNVFVGTVYITEVKTALMEGMISRDQFDLLAVAINTGTNLPSVATPNGQAAFLFLLTSALAPLIRLSYGRMVIMAFPYTLALSLVGFIGIMFLLEPMTEVFYSLGWISHHVAPAADALLQSGH

SEQ ID NO: 931 - DNA, 1542 bp, Pasteurella multocida subsp. multocida str. Pm70
  CDS (1)..(1542): transl_table=11
atgagttatactcaagcattcctaagaaatttcttaggaacaagtcctaattggtacaaaatcacaattgtccttttccttatcataaaccctataatcttcttctttatcagtccctttattgccggttggctcttagttgctgaattcattctgactctcgccatggcactgaaatgttaccctcttcaacccggtggtttactggcattagaagccgtggcgattggtatgacccatccagaacacgtgaaagccgaaatcatagcaaacttcgaagtcatcctactattgatctttatggttgcagggatttattttatgaagcggttattgctgtttgtttttacaaaattacttttaagtattcgttcaaaaatggtgttatcccttgctttctgtttaagtgcggcctttttatcggcttttctcgatgctttaactgtggtagccgtgatcatcagtgtaggtatggggttctatggggtatatcataaagttgcttcaggcaataatttcaacgactccactgatattaccaaagacgataaaattggtgaaaataaagacacgttagaacaattccgtgctttcttacgcagcttaatgatgcattcttgtgtaggaaccgcattaggtggtgtcatgactatggtcggtgaaccccaaaacttaatcattgcagaacaagccaaatgggcatttggggaattcttcttacgtatgctcccagtcacgttgccagttctcatttgtggtttagtgacctgcttcttagtggaaaaatttggtgtatttggctatggcgccaaattgccacgtaaagtatggggcatcttggcaaagtttgatcgcaataatcaacaaaaaatgtcgcaacaagatcgtttgaaactttttgtgcaagctttaattggtatttggttggttgttggactcgcattccatctcgccgccgtcggtatcattggtttaacggtgattattttggctacttcattttgtggtgtcaccagcgagcatgctattggtaaagcctttcaggaatccttacccttcacagcattgttagtggtgttcttctcggttgttgccgtcatcattgaccaacatctgtttgcgccaattattcagtttgtgctggcggccagtgaacatactcagcttgccctgttctatatttttaacggtttgttatccgccatttcagataatgtgtttgtggccacagtttatatcaatgaaaccaaagcggcattagaggctggcttaattgctcaaccacaatatgaattactggcagtagcaattaataccggtaccaatcttccttctgttgcaaccccaaatggtcaagccgcattcttatttttattgacctcatcactggcaccattgattcgtctttcttatggtagaatggtttatatggcattgccttataccatcgtattatcctgtattggtttattggctgtggaatatattttgcctggcgcaaccaatgtgctcattcaaattggtttattaaaaccaatgtaa

SEQ ID NO: 932 - protein, 513 aa, Pasteurella multocida subsp. multocida str. Pm70
MSYTQAFLRNFLGTSPNWYKITIVLFLIINPIIFFFISPFIAGWLLVAEFILTLAMALKCYPLQPGGLLALEAVAIGMTHPEHVKAEIIANFEVILLLIFMVAGIYFMKRLLLFVFTKLLLSIRSKMVLSLAFCLSAAFLSAFLDALTVVAVIISVGMGFYGVYHKVASGNNFNDSTDITKDDKIGENKDTLEQFRAFLRSLMMHSCVGTALGGVMTMVGEPQNLIIAEQAKWAFGEFFLRMLPVTLPVLICGLVTCFLVEKFGVFGYGAKLPRKVWGILAKFDRNNQQKMSQQDRLKLFVQALIGIWLVVGLAFHLAAVGIIGLTVIILATSFCGVTSEHAIGKAFQESLPFTALLVVFFSVVAVIIDQHLFAPIIQFVLAASEHTQLALFYIFNGLLSAISDNVFVATVYINETKAALEAGLIAQPQYELLAVAINTGTNLPSVATPNGQAAFLFLLTSSLAPLIRLSYGRMVYMALPYTIVLSCIGLLAVEYILPGATNVLIQIGLLKPM

SEQ ID NO: 933 - DNA, 1503 bp, Pseudomonas aeruginosa PAO1
  CDS (1)..(1503): transl_table=11
gtgagcagtcccctgagccaggctttcgcacagaacttcctcgggcattcgccgcgctggtacaagctgacggtgctcgccttcctcttgctcaaccccctgctgctatggctggccgggccggtgacaagcgcctgggtgctggtcggcgagttcatcttcaccctggccatggcgctgaaatgctatccgctacagccgggtggcctgttggtgctggaggcgctgctgcttggcctggctacccccgaggcgctctatgcggaattgcagcacaacttcccggtgctcctgctgctgatgttcatggtcgccggcatctacttcatgaaggacctgctgctcctgctgttttcccgcctgctgctcggcgtgcgctcgaagaccctgctatcgctcctgttctgcctgctggccgccctcctctcggccttcctcgacgccctcaccgtgaccgccgtggtgatcagcgtggcggtggcattcttcgccgtgtatcaccgggtcgcttcggggcagcgcgccagcgaggactacgatcccgccaccgaccgccaggtccccgagctgcaccgggcccatctcgaggaattccgcgccttcctccgcagcctgctcatgcacgcggcggtcggcaccgcgctgggcggcgtctgcaccctggtgggagagccgcagaacctgctgatcggccacgaggccggctggcatttcgtcgagttcttccgccaggtcgcgccggtatccatgccggtactggcggccggcctgctgacctgcgtgctgctggagaagagccgccgcttcggctatggcgcccagttgccggcggcggtgcgccaggtgctcgccgagtacgccgccagcgaaagccgcaaacgcggagcgcagcagaaggccgcgctgctggtgcaggccctggcggcgctggtactgatcgtcgggctggccctgcatgtcgccgaggtcggcctgatcggcctgttggtgatcgtgctgatcactgccttcaccggcgtcaccgacgaacaccagatcggccgcgccttccaggaggccctgccgttcactgcgctgctggtggtgttcttcgcggtggtcgcggtgatccaccagcagcacctgttcaccccgatcatccaggcggtgctggcgctgccggcggaacgccagccgggcatgctgttcatcgccaacggcctgctctcggcgatcagcgacaacgtattcgtcgccaccatctacatcaccgaggtgaaacaggcgctggatgccggccacatgagccgcgagcatttcgataccctggcggtggcgatcaataccggcaccaacctgcccagcgtagcgacgcccaacggccaggcggcgttcctcttcctgctgacctcctccatcgccccgctggtgcgcctgtcgtacggccgcatggtctggatggcgctaccctacaccctggtgatgggcggcctgggctggtgggcggtcagtcattggctttga

SEQ ID NO: 934 - protein, 500 aa, Pseudomonas aeruginosa PAO1
MSSPLSQAFAQNFLGHSPRWYKLTVLAFLLLNPLLLWLAGPVTSAWVLVGEFIFTLAMALKCYPLQPGGLLVLEALLLGLATPEALYAELQHNFPVLLLLMFMVAGIYFMKDLLLLLFSRLLLGVRSKTLLSLLFCLLAALLSAFLDALTVTAVVISVAVAFFAVYHRVASGQRASEDYDPATDRQVPELHRAHLEEFRAFLRSLLMHAAVGTALGGVCTLVGEPQNLLIGHEAGWHFVEFFRQVAPVSMPVLAAGLLTCVLLEKSRRFGYGAQLPAAVRQVLAEYAASESRKRGAQQKAALLVQALAALVLIVGLALHVAEVGLIGLLVIVLITAFTGVTDEHQIGRAFQEALPFTALLVVFFAVVAVIHQQHLFTPIIQAVLALPAERQPGMLFIANGLLSAISDNVFVATIYITEVKQALDAGHMSREHFDTLAVAINTGTNLPSVATPNGQAAFLFLLTSSIAPLVRLSYGRMVWMALPYTLVMGGLGWWAVSHWL

SEQ ID NO: 935 - DNA, 1575 bp, Yersinia pestis CO92
  CDS (1)..(1575): transl_table=11
atggacattaccaacagacaagctgtactcaagaattttcttggtaactctccggattggtacaaactagcaattatggggttcttgatcattaaccctctagtcttcttctttgtcagcccctttgtcgcgggctggatgctggttatcgagtttatctttaccttagccatggcgctgaaatgttacccgctgcaaccggggggtttgctcgctattcaagccgttgccatcggcatgaccagcccgcatcaagttgcagaagagatcgccaataacctggaagtcctcttgcttttagtatttatggtggccggcatctactttatgaaacagctgctgctgtttgtatttacgaaattgctgttgaatattcggtcaaaaactatcctttccctggccttttgtctggcgtcagccttcctatcagcatttttggatgccttaaccgtaatcgcggtagttatcagcgtatccgttggtttttatactatttatcataacgttacttcaaatcacagtgacaaagatattactgatgacagcggaatcgataatcaggacagccatgaaacattagagcaattccgggcatttttacgcagtctgatgatgcatgctggcgtgggtaccgctctggggggcgtcatgacaatggttggtgagcctcagaatttgattattgccaaaagcgcgggttggaattttgctgacttctttattcgcatgttacccgtcaccttacccgtctttattttcgggttattggtctgcttgctggtcgaaaaatttaaactgtttggttatggtgcccagttgccagaacgtgtgcgtcaggttctgaccgaatacgatcagcaagccaatgcgaaacggaccaagcaagagaagatgaagttaatagtacaagccattattggtgtctggttggtattggcactggcactccatttagctgaagtcggtttggtcgggctatccgttattattctcgccacctcattttgtggtatcacaaatgagcattcattgggcaaagcctttcaggaagccttgccgtttaccgcgctgctaaccgtattttttgccgtggtcgcggttattattgaacaaagcctctttacccccattattcagtttgttttacaagcctcgccttccgctcagctatcgctgttttatctgtttaatggcttgctctcatcggtgtcagacaatgtttttgtcggtaccgtgtatatcaatgaggcccgttctgcgtttgagcatggtattgtctcgttacaacaatttgaattgttggcggtcgccatcaatacagggaccaacctcccctccgtggcgacaccaaacggccaggccgctttcttgttcctgctgacttcggcattggcaccactaattcgcctttcctatgggcgaatggtatatatggctttgccttatactctagtgatgacgattgttggcctgctgggtgtcgagtttttattggtaccgatgacagagtggctgactcaggctggatggatcagtttgccacacatcacaaacggggttgccatcccacactga

SEQ ID NO: 936 - protein, 524 aa, Yersinia pestis CO92
MDITNRQAVLKNFLGNSPDWYKLAIMGFLIINPLVFFFVSPFVAGWMLVIEFIFTLAMALKCYPLQPGGLLAIQAVAIGMTSPHQVAEEIANNLEVLLLLVFMVAGIYFMKQLLLFVFTKLLLNIRSKTILSLAFCLASAFLSAFLDALTVIAVVISVSVGFYTIYHNVTSNHSDKDITDDSGIDNQDSHETLEQFRAFLRSLMMHAGVGTALGGVMTMVGEPQNLIIAKSAGWNFADFFIRMLPVTLPVFIFGLLVCLLVEKFKLFGYGAQLPERVRQVLTEYDQQANAKRTKQEKMKLIVQAIIGVWLVLALALHLAEVGLVGLSVIILATSFCGITNEHSLGKAFQEALPFTALLTVFFAVVAVIIEQSLFTPIIQFVLQASPSAQLSLFYLFNGLLSSVSDNVFVGTVYINEARSAFEHGIVSLQQFELLAVAINTGTNLPSVATPNGQAAFLFLLTSALAPLIRLSYGRMVYMALPYTLVMTIVGLLGVEFLLVPMTEWLTQAGWISLPHITNGVAIPH

SEQ ID NO: 937 - DNA, 1545 bp, Haemophilus influenzae Rd KW20
  CDS (1)..(1545): transl_table=11
atgacaaacattcaggcttttatgaaaaactttcttggggcaagtccagaatggtacaaacttgccattgtggtttttcttattataaatccaattgttttcttttttattagtccttttattgcgggttggttactggttgcagaatttattttcacattggcaatggcattaaaatgctaccctcttcaaccaggtggtctattagcaattgaagctattattattggaatgacaaatgccaaacacgtcaaagcagaaattatggcaaactttgaagtgatcttgctactgatatttatggtggcaggtattttctttatgaaacaattactgctttatgtatttactaaattacttgtcaaaattcgttctaaaattgcactttctattgccttttgttttagtgctgcttttttatcggcttttctcgatgctttaacggttgttgctgttatcattagtgtcgcaatgggattttatggtgtgtatcacaaagttgcatcaggcaataatttaattgatgcggttgatatttcagacgatagaaaaattattgaacaacagcacgaaatcttagaaaaattccgtgcattcttacgtagtttaatgatgcatgcgggtgtaggaactgcactcggtggtgtaatgaccgttgttggagaaccacaaaacttaattattgcagaacaagcaaaatggaactttatggaatttttcctccgtatggcacccgtgactattcctgtgtttatctgcggattactcacttgtttcttggtcgaaaaattcaaattatttggttatggcgagaaattaccagacgaagtgtggaaaatcttatcagatttagatcgcactaattcagaaaaaatgtctaaacaagataaaattaaattaggtatgcaagcgttaatcgcaatttggttaattgttggattagcattccatcttgccgcagtcggtttaattggtttaagtatcatcatttttgctacgtctttcactggtgtgacggatgaacatactatcggtaaagcctttcaggaatctttaccctttactgcattgctcgttgtattcttttctgttgttgcagtaattattgatcaaaaacttttttcaccaattattcacttcgttctttctgcggaagaaaatacacaacttgctttattctatttgtttaatggcttgctttcttctatttctgataatgtatttgttgcaacggtttatattaatgaagctaaagctgcactgactaatggagtaattgcaccgcatcaatttgaattgctttctgttgccattaatacaggtacaaacttaccatcagttgcaacaccaaatggacaagctgctttcttattcttattgacttcatcaatttcgccattaattcgcctttcttatggcagaatggtttatatggctttaccttacacgattgtactttcaatcattggtttactggctattgaatttattttaccagctgccacaatttggttagcaagtttaggtttaattttgccaatttaa

SEQ ID NO: 938 - protein, 514 aa, Haemophilus influenzae Rd KW20
MTNIQAFMKNFLGASPEWYKLAIVVFLIINPIVFFFISPFIAGWLLVAEFIFTLAMALKCYPLQPGGLLAIEAIIIGMTNAKHVKAEIMANFEVILLLIFMVAGIFFMKQLLLYVFTKLLVKIRSKIALSIAFCFSAAFLSAFLDALTVVAVIISVAMGFYGVYHKVASGNNLIDAVDISDDRKIIEQQHEILEKFRAFLRSLMMHAGVGTALGGVMTVVGEPQNLIIAEQAKWNFMEFFLRMAPVTIPVFICGLLTCFLVEKFKLFGYGEKLPDEVWKILSDLDRTNSEKMSKQDKIKLGMQALIAIWLIVGLAFHLAAVGLIGLSIIIFATSFTGVTDEHTIGKAFQESLPFTALLVVFFSVVAVIIDQKLFSPIIHFVLSAEENTQLALFYLFNGLLSSISDNVFVATVYINEAKAALTNGVIAPHQFELLSVAINTGTNLPSVATPNGQAAFLFLLTSSISPLIRLSYGRMVYMALPYTIVLSIIGLLAIEFILPAATIWLASLGLILPI

SEQ ID NO: 939 - DNA, 1545 bp, Salmonella enterica subsp. enterica serovar Typhi str. CT18
  CDS (1)..(1545): transl_table=11
atggagatctcatggggtcgcgccatgtggcgcaactttttaggccagtcgcccgactggtacaaactggcactacttgtctttttaattgttaacccattcattttcttagctaatccctttgttgctggttggctgctggtggcagagtttatcttcaccctggcgatggcgttaaagtgttaccccctgctgcccggcgggttactggccattgaagccgttatcatcggcatgaccagcgccgcccatgtacgtgaagaggttgccgccaacctggaagtcttgctgctgctgatgtttatggtggcaggcatctactttatgaagcagttattgctgtttatttttacccgtctgttactcagtatccgctcgaagatggttctgtcgctggccttttgcgtcgccgccgcattcttgtcggctttccttgacgcgcttaccgtcgttgcggtggtgatcagcgtcgccgtcggtttttacgggatttaccatcgtgtggcctcatcgcgcggcgaagagaacgatatgctggacgacagccatatcgatccgcattacaaaacggtgctggagcaattccgcggattcttgcgtagtctgatgatgcatgcaggcgtggggacggcgctgggcggcgtcatgaccatggtcggggagccgcaaaacctgatcatcgctaaagctgctggctggcatttcggcgacttctttttgcggatgtcgcctgtcaccgtcccggtactggtatgtggactgttaacctgtatgctggtcgagaaaatgcgctggtttggctatggcgaaacgttgcccgaaaaagtccgcgacgtcttgcagcaattcgacgatcaaagccgtaagaagcgcacccgccaggataaaattaaactaatagtccaggcggttattggcgtctggctggttaccgccctcgccctccatctcgcggaggtgggactgattggtctgtcggtcattattctggccaccgcgttaacgggtgtcaccgatgaacacgccatcggcaaagcgtttaccgagtcgctgccgtttactgcgctgttaaccgttttcttctctattgtggcggttattatcgatcaacatcttttcgcgccgattattcagttcgtcttgcaagcctctgaacacgcacagctaacgctgttctatctctttaacggcctgttgtcttccatctcagataacgtctttgtcggcaccatttatatcaacgaagcgaaggcggcaatggaaaacggcgcaatcagcttaaaacagtttgagctgctagctgtggccatcaataccggtactaacctgccatcggtagcgacgccaaatggtcaggcggcattcttattcctgctgacctccgcgctggcgccgttaatccgtctctcctatggccgtatggtctggatggcgttaccgtacactatcgtactgaccctgatagggctactgtgcgtcgaattcactcttgcgccggccaccgaatggatgactcaggcaggatggttagcaacgctttcgtaa

SEQ ID NO: 940 - protein, 514 aa, Salmonella enterica subsp. enterica serovar Typhi str. CT18
MEISWGRAMWRNFLGQSPDWYKLALLVFLIVNPFIFLANPFVAGWLLVAEFIFTLAMALKCYPLLPGGLLAIEAVIIGMTSAAHVREEVAANLEVLLLLMFMVAGIYFMKQLLLFIFTRLLLSIRSKMVLSLAFCVAAAFLSAFLDALTVVAVVISVAVGFYGIYHRVASSRGEENDMLDDSHIDPHYKTVLEQFRGFLRSLMMHAGVGTALGGVMTMVGEPQNLIIAKAAGWHFGDFFLRMSPVTVPVLVCGLLTCMLVEKMRWFGYGETLPEKVRDVLQQFDDQSRKKRTRQDKIKLIVQAVIGVWLVTALALHLAEVGLIGLSVIILATALTGVTDEHAIGKAFTESLPFTALLTVFFSIVAVIIDQHLFAPIIQFVLQASEHAQLTLFYLFNGLLSSISDNVFVGTIYINEAKAAMENGAISLKQFELLAVAINTGTNLPSVATPNGQAAFLFLLTSALAPLIRLSYGRMVWMALPYTIVLTLIGLLCVEFTLAPATEWMTQAGWLATLS

SEQ ID NO: 941 - DNA, 1545 bp, Salmonella typhimurium LT2
  CDS (1)..(1545): transl_table=11
atggagatctcatggggtcgcgccatgtggcgcaactttttaggccagtcgcccgactggtacaaactggcactacttgtctttttaattgttaacccattcattttcttagctaatccctttattgccggttggctgctggtggcagagtttatcttcactctggcgatggcgttaaagtgttaccccctgctgcccggcgggttactggccattgaagccgttatcatcggtatgaccagcgccgcccatgtacgtgaagaggttgccgccaacctggaagtcttgctgctgctgatgtttatggtggcaggcatctactttatgaagcagttattgctgtttatttttacccgtctgttactcagtatccgctcgaagatggttctgtcgctggccttttgcgtcgccgccgcattcttgtcggctttccttgacgcgcttaccgtcgttgcggtggtgatcagcgtcgccgtcggtttttacgggatttaccatcgtgtggcctcatcgcgcggcgaagagaacgatatgctggacgacagccatatcgatccgcattacaaaacggtgctggagcaattccgcggattcttgcgtagcctgatgatgcatgcaggcgtggggacggcgctgggcggcgtcatgaccatggtcggggagccgcaaaacctgatcatcgctaaagcggctggctggcatttcggcgacttctttttgcggatgtcgcctgtcaccgtcccggtactggtatgtggactgttaacctgtatgctggtcgagaaaatgcgctggtttggctatggcgaaacgttgcccgaaaaagtccgcgacgttttacagcaattcgacgatcaaagccgtaagaagcgcacccgccaggataaaattaaactcatagtccaggcgattattggcgtctggctggttaccgccctcgccctccatctcgcggaggtgggactgattggtctgtcggtcattattctggccaccgcgttaacgggtgtaaccgatgaacacgccatcggcaaagcgtttaccgagtcgctgccgtttactgcgctgttaaccgttttcttctccattgtggcggttattatcgatcaacatcttttcgcgccgattattcagttcgtcttgcaagcctctgaacacgcgcagctaacgctgttctatctctttaacggcctgttgtcttccatctcagataacgtctttgtcggcaccatttatatcaacgaagcgaaggcggcaatggaaaacggcgctatcagcttaaaacagtttgagcttttagccgtggccatcaataccggtactaacctgccatcggtagcgacgccaaatggtcaggcggcattcttattcctgctgacctccgcgctggcgccgttaatccgtctctcctatggccgtatggtctggatggcgttaccgtacactatcgtactgaccctgatagggctactgtgcgtcgaattcactcttgcgccggccaccgaatggatgactcaggcaggatggttagcaacgctttcgtaa

SEQ ID NO: 942 - protein, 514 aa, Salmonella typhimurium LT2
MEISWGRAMWRNFLGQSPDWYKLALLVFLIVNPFIFLANPFIAGWLLVAEFIFTLAMALKCYPLLPGGLLAIEAVIIGMTSAAHVREEVAANLEVLLLLMFMVAGIYFMKQLLLFIFTRLLLSIRSKMVLSLAFCVAAAFLSAFLDALTVVAVVISVAVGFYGIYHRVASSRGEENDMLDDSHIDPHYKTVLEQFRGFLRSLMMHAGVGTALGGVMTMVGEPQNLIIAKAAGWHFGDFFLRMSPVTVPVLVCGLLTCMLVEKMRWFGYGETLPEKVRDVLQQFDDQSRKKRTRQDKIKLIVQAIIGVWLVTALALHLAEVGLIGLSVIILATALTGVTDEHAIGKAFTESLPFTALLTVFFSIVAVIIDQHLFAPIIQFVLQASEHAQLTLFYLFNGLLSSISDNVFVGTIYINEAKAAMENGAISLKQFELLAVAINTGTNLPSVATPNGQAAFLFLLTSALAPLIRLSYGRMVWMALPYTIVLTLIGLLCVEFTLAPATEWMTQAGWLATLS

SEQ ID NO: 943 - DNA, 1602 bp, Shewanella oneidensis MR-1
  CDS (1)..(1602): transl_table=11
atgccgatgacaatgagtcaggcgtttattggaaacttcttagggaactctcctaagtggtacaaaatcgcaatactgtcgtttttaataatcaatccaatactctttttctatgtcagcccctttgtggctggttgggtattagtgcttgagtttatttttactttggcaatggcattaaaatgttatccattgcaacccggcggattgttagccattgaagcggttgcgattggtatgacttcagccagtcaggtgctacatgaaattgaagccaaccttgaagtgttattattgttagtatttatggttgctggcatttacttcatgaagcaactgctgctattcgcgttcactaagatgatcaccaaagtccgttcaaaaatcttagtgtcattgttattttgcttagcttctgcattcttatccgcttttttagatgccctaactgttatcgcagtgattattactgtagccgttggtttttactctatttatcacaaagtggcatcgggtaaagatttctctgcggatcatgaccatacctcagagaataaaaacgaggaaggtgaagaccaactcaatgaagcagaacttgaatccttccgtggcttcttacgtaacttattaatgcacgccggtgttggtactgctttaggtggcgtgtgtacaatggtgggtgaaccacaaaacttaattattgcggcacaagctaactggcagtttggtgagtttgcgattcgtatgtcaccagtcacggtaccagtctttattgcgggcatcttaacctgctacatagtggagaaattccgtatctttggatatggtgctcaacttcctgatgctgttcataaaattctgtgcgattacgatgcgcatgaagatgctcgtcgaaccaataaagataaaatgaagcttattgttcaagccttcattggagtttggttaattgctggtcttgctctgcacttggcttctgttggcttgattggtctgtcagtcatcattttagccactgcatttaacggcataaccgatgaacatgcgctgggtaaagccttcgaagaagccctgccctttaccgcactgttagccgttttcttttccgttgttgctgtgattatcgaccaacaattgtttgctccggtgatccaatgggcactaaaccatgaaggtaatacccaattagtgattttctatattgctaacggtttactctccatggtcagtgataacgtgtttgtagggactgtctacattaacgaagtgaaagcggccttgctcaatggtcaaatcactcgcgatcaattcgacctactggccgtggcaattaacacaggtactaatttaccttctgttgcaacccccaatggtcaagccgccttcctattcttattgacatcagcacttgcaccactgatccgtttgtcctatggcagaatggtatggatggcattgccctacactatcgtcctgtcgattgtgggtgtcatggcgattcaaatcggattcttagaacaaatgacccagtatttctatgactcccacgcaattttacaccacagtgttaaagaagccttagcgccagcgacaggccactaa

SEQ ID NO: 944 - protein, 533 aa, Shewanella oneidensis MR-1
MPMTMSQAFIGNFLGNSPKWYKIAILSFLIINPILFFYVSPFVAGWVLVLEFIFTLAMALKCYPLQPGGLLAIEAVAIGMTSASQVLHEIEANLEVLLLLVFMVAGIYFMKQLLLFAFTKMITKVRSKILVSLLFCLASAFLSAFLDALTVIAVIITVAVGFYSIYHKVASGKDFSADHDHTSENKNEEGEDQLNEAELESFRGFLRNLLMHAGVGTALGGVCTMVGEPQNLIIAAQANWQFGEFAIRMSPVTVPVFIAGILTCYIVEKFRIFGYGAQLPDAVHKILCDYDAHEDARRTNKDKMKLIVQAFIGVWLIAGLALHLASVGLIGLSVIILATAFNGITDEHALGKAFEEALPFTALLAVFFSVVAVIIDQQLFAPVIQWALNHEGNTQLVIFYIANGLLSMVSDNVFVGTVYINEVKAALLNGQITRDQFDLLAVAINTGTNLPSVATPNGQAAFLFLLTSALAPLIRLSYGRMVWMALPYTIVLSIVGVMAIQIGFLEQMTQYFYDSHAILHHSVKEALAPATGH

SEQ ID NO: 945 - DNA, 1602 bp, Shewanella oneidensis MR-1; identical to SEQ ID NO: 943
  CDS (1)..(1602): transl_table=11

SEQ ID NO: 946 - protein, 533 aa, Shewanella oneidensis MR-1; identical to SEQ ID NO: 944

SEQ ID NO: 947 - DNA, 1503 bp, Pseudomonas putida KT2440
  CDS (1)..(1503): transl_table=11
atgtcacgccccctgaccggcgccctcgcccacggttttctgggcaagtcgccgatttggtacaaggtggtcatctgcctgtttttggtgctcaacccgctgttgttggtaaccattggcccggttgcgaccggctgggcactggtgctcgaattcatcttcaccctggccatggccctgaaatgctacccgttgatgcccggtggcttgttgctgatcgaagccctgctgttgcagatgaccacgccacaggcgctgtacgaggaactgcagcacaacttcccggtaatcctgctactgatgttcatggtcgccggcatccacttcatgaaggaactgttgctgttcctgttctcacgcattttgctcggggtgcgttccaaggccattctggcgctgctgttttgcgtactgtcggcgtttctatccgcgtttctcgatgccctgaccgtcacggcggtgatcatcagcgctgcggtcggcttctacgcggtgtaccaccgcgtcgcgtccggggccaatccgcgcgaggacagcgcactggagagcgaccagcaagtcgctcacctgcaccgggaagacctcgaccagttccgcgccttcctgcgtagcctgctgatgcatggcgctgtgggtaccgccctgggcggcgtttgcacgttggtgggcgagccgcagaacctgctgatcggccacgagatggggtggcacttcgtcgacttcttcttgaaggtggcgcccgtatcgctgccagtgctgggtgctggcctggtgacctgcgtgctgctggaaaaagtgcgcctgttcggctacggcacgctgatgcccgaacctgtgcgcagggtgctgaccgcctatgcggccgaagacgatgcggcgcgcacccaggcccagcgcatcgcgctgtgggtacaagggctcgctgcgctgatcctgatcatctgcctggggctgcatgtggccgaggtcggcctgatcggcctgatggtgatcgtactgatcacggccttcaccggcatcaccgacgagcaccgcctcggccgtgccttccaggacgccatgccgttcacttcgctgttggtggtgttcttcgccgtggtcgcggtgattcatcagcagcagctgttcagcccattgatcaactgggtgctggcgctgccggccgaacagcaaccgggcatgctgtacctggccaacggcttgctgtcggcgatcagcgacaatgtgttcgttgccaccatctacatcactgaagtgaagcaggcatttctcgatggcagcatgagccgcgagcatttcgaaaccctggcggtggcgatcaacaccggcaccaacctgccaagcgtggcgacgccgaacgggcaggcggcgttcctgttcctgctgacctcggccattgcgccgctgatccggctgtcgtatgggcggatggtgtggatggcgctgccctataccgtggtgatgggcgggttggggtggtgggcggtgacgtactggctgtga

SEQ ID NO: 948 - protein, 500 aa, Pseudomonas putida KT2440
MSRPLTGALAHGFLGKSPIWYKVVICLFLVLNPLLLVTIGPVATGWALVLEFIFTLAMALKCYPLMPGGLLLIEALLLQMTTPQALYEELQHNFPVILLLMFMVAGIHFMKELLLFLFSRILLGVRSKAILALLFCVLSAFLSAFLDALTVTAVIISAAVGFYAVYHRVASGANPREDSALESDQQVAHLHREDLDQFRAFLRSLLMHGAVGTALGGVCTLVGEPQNLLIGHEMGWHFVDFFLKVAPVSLPVLGAGLVTCVLLEKVRLFGYGTLMPEPVRRVLTAYAAEDDAARTQAQRIALWVQGLAALILIICLGLHVAEVGLIGLMVIVLITAFTGITDEHRLGRAFQDAMPFTSLLVVFFAVVAVIHQQQLFSPLINWVLALPAEQQPGMLYLANGLLSAISDNVFVATIYITEVKQAFLDGSMSREHFETLAVAINTGTNLPSVATPNGQAAFLFLLTSAIAPLIRLSYGRMVWMALPYTVVMGGLGWWAVTYWL

SEQ ID NO: 949 - DNA, 1590 bp, Vibrio vulnificus CMCP6
  CDS (1)..(1590): transl_table=11
atgccgatgtcgctcggaaacgcttttattaagaattttcttggtaaagcgcctgattggtataaagttgccatcatttcttttttaatcattaacccgattgttttcttcttcgttgacccatttgtagcaggctggctactcgtcgtggaatttattttcacgttggcaatggcgctcaaatgttatcctcttcaacctggtggtttattagccattgaagccatcgcgattggcatgactagccctgaacaggttaagcatgagctcgtcgccaatatcgaagtgttgttgttactggtcttcatggtcgctggcatctacttcatgaagcagttgctactcttcattttcaccaagatattgcttggcattcgctctaaagcgattttgtctttagcgttttgttttgccgcggcctttctttccgctttcttagacgcactgaccgttatcgccgttgttatcagcgttgccgtgggtttctattcgatctaccacaaagtggcatcgggtaagggcgtcagttccgatcatgaccatacacaagacgatcatcttgccgagctgactcgtgaagacttagaaaactaccgcgcatttttacgctcactgctcatgcatgcgggtgttggtactgcgctcggtggcgtgacgaccatggtaggtgaacctcaaaacttgatcattgcagaccaagcaagttggttgtttggtgagttcttgattcgcatggctccagttacgcttcctgttttcgtttgtggtttgctcacctgttttgcggtcgaaaaacttaaggtgtttggctacggcgctgaactacctgataacgttcgtcatattcttgtcgaattcgacaaagaagaacgcaaggctcgtaccaaccaagatgtggccaaactttggattcaaggtcttatcgccgtatggctgattgtcggcctcgcactgcacttggccgcggtaggtttgatcggtttgtccgtcatcatcctagccacagccttcactggtgtgattgaagaacactcactcggtaaagcgtttgaagaagcactgccatttacggcacttcttgcggttttcttctctatcgtggcggtaatcatcgaccaagagttgtttaagcctgttatcgatgcagttctcgcggtggaagacaaaggcacgcagttggcgatgttctacgtggcaaacggtttgctttcgatggtgtctgacaacgtgttcgtcggtacggtttacatcaacgaagtcaaaactgcgctagtagaaggcattattacacgtgaccagtttgacttgctggccgtggcgatcaacacaggaactaacttgccatcagtggcaacaccaaacggccaagcggcgttcctatttttgttgacttcagcactcgcaccattgattcgtctgtcttacggcaagatggtgatcatggctctgccatacacgattgtactggctctggttggcttgtttggcatcgtcttcttacttgagcctatgacagcttggttttacgacgcaggttggattgctcaccatgtgggtgaggcaactcacgcagtttccggcggacattaa

SEQ ID NO: 950 - protein, 529 aa, Vibrio vulnificus CMCP6
MPMSLGNAFIKNFLGKAPDWYKVAIISFLIINPIVFFFVDPFVAGWLLVVEFIFTLAMALKCYPLQPGGLLAIEAIAIGMTSPEQVKHELVANIEVLLLLVFMVAGIYFMKQLLLFIFTKILLGIRSKAILSLAFCFAAAFLSAFLDALTVIAVVISVAVGFYSIYHKVASGKGVSSDHDHTQDDHLAELTREDLENYRAFLRSLLMHAGVGTALGGVTTMVGEPQNLIIADQASWLFGEFLIRMAPVTLPVFVCGLLTCFAVEKLKVFGYGAELPDNVRHILVEFDKEERKARTNQDVAKLWIQGLIAVWLIVGLALHLAAVGLIGLSVIILATAFTGVIEEHSLGKAFEEALPFTALLAVFFSIVAVIIDQELFKPVIDAVLAVEDKGTQLAMFYVANGLLSMVSDNVFVGTVYINEVKTALVEGIITRDQFDLLAVAINTGTNLPSVATPNGQAAFLFLLTSALAPLIRLSYGKMVIMALPYTIVLALVGLFGIVFLLEPMTAWFYDAGWIAHHVGEATHAVSGGH

SEQ ID NO: 951 - DNA, 1587 bp, Vibrio parahaemolyticus RIMD 2210633
  CDS (1)..(1587): transl_table=11
atgccgatatcgctcggaaacgcttttatcaagaatttccttggtaaagcgcctgattggtacaaagttgccattatagccttccttattattaacccgattgttttcttcctaataaatccatttgttgctgggtggttgcttgtcgcggaatttattttcacgcttgcaatggctttaaaatgctacccattacaacctggtggtttacttgcaattgaagctattgctattggcatgaccagcccagcgcaagtaaaacatgagttggttgcgaatatagaagtattactacttttagtattcatggttgcgggtatctacttcatgaaacagcttctgctgttcatcttcaccaaaatcctgcttggtattcgttcaaaaactctgctttcgcttgcattctgtttcgcagccgcgtttttgtcagcattcctagatgcgttgacagtaatcgctgttgtcatcagcgtagcagttggtttctactcgatttaccacaaagttgcttcaggtaacccaattggcgatcacgaccatactcaagacgacaccatcacagaactgactcgtgatgaccttgaaaactatcgtgcattcctacgttcgctgcttatgcacgctggtgtgggtaccgcgctgggcggcgtaacaacgatggttggtgaacctcaaaaccttatcattgcagaccaagcgggttggttatttggtgaattcctaatccgtatgtctcctgtgacgttaccagtatttatctgtggtcttattacttgtgcattggttgagaagctaaaagtatttggttacggcgcaaaactgcctgataacgtacgtcaaatccttgtagactttgaccgcgaagaacgtaagacacgtacaaaccaagacgtcgcaaaactgtgggtacaaggtattatcgccgtttggctgattgtcgcgttagcgcttcacttagcagccgttggcctgattggtctgtctgtcattatcctagcaacgtcatttactggcgtcattgaagagcactcaatgggcaaagcatttgaagaggctctgcctttcacagccctactcgcggttttcttctcgatcgttgcagtaatcattgaccaagagctatttaaacctgttattgacgccgtgttagccgttgaagacaaaggcacacagcttgccctcttctacgttgcgaacggtttgttatcgatggtttcggacaacgtattcgtaggtacggtatacatcaacgaagtgaaatcagcccttatggaaggcttgatcacgcgtgaacagttcgacctgttagcagttgcaatcaacaccggtacaaacttaccttctgttgcaacgccaaacggtcaagccgctttcctattcctactaacgtctgcactagcaccgctaattcgtctgtcttacggtcgaatggtagtgatggcattgccatacactgtcgttttggcaattgtaggtctgatgggcatcatgttcttcctagagccagcaacagcgtctttctacgatgcgggctggattgcacctcataccggtgatctgactccagttgtgtctggcggacactaa

SEQ ID NO: 952 - protein, 528 aa, Vibrio parahaemolyticus RIMD 2210633
MPISLGNAFIKNFLGKAPDWYKVAIIAFLIINPIVFFLINPFVAGWLLVAEFIFTLAMALKCYPLQPGGLLAIEAIAIGMTSPAQVKHELVANIEVLLLLVFMVAGIYFMKQLLLFIFTKILLGIRSKTLLSLAFCFAAAFLSAFLDALTVIAVVISVAVGFYSIYHKVASGNPIGDHDHTQDDTITELTRDDLENYRAFLRSLLMHAGVGTALGGVTTMVGEPQNLIIADQAGWLFGEFLIRMSPVTLPVFICGLITCALVEKLKVFGYGAKLPDNVRQILVDFDREERKTRTNQDVAKLWVQGIIAVWLIVALALHLAAVGLIGLSVIILATSFTGVIEEHSMGKAFEEALPFTALLAVFFSIVAVIIDQELFKPVIDAVLAVEDKGTQLALFYVANGLLSMVSDNVFVGTVYINEVKSALMEGLITREQFDLLAVAINTGTNLPSVATPNGQAAFLFLLTSALAPLIRLSYGRMVVMALPYTVVLAIVGLMGIMFFLEPATASFYDAGWIAPHTGDLTPVVSGGH

SEQ ID NO: 953 - DNA, 1542 bp, Haemophilus ducreyi 35000HP
  CDS (1)..(1542): transl_table=11
atgaatagctctaatgctatctttaaaacgtttttaggcagcgcgcctgaatggtataagttatgtattattacctttctggtgataaatccattaatttacttctttgtcagtccatttattgctggttggacactagtcgctgaatttatctttacactttcaatggcattaaaatgttatccattacaacctggtggtttacttgcaattgaagccgttgcaatcggtatgacttcacctcaccacgtgaaacatgagattatagcgaactttgaagttattttattattaatgtttatggttgccggtatttactttatgaagcaactgcttttatatgtatttactaaattgctaattgtaattcgttctaaaaaagtactttcgctttcattttgtttaagcgctgcatttttgtccgctttcttggatgccttaacggttattgccgtaattatcagcgtaggaaccggtttttatggtgtttaccataaagtcgcttctggcagtacctttgaagattctactgatattagtaacgacgataagattattaccaataaaaagattcttgaacaattccgtgcttttttgcggagtttattgatgcacgcagccgtaggcagtgcattaggtggtgtaatgacaatggttggcgaaccacaaaatttaattattgcaagccaagcagaatggggattcattgagtttttaatccgtgtagcaccggtcagtttacccgtattaatttgtggtattgcaacgtgtttattactcgaacattttaaagtctttgggtatggtgaacgtttaccacgtcgtgtttggggcgtgcttgcacgttataatgtattgcaagaacaacatatgactaaacaagatcgggtaaaaatggctatccaagcgcttgcaggtatttggttaattgttggtttagcattacatcttgctgatgttgggattatcgggctgacgattattattatctgtacagctttttgtggcattactgatgaacacgcaatcggccgttctttccaagaaccaatgccttttactgccctaattgtagtattctttactattgttgccgttattgtggatcttaaattatttgaacccattattaattttgtcttatcggcagatccgcattctcaattggcattattctatgttttcaatggcttattatcgatgatctcagataatgttttcgttggcactgtctatatgaatgagactaaagcggcattaacgtctggctttatcagccgtgaacagtttgatttaatcgcagtcgccatcaataccggtactaatctaccgtctgttgccacaccaaatggacaagctgcattcttattcttacttacttcaccattcgcaccattaattcgtctttcatatagtagaatgatatatatggcattaccttatacgatagtattgtctatcgttggtttctttgccttagaatatttacttccaccgcttaccgagttaatgactaattggggctggttaattgcacgctaa

SEQ ID NO: 954 - protein, 513 aa, Haemophilus ducreyi 35000HP
MNSSNAIFKTFLGSAPEWYKLCIITFLVINPLIYFFVSPFIAGWTLVAEFIFTLSMALKCYPLQPGGLLAIEAVAIGMTSPHHVKHEIIANFEVILLLMFMVAGIYFMKQLLLYVFTKLLIVIRSKKVLSLSFCLSAAFLSAFLDALTVIAVIISVGTGFYGVYHKVASGSTFEDSTDISNDDKIITNKKILEQFRAFLRSLLMHAAVGSALGGVMTMVGEPQNLIIASQAEWGFIEFLIRVAPVSLPVLICGIATCLLLEHFKVFGYGERLPRRVWGVLARYNVLQEQHMTKQDRVKMAIQALAGIWLIVGLALHLADVGIIGLTIIIICTAFCGITDEHAIGRSFQEPMPFTALIVVFFTIVAVIVDLKLFEPIINFVLSADPHSQLALFYVFNGLLSMISDNVFVGTVYMNETKAALTSGFISREQFDLIAVAINTGTNLPSVATPNGQAAFLFLLTSPFAPLIRLSYSRMIYMALPYTIVLSIVGFFALEYLLPPLTELMTNWGWLIAR

SEQ ID NO: 955 - DNA, 1548 bp, Photorhabdus luminescens subsp. laumondii TTO1
  CDS (1)..(1548): transl_table=11
atggaaaccagtatcctaaaaacagcggtaaaaaactttctcggcaactcgccagattggtataagctcgctatcatcatctttctcatcatcaacccattgatattcttttttattaatccatttgtcacaggctggctgcttgttatcgaatttatctttacgttagcaatggcacttaaatgttacccgttacaaccgggtggcctgttggcaattgaagcggtcatcatcggcatgacctccccgcaacaagtcggtcatgaaattgctaataacttggaagttgtactgttactgatatttatggtcgcaggaatttactttatgaagcaattactattatttgctttcactaaactcctgctctccataaaatctaaacgtatgcttgccttagcattctgcctagccagcgcattcctgtcagcatttcttgatgctctgacagttatcgcggtagttattagtgtttcccttggcttctattctatctacaacaacttcattactgatcagaatgatgtcattaacgctaaacatgacaatcacattgatacagcaaaaaagaaacaaactcttgaacagtttcgcgcttttttgcgcagtctaatgatgcatgcaggggtaggcactgcacttggtggtgtgatgacgatggtaggagaaccccaaaatctgattatcgccaaaaacgttaattgggattttgtcaccttctttattcgcatggctccaattaccctacctgtctttatctgcgggctactagtctgttttctggtcgaacactttaaactgttcggttatggtacagaattgccagaacgcgtccgacaggtattggaagattacgataaaaaaaccagcgcaaaacgaacacataaagaaaaagcacagcttattgctcaagcgctaatcggtatatggctcattgtcgcgctggcgtttcatctggcagaagttggtctgattggcctttccgtcattattctaaccacgtcgttctgtggtattaccgaagaacatgcactgggtaaggcatttgaagaggcactaccgttcacggcattactgactgtattcttttctatcgttgccgtcattgttgaccagcaactgtttacgccatttattcagttcgtattacaggtttctgaaacttctcaactttccctgttctatctgttcaatggcttactctcatcagtatcagataacgtatttgtcggtacggtttatatcaatgaagcaagaactgcgatgcaagagggcctgatttcacataaacaatttgaatatctggctgttgcgattaataccggcacaaacctgccttccgttgccacacctaacggacaagctgcatttctattcctgttgacgtcgacattatcgccattgattcgtttatcttatggccgcatggtgataatggcactaccttataccattgtcatgacgctggtcggtttgctgtgtgtagaatttctgctaattccagtcactgacatgatggttcattggggcctaattgctttgccataa

SEQ ID NO: 956 - protein, 515 aa, Photorhabdus luminescens subsp. laumondii TTO1
METSILKTAVKNFLGNSPDWYKLAIIIFLIINPLIFFFINPFVTGWLLVIEFIFTLAMALKCYPLQPGGLLAIEAVIIGMTSPQQVGHEIANNLEVVLLLIFMVAGIYFMKQLLLFAFTKLLLSIKSKRMLALAFCLASAFLSAFLDALTVIAVVISVSLGFYSIYNNFITDQNDVINAKHDNHIDTAKKKQTLEQFRAFLRSLMMHAGVGTALGGVMTMVGEPQNLIIAKNVNWDFVTFFIRMAPITLPVFICGLLVCFLVEHFKLFGYGTELPERVRQVLEDYDKKTSAKRTHKEKAQLIAQALIGIWLIVALAFHLAEVGLIGLSVIILTTSFCGITEEHALGKAFEEALPFTALLTVFFSIVAVIVDQQLFTPFIQFVLQVSETSQLSLFYLFNGLLSSVSDNVFVGTVYINEARTAMQEGLISHKQFEYLAVAINTGTNLPSVATPNGQAAFLFLLTSTLSPLIRLSYGRMVIMALPYTIVMTLVGLLCVEFLLIPVTDMMVHWGLIALP

SEQ ID NO: 957 - DNA, 1590 bp, Vibrio vulnificus YJ016
  CDS (1)..(1590): transl_table=11
atgccgatgtcgctcggaaacgcttttattaagaattttcttggtaaagcgcctgattggtataaagttgccatcatttcttttttaatcattaacccgattgttttcttcttcgttgacccatttgtagcaggctggctactcgtcgtggaatttattttcaccttggcaatggcgctcaaatgttatcctcttcaacctggtggtttattagccattgaagccatcgcgattggcatgactagccctgaacaggttaagcatgagctcgtcgccaatatcgaagtgttgttgttactggtcttcatggtcgctggcatctacttcatgaagcagttgctactcttcattttcaccaagatattgcttggcattcgctctaaagcgattttgtctttagcgttttgttttgccgcggcctttctttccgctttcttagacgcactgaccgttatcgcggttgttatcagcgttgccgtgggtttttattcgatctaccacaaagtggcatcgggtaagggcgtcagttccgatcatgaccatacacaagacgatcatcttgccgagctgactcgtgacgacttagaaaactaccgcgcatttttacgctcactgctcatgcatgcgggtgttggtactgcgctcggtggcgtgacgaccatggtaggtgaacctcaaaacttgatcattgcagaccaagcaagttggttgtttggtgagttcttgattcgcatggctccagttacgcttcctgttttcgtctgtggtttgctcacctgttttgcggtcgaaaaacttaaggtgtttggctacggcgctgaactacctgataacgttcgtcatatccttgtcgaattcgacaaagaagaacgcaaggctcgtaccaaccaagatgtggccaaactttggattcaaggtcttatcgccgtatggctgattgtcggcctcgcactgcacttggccgcggtaggtttgatcggtttgtccgtcatcatcctagccacagccttcactggtgtgattgaagaacactcactcggtaaagcgtttgaagaagcactgccatttacggcacttcttgcggttttcttctctatcgtggcggtaatcatcgaccaagagttgtttaagcctgttatcgatgcagttctcgcggtggaagacaaaggcacgcagttggcgatgttctacgtggcaaacggtttgctttcgatggtgtctgacaacgtgttcgtcggtacggtttacatcaacgaagtcaaaactgcgctagtagaaggcattattacacgtgaccagtttgatttgctggccgtggcgatcaacacaggaactaacttgccatcagtggcaacaccaaacggccaagcggcgttcctatttttgttgacttcagcactagcaccattgattcgtctgtcttacggcaagatggtgatcatggctctgccatacacgattgtactggctctggttggcttgtttggcatcgtcttcttacttgagcctatgacaacttggttttacgacgcaggttggattgctcaccatgtgggtgaggcaactcacgcagtttccggcggacattaa

SEQ ID NO: 958 - protein, 529 aa, Vibrio vulnificus YJ016
MPMSLGNAFIKNFLGKAPDWYKVAIISFLIINPIVFFFVDPFVAGWLLVVEFIFTLAMALKCYPLQPGGLLAIEAIAIGMTSPEQVKHELVANIEVLLLLVFMVAGIYFMKQLLLFIFTKILLGIRSKAILSLAFCFAAAFLSAFLDALTVIAVVISVAVGFYSIYHKVASGKGVSSDHDHTQDDHLAELTRDDLENYRAFLRSLLMHAGVGTALGGVTTMVGEPQNLIIADQASWLFGEFLIRMAPVTLPVFVCGLLTCFAVEKLKVFGYGAELPDNVRHILVEFDKEERKARTNQDVAKLWIQGLIAVWLIVGLALHLAAVGLIGLSVIILATAFTGVIEEHSLGKAFEEALPFTALLAVFFSIVAVIIDQELFKPVIDAVLAVEDKGTQLAMFYVANGLLSMVSDNVFVGTVYINEVKTALVEGIITRDQFDLLAVAINTGTNLPSVATPNGQAAFLFLLTSALAPLIRLSYGKMVIMALPYTIVLALVGLFGIVFLLEPMTTWFYDAGWIAHHVGEATHAVSGGH

SEQ ID NO: 959 - DNA, 1581 bp, Erwinia carotovora subsp. atroseptica SCRI1043
  CDS (1)..(1581): transl_table=11
atgatcgccatgcccctccaccgtgcgctgttaaaaaatttcctaggatacgcgccagactggtacaaactgactatttttggtttcctgctgattaatccactgctgttctattttgtcagcccgttttgggccggttggttattggtcgtggagtttatttttacgctcggcatggcgctgaaatgttatccgctacagcctggtggtctgctggcactacaggcgatactcatcggcatgaccagcccacagcaggtgtggcatgaagtcacagggaatattgaagttctcatgctgttggtgtttatggtggcaggcatctacttcatgaagcaactgctgctttttgtgtttaccaaactgctgctgcgcatccattctaaacccctgctctcactcgccttttgcatggcggctgcgtttctctccgcctttttagacgcattgactgtgattgccgtcatcatcagcgtcgctatcgggttttatggtatttatcaccgtttcgcctctcagcaaggtgaagacgaggccgatatcagcgatgatagcgcgttaaacggcgaggaacatcatcgtacgctggaccaattccgtgcatttctacgtagcctgatgatgcatgcaggcgtcggtacagcactgggcggggtgatgacgatggtcggcgaacctcagaatctgattattgcgaaaagcgcaggctgggatttcgtcgactttttcctgcgcatgtcaccggtaaccgtacctgtctttatttgcggtatcctgacctgcgtgctggtcgaacgcttcaagctattcggttatggggtaaacctgccggacaacgtgcgccgcgtacttgaggattacgatcgggacatgacagaaaagcgcacgcagcaggataaagtgcgtttactcgtgcaggcagtgattggcgtctggctcattatcgcgctggcgtttcatttggctgaggtcggattgattggcctctccgtgattattatggccacaacgttctgtggcgtgaccgaagaacacgctatcggtaaagcatttcaagatgctatgccgtttaccgcactgctgacggtcttttttgccatcgtcgccgtcattatcgatcagcaactgttctcaccgattatccattacgtcctgcaatcttctgatagtgcccaactgacacaattttatctgttcaatggcctgctatcgtcgatatcggataacgtatttgttggatcggtttatatcaacgaagcgcgtaatgcgtttgagagcggcaaaatatccttaccccaatttgaactactcgccgtggcgattaataccggcactaatctgccttccgtcgccacaccaaatgggcaagccgcgtttctattcctgctgacatcctcgctagctccgcttatccgcctgtcttatgggcgcatggtaatcatggcactgccttacaccattgtgatgacgctggtcgggttgctttgcgttgagttcacgctggtgccgttcaccgattttttgatgaataatcactggatttctttgccaaatttgaccatatcgggcagtcacgcataa

SEQ ID NO: 960 - protein, 526 aa, Erwinia carotovora subsp. atroseptica SCRI1043
MIAMPLHRALLKNFLGYAPDWYKLTIFGFLLINPLLFYFVSPFWAGWLLVVEFIFTLGMALKCYPLQPGGLLALQAILIGMTSPQQVWHEVTGNIEVLMLLVFMVAGIYFMKQLLLFVFTKLLLRIHSKPLLSLAFCMAAAFLSAFLDALTVIAVIISVAIGFYGIYHRFASQQGEDEADISDDSALNGEEHHRTLDQFRAFLRSLMMHAGVGTALGGVMTMVGEPQNLIIAKSAGWDFVDFFLRMSPVTVPVFICGILTCVLVERFKLFGYGVNLPDNVRRVLEDYDRDMTEKRTQQDKVRLLVQAVIGVWLIIALAFHLAEVGLIGLSVIIMATTFCGVTEEHAIGKAFQDAMPFTALLTVFFAIVAVIIDQQLFSPIIHYVLQSSDSAQLTQFYLFNGLLSSISDNVFVGSVYINEARNAFESGKISLPQFELLAVAINTGTNLPSVATPNGQAAFLFLLTSSLAPLIRLSYGRMVIMALPYTIVMTLVGLLCVEFTLVPFTDFLMNNHWISLPNLTISGSHA

SEQ ID NO: 961 - DNA, 1575 bp, Yersinia pseudotuberculosis IP 32953
  CDS (1)..(1575): transl_table=11
atggacattaccaacagacaagctgtactcaagaattttcttggtaactctccggattggtacaaactagcaattatggggttcttgatcattaaccctctagtcttcttctttgtcagcccctttgtcgcgggctggatgctggttatcgagtttatctttaccttagccatggcgctgaaatgttacccgctgcaaccggggggtttgctcgctattcaagccgttgccatcggcatgaccagcccgcatcaagttgcagaagagatcgccaataacctggaagtcctcttgcttttagtatttatggtggccggcatctactttatgaaacagctgctgctgtttgtatttacgaaattgctgttgaatattcggtcaaaaactatcctttccctggccttttgtctggcgtcagccttcctatcagcatttttggatgccttaaccgtaatcgcggtagttatcagcgtatccgttggtttttatactatttatcataacgttacttcaaatcacagtgacaaagatattactgatgacagcggaatcgataatcaggacagccatgaaacattagagcaattccgggcatttttacgcagtctgatgatgcatgctggcgtgggtaccgctctggggggcgtcatgacaatggttggtgagcctcagaatttgattattgccaaaagcgcgggttggaattttgctgacttctttattcgcatgttacccgtcaccttacccgtctttattttcgggttattggtctgcttgctggtcgaaaaatttaaactgtttggttatggtgcccagttgccagaacgtgtgcgtcaggttctgaccgaatacgatcagcaagccagtgcgaaacggaccaagcaagagaagatgaagttaatagtacaagccattattggtgtctggttggtattggcactggcactccatttagctgaagtcggtttggtcgggctatccgttattattctcgccacctcattttgtggtatcacaaatgagcattcattgggcaaagcctttcaggaagccttgccgtttaccgcgctgctaaccgtattttttgccgtggtcgcggttattattgaacaaagcctctttacccccattattcagtttgttttacaagcctcgccttccgctcagctatcgctgttttatctgtttaatggcttgctctcatcggtgtcagacaatgtttttgtcggtaccgtgtatatcaatgaggcccgttctgcgtttgagcatggtattgtctcgttacaacaatttgaattgttggcggtcgccatcaatacagggaccaacctcccctccgtggcgacaccaaacggccaggccgctttcttgttcctgctgacttcggcattggcaccactaattcgcctttcctatgggcgaatggtatatatggctttgccttatactctagtgatgacgattgttggcctgctgggtgtcgagtttttattggtaccgatgacagagtggctgactcaggctggatggatcagtttgccacacatcacaaacggggttgccatcccacactga

SEQ ID NO: 962 - protein, 524 aa, Yersinia pseudotuberculosis IP 32953
MDITNRQAVLKNFLGNSPDWYKLAIMGFLIINPLVFFFVSPFVAGWMLVIEFIFTLAMALKCYPLQPGGLLAIQAVAIGMTSPHQVAEEIANNLEVLLLLVFMVAGIYFMKQLLLFVFTKLLLNIRSKTILSLAFCLASAFLSAFLDALTVIAVVISVSVGFYTIYHNVTSNHSDKDITDDSGIDNQDSHETLEQFRAFLRSLMMHAGVGTALGGVMTMVGEPQNLIIAKSAGWNFADFFIRMLPVTLPVFIFGLLVCLLVEKFKLFGYGAQLPERVRQVLTEYDQQASAKRTKQEKMKLIVQAIIGVWLVLALALHLAEVGLVGLSVIILATSFCGITNEHSLGKAFQEALPFTALLTVFFAVVAVIIEQSLFTPIIQFVLQASPSAQLSLFYLFNGLLSSVSDNVFVGTVYINEARSAFEHGIVSLQQFELLAVAINTGTNLPSVATPNGQAAFLFLLTSALAPLIRLSYGRMVYMALPYTLVMTIVGLLGVEFLLVPMTEWLTQAGWISLPHITNGVAIPH

SEQ ID NO: 963 - DNA, 1548 bp, Mannheimia succiniciproducens MBEL55E
  CDS (1)..(1548): transl_table=11
atgagtggctacacagcattttttaacaattttctaggaaaaagtccaaattggtataaattatctattatcgttttccttattttaaaccctattttatattttttgatcagtccctttatcgcaggttggtgtttagtcattgagtttatcttcactttagccatggcgttgaaatgttatccgttgcaaccgggcggtttattggcttttgaagctatcgccattggtatgacaagtccggctcatgtaaaagcggaaatcatggcaagttttgaagtaatcctattattaatgttcatggttgccggcatttacttcatgaaacaactactgctgtttgcattcaccagattattaattaccgttcgttcaaaaatagttttatctctttctttctgtttaagtgcggcatttttatcggcatttttagacgcattaactgttgtcgctgtaatcatcagcgtagtaatgggattttacggtgtttatcacaaagttgcctcaggtaataattttgatgattcaacggatatcactaacgatgaaaaaatcaaaaaagatcagcaggtgctggaacaattccgtagttttttacgcagcctaatgatgcatgctggcgtgggtacggctctcggtggcgtaatgaccttagtgggtgaaccgcaaaacttaattattgccgagcaagcaagctggggcttcggtgagttctttattcgcatggcaccggttactgttcccgtattaatctgcggtttgatcacttgtgtgatgatagaaaaaatgaacattttcggttatggagataaacttcctcgtaaagtttgggggatccttgccaaatttaatcgtgcccaacaacaaaaaatgaatcgacaagaaagacaaaaattgattattcaaggtattatcggtatctggctggtatgcggtttagcctttcacttagcggctgtcggcttaatcggtttgagcgttatcgtattaaccactgcattttgcggtattacctcggaaagtaccattggtaaatcatttcaagaatctcttccattctgtgcattattggtcgtattcttttccgtcgtcgccgtcattatagaccaacatctttttggtccgatcatcaattacgtgttatccgcaagcgaaagcacccaattactgctcttctatgggtttaacggattactttccgccatctccgataacgttttcgtagcaaccgtttacattaatgaagcgaaaaatgcgttacatgccggtattatttcattagaacaattcgaactgcttgcggtagccattaacacaggtacgaacttaccttccgttgcaacgccaaacggacaagcggcgtttttgtttctgttaacatcttctttagcaccgttaatccgcttatcttatggtaaaatggtttatatggcactcccttatacaattgtgcttacagttgtaggtttattggcagtggaatatattcttcccggcgcaacaaaatactttagcagcttaggctggattactgcgttaccggtataa

SEQ ID NO: 964 - protein, 515 aa, Mannheimia succiniciproducens MBEL55E
MSGYTAFFNNFLGKSPNWYKLSIIVFLILNPILYFLISPFIAGWCLVIEFIFTLAMALKCYPLQPGGLLAFEAIAIGMTSPAHVKAEIMASFEVILLLMFMVAGIYFMKQLLLFAFTRLLITVRSKIVLSLSFCLSAAFLSAFLDALTVVAVIISVVMGFYGVYHKVASGNNFDDSTDITNDEKIKKDQQVLEQFRSFLRSLMMHAGVGTALGGVMTLVGEPQNLIIAEQASWGFGEFFIRMAPVTVPVLICGLITCVMIEKMNIFGYGDKLPRKVWGILAKFNRAQQQKMNRQERQKLIIQGIIGIWLVCGLAFHLAAVGLIGLSVIVLTTAFCGITSESTIGKSFQESLPFCALLVVFFSVVAVIIDQHLFGPIINYVLSASESTQLLLFYGFNGLLSAISDNVFVATVYINEAKNALHAGIISLEQFELLAVAINTGTNLPSVATPNGQAAFLFLLTSSLAPLIRLSYGKMVYMALPYTIVLTVVGLLAVEYILPGATKYFSSLGWITALPV

SEQ ID NO: 965 - DNA, 1569 bp, Haemophilus influenzae 86-028NP
  CDS (1)..(1569): transl_table=11
gtgataaaaataatggagttcactatgacaaacattcaggcttttatgaaaaactttcttggggcaagtccagaatggtacaaacttgccattgtggtttttcttattataaatccaattgttttcttttttattagtccttttattgcgggttggttactggttgcagaatttattttcacattggcaatggcattaaaatgctaccctcttcaaccaggtggtctattagcaattgaagctattattattggaatgacaaatgccaaacacgtcaaagcagaaattatggcaaactttgaagtgatcttgctactgatatttatggtggcaggtattttctttatgaaacaattactgctttatgtatttactaaattacttgtcaaaattcgttctaaaattgcactttctattgccttttgttttagtgctgcttttttatcggcttttctcgatgctttaacggttgttgctgttatcattagtgtcgcaatgggattttatggtgtgtatcacaaagttgcatcaggcaataatttaattgatgcggttgatatttcagacgatagaaaaattattgaacaacagcacgaaatcttagaaaaattccgtgcattcttacgtagtttaatgatgcatgcgggtgtaggaactgcactcggtggtgtaatgaccgttgttggagaaccacaaaacttaattattgcagaacaagcaaaatggaactttatggaatttttcctccgtatggcacccgtgactattcctgtgtttatctgcggattactcacttgtttcttggtcgaaaaattcaaattatttggttatggcgagaaattaccagacgaagtgtggaaagtcttatcagacttagatcgcactaattcagaaaaaatgtctaaacaagataaaattaaattaggtatgcaagcgttaatcgcaatttggttaattcttggattagcattccatcttgccgcagtcggtttaattggtttaagtatcatcatttttgctacgtctttcactggtgtgacggatgaacatactatcggtaaagcctttcaggaatctttaccctttactgcattgctcgttgtattcttttctgttgttgcagtaattattgatcaaaaacttttttcaccaattattcacttcgttctttctgcggaagaaaatacacaacttgctttattctatttgtttaatggcttgctttcttctatttctgataatgtatttgttgcaacggtttatattaatgaagctaaagctgcactgacaaatggagtaattgcaccgcatcaatttgaattgctttctgttgccattaatacaggtacaaacttaccatcagttgcaacaccaaatgggcaagctgctttcttattcttattgacttcatcaatttcgccattaattcgcctttcttatggcagaatggtttatatggctttaccttacacgattgtactttcaatcattggtttactggctattgaatttattttaccagctgccacaatttggttagcaagtttaggtttaattttgccaatttaa

SEQ ID NO: 966 - protein, 522 aa, Haemophilus influenzae 86-028NP
MIKIMEFTMTNIQAFMKNFLGASPEWYKLAIVVFLIINPIVFFFISPFIAGWLLVAEFIFTLAMALKCYPLQPGGLLAIEAIIIGMTNAKHVKAEIMANFEVILLLIFMVAGIFFMKQLLLYVFTKLLVKIRSKIALSIAFCFSAAFLSAFLDALTVVAVIISVAMGFYGVYHKVASGNNLIDAVDISDDRKIIEQQHEILEKFRAFLRSLMMHAGVGTALGGVMTVVGEPQNLIIAEQAKWNFMEFFLRMAPVTIPVFICGLLTCFLVEKFKLFGYGEKLPDEVWKVLSDLDRTNSEKMSKQDKIKLGMQALIAIWLILGLAFHLAAVGLIGLSIIIFATSFTGVTDEHTIGKAFQESLPFTALLVVFFSVVAVIIDQKLFSPIIHFVLSAEENTQLALFYLFNGLLSSISDNVFVATVYINEAKAALTNGVIAPHQFELLSVAINTGTNLPSVATPNGQAAFLFLLTSSISPLIRLSYGRMVYMALPYTIVLSIIGLLAIEFILPAATIWLASLGLILPI

SEQ ID NO: 967 - DNA, 1503 bp, Pseudomonas fluorescens Pf-5
  CDS (1)..(1503): transl_table=11
atgtccggttcaatggcccaggcgttcgcccacaattttctcggccaatcaccccgctggtacaaggcaagcattgtcgcgttcctgttgctcaaccctccgctgttcttcgctgtcagcccggccgccgccggctggtgcctggtgatcgaattcatcttcaccctggccatggccctcaagtgctaccccttgatgcccggcggcctgctgctggtgcaggcactggtgctgggcatgaccacgccccaggcgctgtatgacgagctggtgcacaacttcccggtgatcctgctgctgatgttcatggtggccggcatctacttcatgaaggagttgctgctctacctgttctcccggctgctgctgggggtgcgctccaaggcgctgctgggcctgctgttctgctttctctcggccttcctctcggcctttctcgacgccctgaccgtcaccgcggtgatcatcagcgccgcggtaggcttctattcggtgtatcaccgggtggcgtccggcaatgacccgcgccaggacagcgccttcgccgacgaccaacagttgcctgccctgcatcatgacgacctggagcagttccgcgccttcctgcgcagcctgctgatgcatggcgccgtgggcaccgccctgggcggtgtgtgcaccctggtgggggaaccgcagaacctgctgatcggccatgaaatgggctggcacttcgccgatttcttcagcaaggtggcaccggtttcgatgccggtcctggcggctggcctggtgacctgcgtactgctggagaagctgcgctggttcggctacggcaccctgctgccggacaacgtgcgccaggtgctggccaactacgccgccgaggacgatgcccagcgcacctcgcgccagcgcgcggccctgctggtgcaggggctggcggcactgatcctgatcgtcgccctggccctgcatgtggccgaggtcgggctgatcggcctgctggtgatcgtactgatcaccgcctttaccgggatcaccgacgagcaccgcctgggcaacgcgttcaaggacgccatgcccttcaccgccctgctggtggtgttctttgcggtggtggcggtgattcaccagcagcagctgttcaccccgttgatccagtgggtgctggcgctgccggcggaccagcagccgggcatgctgttcattgccaatggcctgctctcggccatcagcgacaatgtgttcgtggccaccatctacatcaccgaagtgaaacaggccttcatctccgggcagatgagccgcgagcacttcgaaaccctggcgatcgccatcaataccggtaccaacctgccgagcgtggccacgcccaacggccaggcggccttcctgttcctgctgacctcggcgattgcgccgctggtacgcctgtcctacggacggatggtgtggatggccctgccctacaccgtggtgatggggctgctgggctggtacgcggtgagctactggttgtaa

SEQ ID NO: 968 - protein, 500 aa, Pseudomonas fluorescens Pf-5
MSGSMAQAFAHNFLGQSPRWYKASIVAFLLLNPPLFFAVSPAAAGWCLVIEFIFTLAMALKCYPLMPGGLLLVQALVLGMTTPQALYDELVHNFPVILLLMFMVAGIYFMKELLLYLFSRLLLGVRSKALLGLLFCFLSAFLSAFLDALTVTAVIISAAVGFYSVYHRVASGNDPRQDSAFADDQQLPALHHDDLEQFRAFLRSLLMHGAVGTALGGVCTLVGEPQNLLIGHEMGWHFADFFSKVAPVSMPVLAAGLVTCVLLEKLRWFGYGTLLPDNVRQVLANYAAEDDAQRTSRQRAALLVQGLAALILIVALALHVAEVGLIGLLVIVLITAFTGITDEHRLGNAFKDAMPFTALLVVFFAVVAVIHQQQLFTPLIQWVLALPADQQPGMLFIANGLLSAISDNVFVATIYITEVKQAFISGQMSREHFETLAIAINTGTNLPSVATPNGQAAFLFLLTSAIAPLVRLSYGRMVWMALPYTVVMGLLGWYAVSYWL

SEQ ID NO: 969 - DNA, 1503 bp, Pseudomonas fluorescens PfO-1
  CDS (1)..(1503): transl_table=11
atgtccggttcgatggcccaagcgttcgcgcacaactttctcgggcattcgccccgctggtacaaggcgtgcatcgtcgggtttctgatgctcaacgcgctggtgctgtggagcgtcggtccggtcgccgctggctggttgctggtgattgagttcattttcaccctggccatggcgctcaagtgctaccccctgatgcccggcggtttgctgctgatcgaagcgctgctgctgaaaatgaccacgccccaggcgctgtatgaagagctgcagcacaatttcccggtgattctgctgctgatgttcatggtcgccggcatctacttcatgaaagacctgctgctgttcctgttctcgcgcctgttgctgggcgtgcgttcgaaggcgctgctggccctgatgttctgctttctgtcggcatttctttcggcgtttctcgacgcactgaccgtcaccgcagtgatcatcagcgccgccgtgggcttctattcggtttatcaccgggtggcctccggcaacgatccacgccaggacagcgaattcagcgatgaccagcatctgcctcaactgcatcacgaggacttggagcagtttcgcgccttcctgcgcagcctgttgatgcacggcgctgtcggcactgcattgggtggcgtctgcaccctggtgggtgagccacaaaacctgctgattggtcacgagatgggctggcacttcgccgagtttttcctgaaggtcgcgccggtgtcgctgccggttctggttgcgggactggtgacctgcctgctgctggagaaattgcgctggttcggttacggcacgctgctgccggacaacgtacgtgccgtgctggccaactacgccgccgaagacaacgcggagcgcaccccgcgccaacgcgccgccctgctggtgcaaggctgcgctgcgctgatcctgatcgccgggctggcgttccatatcgcggaagtcggcttgatcggactgatggtgattgtgttgatcactgcgttcaccgggatcaccgacgagcaccgactgggcagcgcattcaaggacgcgatgccgttcaccgcgttgctggtggtgttcttcgccgtggtcgcggtgattcacgaccagcaactgttcgcgccgctgattcagtgggtgctggcactgccggccgaccagcaaccggggatgctgttcatcgctaacggcctgctgtcggcgatcagtgacaacgtgttcgttgccacgatctatatcactgaagtaaaacaggctttcctgtccggacacatgagccgcgagcacttcgagacgctggcaattgcgatcaacaccggcaccaatctgccgagcgtggcgacgcccaatggtcaggcggcgtttctgtttctgctgacgtcggcgattgcaccgctggtacggttgtcgtacgggcggatggtgtggatggcgttgccttacaccgtggtgatgggattgctcggctggtacgccgtgagctactggctgtag

SEQ ID NO: 970 - protein, 500 aa, Pseudomonas fluorescens PfO-1
MSGSMAQAFAHNFLGHSPRWYKACIVGFLMLNALVLWSVGPVAAGWLLVIEFIFTLAMALKCYPLMPGGLLLIEALLLKMTTPQALYEELQHNFPVILLLMFMVAGIYFMKDLLLFLFSRLLLGVRSKALLALMFCFLSAFLSAFLDALTVTAVIISAAVGFYSVYHRVASGNDPRQDSEFSDDQHLPQLHHEDLEQFRAFLRSLLMHGAVGTALGGVCTLVGEPQNLLIGHEMGWHFAEFFLKVAPVSLPVLVAGLVTCLLLEKLRWFGYGTLLPDNVRAVLANYAAEDNAERTPRQRAALLVQGCAALILIAGLAFHIAEVGLIGLMVIVLITAFTGITDEHRLGSAFKDAMPFTALLVVFFAVVAVIHDQQLFAPLIQWVLALPADQQPGMLFIANGLLSAISDNVFVATIYITEVKQAFLSGHMSREHFETLAIAINTGTNLPSVATPNGQAAFLFLLTSAIAPLVRLSYGRMVWMALPYTVVMGLLGWYAVSYWL

SEQ ID NO: 971 - DNA, 1500 bp, Saccharophagus degradans 2-40
  CDS (1)..(1500): transl_table=11
atgccgcagtccatgactaacgcgttttggcacaattttctgggccacaccccaaattggtataagaaaacaattttaggtttcttggttatcaatattgttctctcccaagttagtccttttttggctggttgggcgctaattattgagttcatttttactcttgctatggctctcaagtgctaccctttgcagccgggcggcttattggccattcaagctgtgctacttgggctaaccagcgcagactcggtataccatgaagtactcgccaactttaaagtaattctgctacttatgtttatggtggcaggcatctactttatgaaggacatgcttcttttcgtgtttaccaagatcttgcttggtattcgctcgaaactgcttctctctttattgttctcatttgttgcagcagtgctttctgcctttttagatgcgctaacagtaactgccgtactcatcgctgtggctgtaggtttttacgcggtttaccatcgctttgcctcaggtagtgggcacggtaacgaccacgaccactccgcagatgataatgtgcacgatttgcaccgcgaagatttagatactttccgcagctttttgcgcagccttattatgcacggtgcagtaggtaccgccctaggtggcgttgctaccttagttggcgagcctcaaaacttgcttattgcagaaattgctggctggaacttcattgagttctacttggttatggcacctatttctgtgcctgctttaattggtggtttgctcacctgcgcaatactagaaaagacaggtatctgcggctacggagccaaattacccgatagcgtgcgccaaatattggtcgattttgataaaaaggaaacggcaaagcgcgggtttggcgataaggcgcaattacttgtacaagcggttgtcgcagtagtgcttgtatttgcattagccttgcacctagcggaagttggccttattggtttgcttattattgttctgctaaccgcctttaacggcattaccgatgaacaccgcattggtcacgcttttgaagaagcgctgccctttaccgcgctgctagtggtgtttttcgcagttgtggctgttatccacgaccagcatttgtttacaccggttattgattacgttttagccatggaacaaggtgcccaggctcctatgttctttgtggctaacggcgtgttatctatgattagtgataatgtgtttgttgctaccgtgtacattaacgaagtaaaagcggcattcgatgcgggtactatttctcgtgagcattttgatgtacttgctgtagcaattaatgccggcaccaacctacctagcgtggcgacaccaaacggccaagcagcatttttattcctgctcacttctgctcttgccccgcttattcgcctttcgtacggcaaaatggtaataatggcgctgccctacacaatcgttcttggtgcggttggccttgggtctgtaatactcttctactaa

SEQ ID NO: 972 - protein, 499 aa, Saccharophagus degradans 2-40
MPQSMTNAFWHNFLGHTPNWYKKTILGFLVINIVLSQVSPFLAGWALIIEFIFTLAMALKCYPLQPGGLLAIQAVLLGLTSADSVYHEVLANFKVILLLMFMVAGIYFMKDMLLFVFTKILLGIRSKLLLSLLFSFVAAVLSAFLDALTVTAVLIAVAVGFYAVYHRFASGSGHGNDHDHSADDNVHDLHREDLDTFRSFLRSLIMHGAVGTALGGVATLVGEPQNLLIAEIAGWNFIEFYLVMAPISVPALIGGLLTCAILEKTGICGYGAKLPDSVRQILVDFDKKETAKRGFGDKAQLLVQAVVAVVLVFALALHLAEVGLIGLLIIVLLTAFNGITDEHRIGHAFEEALPFTALLVVFFAVVAVIHDQHLFTPVIDYVLAMEQGAQAPMFFVANGVLSMISDNVFVATVYINEVKAAFDAGTISREHFDVLAVAINAGTNLPSVATPNGQAAFLFLLTSALAPLIRLSYGKMVIMALPYTIVLGAVGLGSVILFY

SEQ ID NO: 973 - DNA, 1557 bp, Haemophilus influenzae R2846
  CDS (1)..(1557)
atggagttcactatgacaaacattcaggcttttatgaaaaactttcttggggcaagtccagaatggtacaaacttgccattgtggtttttcttattataaatccaattgttttcttttttattagtccttttattgcgggttggttactcgttgcagaatttattttcacattggcaatggcattaaaatgctaccctcttcaaccgggtggtctattagcaattgaagctattattattggaatgacaaatgccaaacacgtcaaagcagaaattatggcaaactttgaagtgatcttgctactgatatttatggtggcaggtattttctttatgaaacaattactgctttatgtatttactaaattacttgtcaaaattcgttctaaaattgcactttctattgccttttgttttagtgctgcttttttatcggcttttctcgatgctttaacggttgttgctgttatcattagtgtcgcaatgggattttatggtgtgtatcacaaagttgcatcaggcaataatttaattgatgtggttgatatttcagacgatagaaaaattattgaacaacagcacgaaatcttagaaaaattccgtgcattcttacgtagtttaatgatgcatgcgggtgtaggaactgcactcggtggtgtaatgaccgttgttggagaaccacaaaacttaattattgcagaacaagcaaaatggaactttatggaatttttcctccgtatggcacccgtgactattcctgtgtttatctgcggattactcacttgtttcttggtcgaaaaattcaaattatttggttatggcgagaaattaccagacgaagtgtggaaaatcttatcagatttagatcgtactaattcagaaaaaatgtctaaacaagataaaattaaattaggtatgcaagcgttaatcgcaatttggttaattgttggattagcattccatcttgccgcagtcggtttaattggtttaagtatcatcatttttgctacatctttcactggtgtgacggatgaacatactatcggtaaagcctttcaggaatctttaccctttactgcattgctcgttgtattcttttctgttgttgcagtaattattgatcaaaaacttttttcaccaattattcacttcgttctttctgcggaagaaaatacacaacttgctttattctatgtgtttaatggcttgctttcttctatttctgataatgtatttgttgcaacggtttatattaatgaagctaaagctgcactgactaatggagtaattgcaccgcatcaatttgaattgctttctgttgccattaatacaggtacaaacttaccatcagttgcaacaccaaatggacaagctgctttcttattcttattgacttcatcaatttcgccattaattcgcctttcttatggcagaatggtttatatggctttaccttacacgattgtactttcaatcattggtttactggctattgaatttattttaccagctgccacaatttggttagcaagtttaggtttaattttgccaatttaa

SEQ ID NO: 974 - protein, 518 aa, Haemophilus influenzae R2846
MEFTMTNIQAFMKNFLGASPEWYKLAIVVFLIINPIVFFFISPFIAGWLLVAEFIFTLAMALKCYPLQPGGLLAIEAIIIGMTNAKHVKAEIMANFEVILLLIFMVAGIFFMKQLLLYVFTKLLVKIRSKIALSIAFCFSAAFLSAFLDALTVVAVIISVAMGFYGVYHKVASGNNLIDVVDISDDRKIIEQQHEILEKFRAFLRSLMMHAGVGTALGGVMTVVGEPQNLIIAEQAKWNFMEFFLRMAPVTIPVFICGLLTCFLVEKFKLFGYGEKLPDEVWKILSDLDRTNSEKMSKQDKIKLGMQALIAIWLIVGLAFHLAAVGLIGLSIIIFATSFTGVTDEHTIGKAFQESLPFTALLVVFFSVVAVIIDQKLFSPIIHFVLSAEENTQLALFYVFNGLLSSISDNVFVATVYINEAKAALTNGVIAPHQFELLSVAINTGTNLPSVATPNGQAAFLFLLTSSISPLIRLSYGRMVYMALPYTIVLSIIGLLAIEFILPAATIWLASLGLILPI

SEQ ID NO: 975 - DNA, 1557 bp, Haemophilus influenzae R2866
  CDS (1)..(1557)
atggagttcactatgacaaacattcaggcttttatgaaaaactttcttggggcaagtccagaatggtacaaacttgccattgtggtttttcttattataaatccaattgttttcttttttattagtccttttattgcgggttggttactcgttgcagaatttattttcacattggcaatggcattaaaatgctaccctcttcaaccgggtggtctattagcaattgaagctattattattggaatgacaaatgccaaacacgtcaaagcagaaattatggcaaactttgaagtgatcttgctactgatatttatggtggcaggtattttctttatgaaacaattactgctttatgtatttactaaattacttgtcaaaattcgttctaaaattgcactttctattgccttttgttttagtgctgcttttttatcggcttttctcgatgctttaacggttgttgctgttatcattagtgtcgcaatgggattttatggtgtgtatcacaaagttgcatcaggcaataatttaattgatgcggttgatatttcagacgatggaaaaattattgaacaacagcacgaaatcttagaaaaattccgtgcattcttacgtagtttaatgatgcatgcgggtgtaggaactgcactcggtggtgtaatgaccgttgttggagaaccgcaaaacttaattattgcagaacaagcaaaatggaactttatggaatttttcctccgtatggcacccgtgactattcctgtgtttatctgcggattactcacttgtttcttggtcgaaaaattcaaattatttggttatggcgagaaattaccagacgaagtgtggaaaatcttatcagatttagatcgcactaattcagaaaaaatgtctaaacaagataaaattaaattaggtatgcaagcgttaatcgcaatttggttaattcttggattagcattccatcttgccgcagtcggtttaattggtttaagtatcatcatttttgctacgtctttcactggtgtgacggatgaacatactatcggtaaagcctttcaggaatctttaccctttactgcattgctcgttgtattcttttctattgttgcagtaattattgatcaaaaacttttttcaccaattattcacttcgttctttctgcggaagaaaatacacaacttgctttattctatttgtttaatggcttgctttcttctatttctgataatgtatttgttgcaacggtttatattaatgaagctaaagctgcactgactaatggagtaattgcaccgcatcaatttgaattgctttctgttgccattaatacaggtacaaacttaccatcagttgcaaccccaaatggacaagctgctttcttattcttattgacttcatcaatttcgccattaattcgcctttcttatggcagaatggtttatatggctttaccttacacgattgtactttcaatcattggtttactggctattgaatttattttaccagctgccacaatttggttagcaagtttaggtttaattttgccaatttaa

SEQ ID NO: 976 - protein, 518 aa, Haemophilus influenzae R2866
MEFTMTNIQAFMKNFLGASPEWYKLAIVVFLIINPIVFFFISPFIAGWLLVAEFIFTLAMALKCYPLQPGGLLAIEAIIIGMTNAKHVKAEIMANFEVILLLIFMVAGIFFMKQLLLYVFTKLLVKIRSKIALSIAFCFSAAFLSAFLDALTVVAVIISVAMGFYGVYHKVASGNNLIDAVDISDDGKIIEQQHEILEKFRAFLRSLMMHAGVGTALGGVMTVVGEPQNLIIAEQAKWNFMEFFLRMAPVTIPVFICGLLTCFLVEKFKLFGYGEKLPDEVWKILSDLDRTNSEKMSKQDKIKLGMQALIAIWLILGLAFHLAAVGLIGLSIIIFATSFTGVTDEHTIGKAFQESLPFTALLVVFFSIVAVIIDQKLFSPIIHFVLSAEENTQLALFYLFNGLLSSISDNVFVATVYINEAKAALTNGVIAPHQFELLSVAINTGTNLPSVATPNGQAAFLFLLTSSISPLIRLSYGRMVYMALPYTIVLSIIGLLAIEFILPAATIWLASLGLILPI

SEQ ID NO: 977 - DNA, 1587 bp, Vibrio sp. Ex25
  CDS (1)..(1587)
atgccgatatcgctcggaaacgcttttatcaagaactttcttggtaaagcgcctgattggtacaaagttgccattatagccttcttaataattaacccgattgtattcttcctaataaacccatttgttgctgggtggttgctggttgctgaatttattttcacgcttgcaatggcattaaaatgctacccattacaacctggtggtttacttgctattgaagccatcgctatcggcatgactagccctgcgcaagttaagcacgagttggtggcaaatattgaagtattactgcttctggtatttatggttgcgggcatctacttcatgaagcatttattgctgttcatttttaccaaaattttacttggtattcgctccaaaacccttctatcacttgcgttttgctttgccgctgcatttttatctgcgtttttggatgctttgacggttatcgccgttgttatcagtgtggcgatcggtttctactctatctaccacaaagtggcgtcaggtaatccgattggtgaccatgaccacacacaagatgacacgatcactgagctaacgcgtgatgacttagaaaactaccgcgcctttttacgctcattgttgatgcacgctggtgtaggtactgcgttaggtggcgtaaccactatggtaggtgaacctcaaaacttaattattgcagaccaagcgggttggttatttggtgaattcctaatccgtatgtctccagtgacgctacccgtatttttctgcggtctcatcacttgtgctctagtcgaaaagcttaaagtgtttggctacggtgcaaaacttcctaacaacgttcgtcaaatcctcgttgactttgacaatgaagagcgcaaaacgcgtaccaatcaagacgttgcaaagctatgggttcaaggacttattgctgtttggttgatcgtagcattagccttacacttggcggcggtaggcttaattggtctttcagtgatcatcttagcgacggctttcactggcgttattgaagagcattccatgggtaaagcgtttgaagaggctctgcctttcactgcactacttgcggtatttttctcgatcgttgcggtaatcatcgaccaagagttgtttaaaccagttatcgacgcggtgcttgccgttgaagataaaggcactcagttagctctgttctatgtcgcgaatggcttactatcaatggtgtcggataacgtattcgtcggtacggtttacatcaatgaagtaaaaacagcactcattgaaggtctcattactcgcgagcagttcgacttactggcagttgctatcaacactggtactaacctaccatctgttgctacgccaaacggtcaagcggcattcctattcctactcacctcggctctcgctccattaattcgtctgtcttacggtcgaatggttatcatggcgctgccttacaccatcgttcttgcgattgtcgggctaatgggcattatgttcttcctagagcctgcaacggcttctttctacgatgcaggctggattttacctcatagtggtgatctgactcccgtagtctctggcggtcactaa

SEQ ID NO: 978 - protein, 528 aa, Vibrio sp. Ex25
MPISLGNAFIKNFLGKAPDWYKVAIIAFLIINPIVFFLINPFVAGWLLVAEFIFTLAMALKCYPLQPGGLLAIEAIAIGMTSPAQVKHELVANIEVLLLLVFMVAGIYFMKHLLLFIFTKILLGIRSKTLLSLAFCFAAAFLSAFLDALTVIAVVISVAIGFYSIYHKVASGNPIGDHDHTQDDTITELTRDDLENYRAFLRSLLMHAGVGTALGGVTTMVGEPQNLIIADQAGWLFGEFLIRMSPVTLPVFFCGLITCALVEKLKVFGYGAKLPNNVRQILVDFDNEERKTRTNQDVAKLWVQGLIAVWLIVALALHLAAVGLIGLSVIILATAFTGVIEEHSMGKAFEEALPFTALLAVFFSIVAVIIDQELFKPVIDAVLAVEDKGTQLALFYVANGLLSMVSDNVFVGTVYINEVKTALIEGLITREQFDLLAVAINTGTNLPSVATPNGQAAFLFLLTSALAPLIRLSYGRMVIMALPYTIVLAIVGLMGIMFFLEPATASFYDAGWILPHSGDLTPVVSGGH

SEQ ID NO: 979 - DNA, 1602 bp, Shewanella sp. ANA-3
  CDS (1)..(1602): transl_table=11
atgccgatgacaatgagtcaggcgtttattgggaacttcttagggaattctcctaagtggtacaagatcgcaatactgtcgtttttaataatcaatccaatactctttttctatgtcagcccctttgtggctggttgggtattagtacttgagtttatttttaccttggcaatggcgctaaaatgctacccattacaacccggtggtctattagcgattgaagctgtcgccatcggcatgacctcagcaagccaagtgctgcacgaaattgaagcgaaccttgaagtgctattactgctggtatttatggtggccggcatttacttcatgaagcagctactgctgtttgtgttcactaagatgatcactaaagtacgttcgaaaatcttagtgtctttgttgttctgtctagcttccgccttcttatccgccttcttagatgcgttaactgttatcgccgtgattatcaccgtggcggttggtttttactccatctatcacaaagtcgcctcaggtaaagatttctcggccgatcatgaccatacctccgaaggcaaaaatgacgatggtgaaaatcagctcaacgaagacgagctggaatccttccgtggtttcctacgtaacctgttaatgcacgccggtgtcggtactgcattgggtggcgtgtgtactatggtgggtgaaccgcaaaacttaattattgcagctcaagcaaactggcaatttggcgaatttgcgatccgtatgtcacctgtgacagtgcctgtattgttcgcaggtatcctcacctgctttatcgtcgagaaattccgttggtttggttatggtgcccagcttccggatgcggtgcataaaatcctatgtgattacgccgcctatgaagacgcacgtcgtaccaacaaagacaagatgaagctggttatccaagcctttgtgggtgtgtggttgattgcgggtctcgcgctgcacttagcgtctgtgggcttgattggtctgtctgtgatcatcttaaccacggcctttaacggtattaccgatgagcatgcgctaggtaaagccttcgaagaagccctgccctttacggccttgttagcggtgttctttgcggttgttgccgtaatcatcgaccaacaactgtttggccctgtcatccaatgggcactaaaccatgaaggtaatacccaattagtgatcttctatatcgctaacggtttactctctatggtcagtgataacgtgtttgtgggcacggtttacattaacgaggtcaaagccgccctgattaacggtcaaatcacccgggatcaattcgacctgttagcagttgcgattaacactggtactaacttgccttcggtggcaacaccaaacggtcaagccgcattcctgttcttattgacctcggctcttgcaccgctgatccgtttatcctacggcagaatggtttggatggcattgccctacactatcgtgctatcgattgtgggcgtgatggctattcaatcgggcttcttagagcagatgacccagtacttctatgactcccatgcaatattgcaccacagtgttaaagaagcgttagcgcctgctgcagctcactaa

SEQ ID NO: 980 - protein, 533 aa, Shewanella sp. ANA-3
MPMTMSQAFIGNFLGNSPKWYKIAILSFLIINPILFFYVSPFVAGWVLVLEFIFTLAMALKCYPLQPGGLLAIEAVAIGMTSASQVLHEIEANLEVLLLLVFMVAGIYFMKQLLLFVFTKMITKVRSKILVSLLFCLASAFLSAFLDALTVIAVIITVAVGFYSIYHKVASGKDFSADHDHTSEGKNDDGENQLNEDELESFRGFLRNLLMHAGVGTALGGVCTMVGEPQNLIIAAQANWQFGEFAIRMSPVTVPVLFAGILTCFIVEKFRWFGYGAQLPDAVHKILCDYAAYEDARRTNKDKMKLVIQAFVGVWLIAGLALHLASVGLIGLSVIILTTAFNGITDEHALGKAFEEALPFTALLAVFFAVVAVIIDQQLFGPVIQWALNHEGNTQLVIFYIANGLLSMVSDNVFVGTVYINEVKAALINGQITRDQFDLLAVAINTGTNLPSVATPNGQAAFLFLLTSALAPLIRLSYGRMVWMALPYTIVLSIVGVMAIQSGFLEQMTQYFYDSHAILHHSVKEALAPAAAH

SEQ ID NO: 981 - DNA, 1602 bp, Shewanella sp. MR-7
  CDS (1)..(1602): transl_table=11
atgccgatgacaatgagtcaggcgtttattgggaacttcttagggaattctcctaagtggtacaagatcgcaatactgtcgtttttaataatcaatccaatactctttttctatgtcagcccctttgtggctggttgggtattagtgcttgaatttatttttaccttggcaatggcgctgaaatgctatccattacaacccggtggtttattagcgattcaagcggtcgccatcggtatgacctctgcgagccaagtgctgcacgaaattgaagccaaccttgaagtattattactgctggtgtttatggtggctggcatttacttcatgaagcagctactgctattcgcgtttactaagatgatcactaaagtacgctcgaaaatcttagtgtctttgatgttctgtctagcttcagccttcttatccgccttcctagatgcattaaccgttatcgccgtgattattactgtggcggtcggattttactctatctatcacaaagtggcttcgggtaaagatttctctgcagatcatgaccatacctctgaaggaaaaaatgaagatggtgaaaaccagctcaacgaagaagaattagagtccttccgtggtttcctacgtaacctattgatgcacgccggtgtcggtaccgcattaggtggcgtatgtactatggtgggagaaccacaaaacttaattatcgctgcgcaggctaattggcaatttggtgagttcgcgatccgtatgtctcccgtaaccgtgccagtgttgtttgctggtatcctaacttgctttttagtcgaaaaattacgttggttcggttatggtgcccagctaccggaagccgtgcataaaatcctttgtgattacgccgcctatgaagacgcgcgtcgtaccaataaagataagatgaagctggttatccaagcctttgttggcgtttggttaattgcaggtcttgcgctgcacttagcatcagtgggcttgattggtctgtctgtgatcattttaaccacagcctttaacggtattaccgatgagcatgcactgggtaaagcgtttgaagaagccctgccctttacggcgttgttagcggtgttctttgcggttgtggccgtgattatcgaccaacaactgtttggcccagtgatccaatgggcactaaaccatgaaggtaatacccaattagtgatcttctatatcgctaacgggttactctctatggtcagtgataacgtgtttgtcggcactgtctatattaacgaagtcaaagccgccctgattaacggtcaaattacccgcgatcaattcgaccttttagcggttgcgattaacactggtactaacttgccttcggtggcgacaccaaacggtcaagcagcattcctgttcttactgacctccgcccttgcaccgcttatccgtttatcctacggcagaatggtgtggatggcactaccctacactatcgtgttatcgattgtcggtgtaatggctatcgaatcaggcttcttagagcagatgacgcaatacttctatgattcccatgcaatcattcaccacagtgttaaagaagcgttagcacctgcggcagctcactaa

SEQ ID NO: 982 - protein, 533 aa, Shewanella sp. MR-7
MPMTMSQAFIGNFLGNSPKWYKIAILSFLIINPILFFYVSPFVAGWVLVLEFIFTLAMALKCYPLQPGGLLAIQAVAIGMTSASQVLHEIEANLEVLLLLVFMVAGIYFMKQLLLFAFTKMITKVRSKILVSLMFCLASAFLSAFLDALTVIAVIITVAVGFYSIYHKVASGKDFSADHDHTSEGKNEDGENQLNEEELESFRGFLRNLLMHAGVGTALGGVCTMVGEPQNLIIAAQANWQFGEFAIRMSPVTVPVLFAGILTCFLVEKLRWFGYGAQLPEAVHKILCDYAAYEDARRTNKDKMKLVIQAFVGVWLIAGLALHLASVGLIGLSVIILTTAFNGITDEHALGKAFEEALPFTALLAVFFAVVAVIIDQQLFGPVIQWALNHEGNTQLVIFYIANGLLSMVSDNVFVGTVYINEVKAALINGQITRDQFDLLAVAINTGTNLPSVATPNGQAAFLFLLTSALAPLIRLSYGRMVWMALPYTIVLSIVGVMAIESGFLEQMTQYFYDSHAIIHHSVKEALAPAAAH

SEQ ID NO: 983 - DNA, 1584 bp, Pseudoalteromonas tunicata D2
  CDS (1)..(1584): transl_table=11
atgcagcaaacagtttttacagctctggccaaaaactttctcggtaatgcgccaaattggtacaaactaactattattgcatttcttgctatcaatcctgttatttactctttcagcccttatctagctgggtgggctcttgttttagagtttatttttacgcttgctatggcattaaaatgttatccattgcaacctggtggtttgctggctattgaagctgtgatgatgggtatgacaagtgctggtcaagtggaacatgagatagctcaaaatcttgatgttattttactgcttattttcatgattgctggtatttatttcatgaaagatttgctgctatttatctttactaagttagttattcggctaaagagtaaaacgtacttatctctcgcttttgctttagcggccgcttttttatctgcatttttagatgcgctaaccgttatggccgttataatttctgtcgctatgggtttttacagcatttatcataaagtggcatcaggtaaagattatgcttcaaatcacgatgtaaatgatgatgaacaagtcgcgattttaaaacgtgaagaacttgaagagtttcgagctttcttgagaaacttgctaatgcatgcatcaatcggtactgcactaggtggagtatgtactatggtaggtgagccacaaaacctcattatcgcagaacgtgcaggttgggactttggcgaattcttacttcgaatggcaccgattactgttcctgttgttttatcaggcttactcactacgttttttttggagaaaaccaaaacttttggttatggagcaaagcttcctcaaacggttcgtcaaatccttgttgattttgatacccaccaagacagtaaacgctcaaaaagagaaagcgttaacttaattgttcaaggctttattgctgtttggcttgtaatcgctttagctggacattttgcagctgtggggctgattggtcttaccattatcatctttactaccgcttcagcaggtatcattgaagagcatcgcatcggtaaagcatttgaagaagccttaccatttacagcattactttgtgtcttcttttcaatagttgcggtaattattgatcaacatttatttactccggtgatcacttgggtactgacttttgaaggaaatatgcagctagtcatgttctttatggcaaacgggatattgtctatggtcagcgataatgtatttgttggtacggtgtatatcaatgaagttgcagcagcgtggcaatcgggtcaaattactcgtgatcaatttgatttactcgctgtagcaattaatacaggaacaaacttaccaagtatcgcaacgcctaatgggcaagcggcattcttatttttattaacttcaacattagcaccagtacttcgcctatcctatgggcgcatggtttatatggccctaccttatacaattgtacttacgcttgttggtttatttttcacctatcaaagcttggctgattggaccaacattttatatcactggcatctgattgagcatcatgtagtgaccacagtatcgggtgttactacaggacattaa

SEQ ID NO: 984 - protein, 527 aa, Pseudoalteromonas tunicata D2
MQQTVFTALAKNFLGNAPNWYKLTIIAFLAINPVIYSFSPYLAGWALVLEFIFTLAMALKCYPLQPGGLLAIEAVMMGMTSAGQVEHEIAQNLDVILLLIFMIAGIYFMKDLLLFIFTKLVIRLKSKTYLSLAFALAAAFLSAFLDALTVMAVIISVAMGFYSIYHKVASGKDYASNHDVNDDEQVAILKREELEEFRAFLRNLLMHASIGTALGGVCTMVGEPQNLIIAERAGWDFGEFLLRMAPITVPVVLSGLLTTFFLEKTKTFGYGAKLPQTVRQILVDFDTHQDSKRSKRESVNLIVQGFIAVWLVIALAGHFAAVGLIGLTIIIFTTASAGIIEEHRIGKAFEEALPFTALLCVFFSIVAVIIDQHLFTPVITWVLTFEGNMQLVMFFMANGILSMVSDNVFVGTVYINEVAAAWQSGQITRDQFDLLAVAINTGTNLPSIATPNGQAAFLFLLTSTLAPVLRLSYGRMVYMALPYTIVLTLVGLFFTYQSLADWTNILYHWHLIEHHVVTTVSGVTTGH

SEQ ID NO: 985 - DNA, 1587 bp, Photobacterium sp. SKA34
  CDS (1)..(1587): transl_table=11
atggctatatcgctagggaatgcctttatcaaaaattttttgggtaaggcacctgactggtacaaaattgcaatcattacttttttgatcattaaccctattgtattttttcttattgatccgtttgttgctggctggttgttagtaatcgaattcatctttacgctagcaatggcattaaaatgttatccattacagcctggtggtttattggcaatagaagctgttgctattgggatgacaagtccagatcaagtgaaacatgaacttgttgcaaatattgaagttctactcttactggtctttatggtcgcgggtatctacttcatgaaacagctattgttgttcatgtttactaaaatattaatcggcatccgctctaaaattttactttctctcgcatttagtgtgatggccgcttttctttccgctttccttgatgcactaaccgttattgcggttgttatcagtgtaacggtaggcttctatagtatttatcataaggttgcttcagggcaagatcctcactctaatcatgatcataccaatgataatcacgttccagagctaagccgtgatgatttagaaaactaccgtgcattcctccgtagcttgctaatgcatgccggtgtgggtacagcattaggtggcgtaatgacaatggtaggtgaacctcaaaatttaatcattgccgatcaagcaggttgggattttggtgaatttattattcgtatggcgcccgttactgtccctgtttttttctgtggcttgttaacctgtgcactggttgagaaatttaaaatctgtggctatggtgcagaattacctgaaaatgttcgccaaattttagtcgactttgataatgaagaacgtaaatcacgtactaaccttgactacgctaaattaattattcaagcagcaattgcagtatggctaattatcggccttgctatgcacttagctgcggttggtttaatcggtttaacagtgattattttggctacatcgtttactggtatcaccgaagagcacgctctgggtaaagcatttgaagaagcgctaccctttacagcactacttgcggtattcttctctatcgttgcggtaatcattgaccaacaactattcgcacctattattaattgggtattaagccttgaaggtagttcacagcttactatgttctacattgctaatggcttgctatctatggtgtcagacaacgtattcgttggaacggtatatattaacgaagtaaaaactgcgctaacaaacggtgttattaaccgaagtcagtttgatatgttagccgttgctatcaatacaggtactaacctaccatcagtagcaacaccaaatggtcaagcagcgttcttgtttgctttaacctcggcaattgcaccacttatccgtctttcttacggtcgtatggtatacatggcgttgccttacaccattgtacttgcatccgtgggtttggccggcattgagctgatgctagtcccaatgacagaatggttttataccatgggctggatcactgatgcatcatcagcggccgcaacaataccggcacttgctcactaa

SEQ ID NO: 986 - protein, 528 aa, Photobacterium sp. SKA34
MAISLGNAFIKNFLGKAPDWYKIAIITFLIINPIVFFLIDPFVAGWLLVIEFIFTLAMALKCYPLQPGGLLAIEAVAIGMTSPDQVKHELVANIEVLLLLVFMVAGIYFMKQLLLFMFTKILIGIRSKILLSLAFSVMAAFLSAFLDALTVIAVVISVTVGFYSIYHKVASGQDPHSNHDHTNDNHVPELSRDDLENYRAFLRSLLMHAGVGTALGGVMTMVGEPQNLIIADQAGWDFGEFIIRMAPVTVPVFFCGLLTCALVEKFKICGYGAELPENVRQILVDFDNEERKSRTNLDYAKLIIQAAIAVWLIIGLAMHLAAVGLIGLTVIILATSFTGITEEHALGKAFEEALPFTALLAVFFSIVAVIIDQQLFAPIINWVLSLEGSSQLTMFYIANGLLSMVSDNVFVGTVYINEVKTALTNGVINRSQFDMLAVAINTGTNLPSVATPNGQAAFLFALTSAIAPLIRLSYGRMVYMALPYTIVLASVGLAGIELMLVPMTEWFYTMGWITDASSAAATIPALAH

SEQ ID NO: 987 - DNA, 1551 bp, Flavobacteria bacterium BBFL7
  CDS (1)..(1551): transl_table=11
atgttcaagtcttttttaggtaatagccctacatggtttaagtcaaccatattagcatttttagtttttaatactgccgcatattttgttcttgatggaacggtaatgggttggatttttatagcagagtttatattctgtcttgcgatggctttaaaatgttatcctttacagtccggtggtttactagctattcaagttattgcattaggattaacacatcctatgtataaagtcgatcatgaaacacataaggtcgtattagatgatttaggtaataaagtattaggtggtgtttatgcagaagtagcacaaaacctagaggtgattttgctgttagtgtttatggtagcgggaatttattttatgaaacctctacttatgtatatttttgtaaaactgtttacaaaggtaaaatctaaaatagctctttctctattttttgtactaatcagtgctgtgttatctgcctttttagatgctcttacagttacagcagttctaattagtgtcggtctaggtttttataatgtttatcataaaatacattctagtgatctagatttagatcatgataatacattggataggaaacagctgagcggtgaaacgttagaggattttcgttcattcttgcgtagtttagtgatgcatggtgtggtagggacagcgttaggtggtgtttgtaccattgtaggtgaacctcaaaatttacttatcggtactaaaatgaatacagccttgccatatgaatatggatttattgaatttttcttacatatggcacctattactattccagtattaattgcaggtttgatcacaaccgtgctactagaagtaacaaaaacatttggatttggtcagaaaatgccgcctgttgttaggcaaattattgaaggctggatggagaaacgagaccaagagcgtacaagtaaggaaaagtatgggttagttgttcaaggagtttcagctattctattaatcattggtctagcattgcatattgcaccagttggatttataggtcttgcattaatagtgattcaaactgcgtttatggggattactgatgagcacagcttaggaaaagcctttgaagaagcacttccatttacaggattattagttgtgttttttgtgattgttgcgatgattcatgatcagcatttatttgcacctattatagaatgggcattaagtcaggaccctagtagtcaaccagctatattttacttggcaaatggtgttttgagtatgatatcagataatgtttttgtagcaactgtttatataaatgaagtaggaaatgcttatgacgcaggaaaaataacattggagcaatacgagcatttggccgttgcgatcaacacgggaacaaatattcctagtgtagcaacacctaatggtcaggcagctttcttatttttattaacatctgcattagcacctgttatcaatctttcatatggaaaaatggttaaaatggctttcccatataccatagtgttaaccattgttggactggcatgtgttatcatgtttttataa

SEQ ID NO: 988 - protein, 516 aa, Flavobacteria bacterium BBFL7
MFKSFLGNSPTWFKSTILAFLVFNTAAYFVLDGTVMGWIFIAEFIFCLAMALKCYPLQSGGLLAIQVIALGLTHPMYKVDHETHKVVLDDLGNKVLGGVYAEVAQNLEVILLLVFMVAGIYFMKPLLMYIFVKLFTKVKSKIALSLFFVLISAVLSAFLDALTVTAVLISVGLGFYNVYHKIHSSDLDLDHDNTLDRKQLSGETLEDFRSFLRSLVMHGVVGTALGGVCTIVGEPQNLLIGTKMNTALPYEYGFIEFFLHMAPITIPVLIAGLITTVLLEVTKTFGFGQKMPPVVRQIIEGWMEKRDQERTSKEKYGLVVQGVSAILLIIGLALHIAPVGFIGLALIVIQTAFMGITDEHSLGKAFEEALPFTGLLVVFFVIVAMIHDQHLFAPIIEWALSQDPSSQPAIFYLANGVLSMISDNVFVATVYINEVGNAYDAGKITLEQYEHLAVAINTGTNIPSVATPNGQAAFLFLLTSALAPVINLSYGKMVKMAFPYTIVLTIVGLACVIMFL

SEQ ID NO: 989 - DNA, 1506 bp, marine gamma proteobacterium HTCC2207
  CDS (1)..(1506): transl_table=11
atgcagccaacgatgtatcaggcgtttcaaaaaaactttctgggcaattccccaggttggtatgaaaaggcgattattgccttcctaataatcaaccccatcgcactctgggcttttggtcccttcgtgaccggatggatgctgattgctgaatttattctaacccttgctatggcgcttaaatgctacccattgcagcccggcggcctgctcgccatcgaggcaatcttactcggcatggcctcgcctgaggcggtctatcaagagacagtgtcaaactttcaagtgattctgctgctgatgtttatggtcgccggcatctactttatgcgcgacatgttgttatttgttttcaccaatatactgctcaaggtgaaatcaaaaaccaccctgtcatttctattctgttttgccggtgcatttctctctgcgtttctcgatgcactgacggttacagcagtactgattacgatttcggtcggcttctactcggtgttccacaaagtggcatcgggtaagaaaattgtcgatgacggacatgaccatagcactgacgaaaacctcgcaggcaatcaacgtgcaaacttagatcaattccgcgccttcttgcgcagtttgattatgcacggagctgtgggtaccgcactcggtggagtgaccacggttgtgggcgagccgcaaaacctattgatcgctgagaaagccggctgggaatttattgagttcttcctcaccatggcgccagtgaccatgcctgttttggtctgtggtttagccacttgcattatcttggagaaaaccaaaattcttggttacggtgcagagatgccagaagaagtccgcgtcattctgcaagcctccagtgaccacgacaactcacgtcgcactcagtacgacaaggccgctttgattattcaggttattgtctctctgattctggttttaggactggcgtttcactgggctccagtgggcttgattggcttgatggtgattgtacttctgactgcctttaacggtgtcaccgaagagcatcgcattggccacgcctttgaagaggccctgccctttaccgctcttttagtggtgttctttgccattgttgcagtgatccacgaacagcacctattctctccagttatcggctgggtgctggcaatggatgaatctgtgcagccaggcatgttcttcctcgccaacggtgtgctgtcgatgatcagtgacaacgtttttgtggcaacggtttacatcaacgaagtcagagcagtgttagacgccggtagtattagccgtgagcacttcgataagctggttattgcgattaacaccggtaccaacttgccgagtgttgcaacccctaacggacaggctgcattcctcttcctgctgacctcagcgatcgcaccacttatccgcctctcctatatgcgcatggtgcttatggcgctgccatatacattggtactgaccgcagttggtttgtggggcgttgtgtatatgatctag

SEQ ID NO: 990 - protein, 501 aa, marine gamma proteobacterium HTCC2207
MQPTMYQAFQKNFLGNSPGWYEKAIIAFLIINPIALWAFGPFVTGWMLIAEFILTLAMALKCYPLQPGGLLAIEAILLGMASPEAVYQETVSNFQVILLLMFMVAGIYFMRDMLLFVFTNILLKVKSKTTLSFLFCFAGAFLSAFLDALTVTAVLITISVGFYSVFHKVASGKKIVDDGHDHSTDENLAGNQRANLDQFRAFLRSLIMHGAVGTALGGVTTVVGEPQNLLIAEKAGWEFIEFFLTMAPVTMPVLVCGLATCIILEKTKILGYGAEMPEEVRVILQASSDHDNSRRTQYDKAALIIQVIVSLILVLGLAFHWAPVGLIGLMVIVLLTAFNGVTEEHRIGHAFEEALPFTALLVVFFAIVAVIHEQHLFSPVIGWVLAMDESVQPGMFFLANGVLSMISDNVFVATVYINEVRAVLDAGSISREHFDKLVIAINTGTNLPSVATPNGQAAFLFLLTSAIAPLIRLSYMRMVLMALPYTLVLTAVGLWGVVYMI

SEQ ID NO: 991 - DNA, 1587 bp, Vibrio parahaemolyticus
  CDS (1)..(1587): transl_table=11
atgccgatatcgctcggaaacgcttttatcaagaatttccttggtaaagcgcctgattggtacaaagttgccattatagccttccttattattaacccgattgttttcttcctaataaatccatttgttgctgggtggttgctcgtcgcggaatttattttcacgcttgcaatggctttaaaatgctacccattacaacctggtggtttacttgcaattgaagctattgctattggcatgaccagcccagcgcaagtaaaacatgagttggttgcgaatatagaagtattactacttttagtattcatggttgcgggtatctacttcatgaaacagcttctgctgttcatcttcaccaaaatcctgcttggtattcgttcaaaaactctgctttcgcttgcattctgtttcgcagccgcgtttttgtcagcattcttagatgcgttgacagtaatcgctgttgtcatcagcgtagcagttggtttctactcgatttaccacaaagttgcttcaggtaacccaattggcgatcacgaccatactcaagacgacaccatcacagaactgactcgtgatgaccttgaaaactatcgtgcattcctacgttcgctgcttatgcacgctggtgtgggtaccgcgctgggcggcgtaacaacgatggttggtgaacctcaaaaccttatcattgcagaccaagcgggttggttatttggtgaattcctaatccgtatgtctcctgtgacgttaccagtatttatctgtggtcttattacctgtgcattggttgagaagctaaaagtatttggttacggcgcacaactgcctgataacgtacgtcaaatccttgtggactttgaccgcgaagaacgtaagacacgtacaaaccaagacgtcgcaaaactgtgggtacaaggtattatcgccgtttggctgattgtcgcgttagcgcttcacttagcagccgttggcctgattggtctgtctgtcattatcctagcaacgtcatttactggcgtcattgaagagcactcaatgggcaaagcatttgaagaggccctgcctttcacagccctactcgcggttttcttctcgatcgttgcagtaatcattgaccaagagctatttaaacctgttattgacgccgtgttagctgttgaagacaaaggcacacagcttgccctcttctacgttgcgaacggtttgttatcgatggtttcggacaacgtattcgtaggtacggtatacatcaacgaagtgaaatcagcccttatggaaggcttgatcacgcgtgaacagttcgacctgttagcagttgcaatcaacaccggtacaaacttaccttctgttgcaacgccaaacggtcaagccgctttcctattcctactaacgtctgcgctagcaccgttaattcgtctgtcttacggtcgaatggtagtgatggcattgccatacactgttgttttggcgattgtaggtctgatgggcatcatgttcttcctagagccagcaacagcgtctttctacgatgcgggctggattgcacctcataccggtgatctgactccagttgtgtctggcggacactaa

SEQ ID NO: 992 - protein, 528 aa, Vibrio parahaemolyticus
MPISLGNAFIKNFLGKAPDWYKVAIIAFLIINPIVFFLINPFVAGWLLVAEFIFTLAMALKCYPLQPGGLLAIEAIAIGMTSPAQVKHELVANIEVLLLLVFMVAGIYFMKQLLLFIFTKILLGIRSKTLLSLAFCFAAAFLSAFLDALTVIAVVISVAVGFYSIYHKVASGNPIGDHDHTQDDTITELTRDDLENYRAFLRSLLMHAGVGTALGGVTTMVGEPQNLIIADQAGWLFGEFLIRMSPVTLPVFICGLITCALVEKLKVFGYGAQLPDNVRQILVDFDREERKTRTNQDVAKLWVQGIIAVWLIVALALHLAAVGLIGLSVIILATSFTGVIEEHSMGKAFEEALPFTALLAVFFSIVAVIIDQELFKPVIDAVLAVEDKGTQLALFYVANGLLSMVSDNVFVGTVYINEVKSALMEGLITREQFDLLAVAINTGTNLPSVATPNGQAAFLFLLTSALAPLIRLSYGRMVVMALPYTVVLAIVGLMGIMFFLEPATASFYDAGWIAPHTGDLTPVVSGGH

SEQ ID NO: 993 - DNA, 1503 bp, Pseudomonas aeruginosa
  CDS (1)..(1503): transl_table=11
gtgagcagtcccctgagccaggctttcgcacagaacttcctcgggcattcgccgcgctggtacaagctgacggtgctcgccttcctcttgctcaaccccctgctgctatggctggccgggccggtgacaagcgcctgggtgctggtcggcgagttcatcttcaccctggccatggcgctgaaatgctatccgctacagccgggtggcctgttggtgctggaggcgctgctgcttggcctggctacccccgaggcgctctatgcggaattgcagcacaacttcccggtgctcctgctgctgatgttcatggtcgccggcatctacttcatgaaggacctgctgctcctgctgttttcccgcctgctgctcggcgtgcgctcgaagaccctgctatcgctcctgttctgcctgctggccgccctcctctcggccttcctcgacgccctcaccgtgaccgccgtggtgatcagcgtggcggtggcattcttcgccgtgtatcaccgggtcgcttcggggcagcgcgccagcgaggactacgatcccgccaccgaccgccaggtccccgagctgcaccgggcccatctcgaggaattccgcgccttcctccgcagcctgctcatgcacgcggcggtcggcaccgcgctgggcggcgtctgcaccctggtgggagagccgcagaacctgctgatcggccacgaggccggctggcatttcgtcgagttcttccgccaggtcgcgccggtatccatgccggtactggcggccggcctgctgacctgcgtgctgctggagaagagccgccgcttcggctatggcgcccagttgccggcggcggtgcgccaggtgctcgccgagtacgccgccagcgaaagccgcaaacgcggagcgcagcagaaggccgcgctgctggtgcaggccctggcggcgctggtactgatcgtcgggctggccctgcatgtcgccgaggtcggcctgatcggcctgttggtgatcgtgctgatcactgccttcaccggcgtcaccgacgaacaccagatcggccgcgccttccaggaggccctgccgttcactgcgctgctggtggtgttcttcgcggtggtcgcggtgatccaccagcagcacctgttcaccccgatcatccaggcggtgctggcgctgccggcggaacaccagccgggcatgctgttcatcgccaacggcctgctctcggcgatcagcgacaacgtattcgtcgccaccatctacatcaccgaggtgaaacaggcgctggatgccggccacatgagccgcgagcatttcgataccctggcggtggcgatcaataccggcaccaacctgcccagcgtagcgacgcccaacggccaggcggcgttcctcttcctgctgacctcctccatcgccccgctggtgcgcctgtcgtacggccgcatggtctggatggcgctaccctacaccctggtgatgggcggcctgggctggtgggcggtcagtcattggctttga

SEQ ID NO: 994 - protein, 500 aa, Pseudomonas aeruginosa
MSSPLSQAFAQNFLGHSPRWYKLTVLAFLLLNPLLLWLAGPVTSAWVLVGEFIFTLAMALKCYPLQPGGLLVLEALLLGLATPEALYAELQHNFPVLLLLMFMVAGIYFMKDLLLLLFSRLLLGVRSKTLLSLLFCLLAALLSAFLDALTVTAVVISVAVAFFAVYHRVASGQRASEDYDPATDRQVPELHRAHLEEFRAFLRSLLMHAAVGTALGGVCTLVGEPQNLLIGHEAGWHFVEFFRQVAPVSMPVLAAGLLTCVLLEKSRRFGYGAQLPAAVRQVLAEYAASESRKRGAQQKAALLVQALAALVLIVGLALHVAEVGLIGLLVIVLITAFTGVTDEHQIGRAFQEALPFTALLVVFFAVVAVIHQQHLFTPIIQAVLALPAEHQPGMLFIANGLLSAISDNVFVATIYITEVKQALDAGHMSREHFDTLAVAINTGTNLPSVATPNGQAAFLFLLTSSIAPLVRLSYGRMVWMALPYTLVMGGLGWWAVSHWL

SEQ ID NO: 995 - DNA, 1569 bp, Haemophilus influenzae
  CDS (1)..(1569): transl_table=11
gtgataaaaataatggagttcactatgacaaacattcaggcttttatgaaaaactttcttggggcaagtccagaatggtacaaacttgccattgtggtttttcttattataaatccaattgttttcttttttattagtccttttattgcgggttggttactggttgcagaatttattttcacattggcaatggcattaaaatgctaccctcttcaaccaggtggtctattagcaattgaagctattattattggaatgacaaatgccaaacacgtcaaagcagaaattatggcaaactttgaagtgatcttgctactgatatttatggtggcaggtattttctttatgaaacaattactgctttatgtatttactaaattacttgtcaaaattcgttctaaaattgcactttctattgccttttgttttagtgctgcttttttatcggcttttctcgatgctttaacggttgttgctgttatcattagtgtcgcaatgggattttatggtgtgtatcacaaagttgcatcaggcaataatttaattgatgcggttgatatttcagacgatagaaaaattattgaacaacagcacgaaatcttagaaaaattccgtgcattcttacgtagtttaatgatgcatgcgggtgtaggaactgcactcggtggtgtaatgaccgttgttggagaaccacaaaacttaattattgcagaacaagcaaaatggaactttatggaatttttcctccgtatggcacccgtgactattcctgtgtttatctgcggattactcacttgtttcttggtcgaaaaattcaaattatttggttatggcgagaaattaccagacgaagtgtggaaaatcttatcagatttagatcgcactaattcagaaaaaatgtctaaacaagataaaattaaattaggtatgcaagcgttaatcgcaatttggttaattgttggattagcattccatcttgccgcagtcggtttaattggtttaagtatcatcatttttgctacgtctttcactggtgtgacggatgaacatactatcggtaaagcctttcaggaatctttaccctttactgcattgctcgttgtattcttttctgttgttgcagtaattattgatcaaaaacttttttcaccaattattcacttcgttctttctgcggaagaaaatacacaacttgctttattctatttgtttaatggcttgctttcttctatttctgataatgtatttgttgcaacggtttatattaatgaagctaaagctgcactgactaatggagtaattgcaccgcatcaatttgaattgctttctgttgccattaatacaggtacaaacttaccatcagttgcaacaccaaatggacaagctgctttcttattcttattgacttcatcaatttcgccattaattcgcctttcttatggcagaatggtttatatggctttaccttacacgattgtactttcaatcattggtttactggctattgaatttattttaccagctgccacaatttggttagcaagtttaggtttaattttgccaatttaa

SEQ ID NO: 996 - protein, 522 aa, Haemophilus influenzae
MIKIMEFTMTNIQAFMKNFLGASPEWYKLAIVVFLIINPIVFFFISPFIAGWLLVAEFIFTLAMALKCYPLQPGGLLAIEAIIIGMTNAKHVKAEIMANFEVILLLIFMVAGIFFMKQLLLYVFTKLLVKIRSKIALSIAFCFSAAFLSAFLDALTVVAVIISVAMGFYGVYHKVASGNNLIDAVDISDDRKIIEQQHEILEKFRAFLRSLMMHAGVGTALGGVMTVVGEPQNLIIAEQAKWNFMEFFLRMAPVTIPVFICGLLTCFLVEKFKLFGYGEKLPDEVWKILSDLDRTNSEKMSKQDKIKLGMQALIAIWLIVGLAFHLAAVGLIGLSIIIFATSFTGVTDEHTIGKAFQESLPFTALLVVFFSVVAVIIDQKLFSPIIHFVLSAEENTQLALFYLFNGLLSSISDNVFVATVYINEAKAALTNGVIAPHQFELLSVAINTGTNLPSVATPNGQAAFLFLLTSSISPLIRLSYGRMVYMALPYTIVLSIIGLLAIEFILPAATIWLASLGLILPI

SEQ ID NO: 997 - DNA, 20 bp, Artificial sequence
  primer
atggagatctcctggggccg

SEQ ID NO: 998 - DNA, 25 bp, Artificial sequence
  primer
ttaaagcgttgctatccagcccatt

SEQ ID NO: 999 - protein, 519 aa, Artificial sequence
  consensus sequence
  Variant (2)..(4): Xaa in position 2 to 4 is any amino acid
  Variant (9)..(10): Xaa in position 9 to 10 is any amino acid
  Variant (12)..(12): Xaa in position 12 is any amino acid
  Variant (16)..(17): Xaa in position 16 to 17 is any amino acid
  Variant (19)..(20): Xaa in position 19 to 20 is any amino acid
  Variant (23)..(24): Xaa in position 23 to 24 is any amino acid
  Variant (27)..(32): Xaa in position 27 to 32 is any amino acid
  Variant (33)..(33): Xaa in position 33 is any or no amino acid
  Variant (36)..(36): Xaa in position 36 is any amino acid
  Variant (40)..(40): Xaa in position 40 is any amino acid
  Variant (43)..(43): Xaa in position 43 is any amino acid
  Variant (69)..(71): Xaa in position 69 to 71 is any amino acid
  Variant (75)..(78): Xaa in position 75 to 78 is any amino acid
  Variant (79)..(99): Xaa in position 79 to 99 is any or no amino acid
  Variant (101)..(102): Xaa in position 101 to 102 is any amino acid
  Variant (104)..(106): Xaa in position 104 to 106 is any amino acid
  Variant (108)..(109): Xaa in position 108 to 109 is any amino acid
  Variant (111)..(111): Xaa in position 111 is any amino acid
  Variant (115)..(115): Xaa in position 115 is any amino acid
  Variant (126)..(126): Xaa in position 126 is any amino acid
  Variant (130)..(131): Xaa in position 130 to 131 is any amino acid
  Variant (134)..(135): Xaa in position 134 to 135 is any amino acid
  Variant (137)..(139): Xaa in position 137 to 139 is any amino acid
  Variant (143)..(144): Xaa in position 143 to 144 is any amino acid
  Variant (148)..(148): Xaa in position 148 is any amino acid
  Variant (151)..(153): Xaa in position 151 to 153 is any amino acid
  Variant (166)..(166): Xaa in position 166 is any amino acid
  Variant (169)..(169): Xaa in position 169 is any amino acid
  Variant (173)..(174): Xaa in position 173 to 174 is any amino acid
  Variant (178)..(179): Xaa in position 178 to 179 is any amino acid
  Variant (182)..(182): Xaa in position 182 is any amino acid
  Variant (186)..(190): Xaa in position 186 to 190 is any amino acid
  Variant (191)..(194): Xaa in position 191 to 194 is any or no amino acid
  Variant (196)..(197): Xaa in position 196 to 197 is any amino acid
  Variant (198)..(202): Xaa in position 198 to 202 is any or no amino acid
  Variant (204)..(210): Xaa in position 204 to 210 is any amino acid
  Variant (211)..(214): Xaa in position 211 to 214 is any or no amino acid
  Variant (217)..(217): Xaa in position 217 is any amino acid
  Variant (220)..(220): Xaa in position 220 is any amino acid
  Variant (226)..(226): Xaa in position 226 is any amino acid
  Variant (230)..(230): Xaa in position 230 is any amino acid
  Variant (239)..(239): Xaa in position 239 is any amino acid
  Variant (241)..(241): Xaa in position 241 is any amino acid
  Variant (249)..(249): Xaa in position 249 is any amino acid
  Variant (252)..(253): Xaa in position 252 to 253 is any amino acid
  Variant (255)..(255): Xaa in position 255 is any amino acid
  Variant (256)..(261): Xaa in position 256 to 261 is any or no amino acid
  Variant (263)..(263): Xaa in position 263 is any amino acid
  Variant (265)..(266): Xaa in position 265 to 266 is any amino acid
  Variant (268)..(270): Xaa in position 268 to 270 is any amino acid
  Variant (272)..(272): Xaa in position 272 is any amino acid
  Variant (276)..(276): Xaa in position 276 is any amino acid
  Variant (279)..(281): Xaa in position 279 to 281 is any amino acid
  Variant (284)..(284): Xaa in position 284 is any amino acid
  Variant (287)..(289): Xaa in position 287 to 289 is any amino acid
  Variant (292)..(294): Xaa in position 292 to 294 is any amino acid
  Variant (299)..(300): Xaa in position 299 to 300 is any amino acid
  Variant (303)..(304): Xaa in position 303 to 304 is any amino acid
  Variant (306)..(308): Xaa in position 306 to 308 is any amino acid
  Variant (310)..(327): Xaa in position 310 to 327 is any amino acid
  Variant (329)..(330): Xaa in position 329 to 330 is any amino acid
  Variant (332)..(337): Xaa in position 332 to 337 is any amino acid
  Variant (339)..(341): Xaa in position 339 to 341 is any amino acid
  Variant (344)..(344): Xaa in position 344 is any amino acid
  Variant (346)..(346): Xaa in position 346 is any amino acid
  Variant (348)..(348): Xaa in position 348 is any amino acid
  Variant (355)..(356): Xaa in position 355 to 356 is any amino acid
  Variant (358)..(360): Xaa in position 358 to 360 is any amino acid
  Variant (362)..(362): Xaa in position 362 is any amino acid
  Variant (364)..(364): Xaa in position 364 is any amino acid
  Variant (366)..(366): Xaa in position 366 is any amino acid
  Variant (368)..(368): Xaa in position 368 is any amino acid
  Variant (371)..(372): Xaa in position 371 to 372 is any amino acid
  Variant (374)..(374): Xaa in position 374 is any amino acid
  Variant (377)..(377): Xaa in position 377 is any amino acid
  Variant (379)..(379): Xaa in position 379 is any amino acid
  Variant (387)..(387): Xaa in position 387 is any amino acid
  Variant (391)..(392): Xaa in position 391 to 392 is any amino acid
  Variant (397)..(397): Xaa in position 397 is any amino acid
  Variant (400)..(400): Xaa in position 400 is any amino acid
  Variant (403)..(403): Xaa in position 403 is any amino acid
  Variant (405)..(405): Xaa in position 405 is any amino acid
  Variant (407)..(408): Xaa in position 407 to 408 is any amino acid
  Variant (411)..(416): Xaa in position 411 to 416 is any amino acid
  Variant (417)..(417): Xaa in position 417 is any or no amino acid
  Variant (419)..(421): Xaa in position 419 to 421 is any amino acid
  Variant (424)..(425): Xaa in position 424 to 425 is any amino acid
  Variant (431)..(432): Xaa in position 431 to 432 is any amino acid
  Variant (439)..(439): Xaa in position 439 is any amino acid
  Variant (441)..(441): Xaa in position 441 is any amino acid
  Variant (446)..(446): Xaa in position 446 is any amino acid
  Variant (448)..(448): Xaa in position 448 is any amino acid
  Variant (450)..(452): Xaa in position 450 to 452 is any amino acid
  Variant (454)..(454): Xaa in position 454 is any amino acid
  Variant (456)..(458): Xaa in position 456 to 458 is any amino acid
  Variant (461)..(462): Xaa in position 461 to 462 is any amino acid
  Variant (492)..(493): Xaa in position 492 to 493 is any amino acid
  Variant (506)..(506): Xaa in position 506 is any amino acid
  Variant (513)..(513): Xaa in position 513 is any amino acid
  Variant (515)..(518): Xaa in position 515 to 518 is any amino acid
AXXXNFLGXXPXWYKXXIXXFLXXNPXXXXXXXPFXAGWXLVXEFIFTLAMALKCYPLQPGGLLAIEAXXXGMTXXXXXXXXXXXXXXXXXXXXXXXXXVXXEXXXNXXVXLLLXFMVAGIYFMKXLLLXXFTXXLXXXRSKXXLSLXFCXXXAFLSAFLDALTVXAVXISVXXGFYXXYHXVASXXXXXXXXXDXXXXXXXDXXXXXXXXXXXLEXFRXFLRSLXMHAXVGTALGGVXTXVGEPQNLXIAXXAXXXXXXXWXFXXFXXXMXPVTXPVXXXGLXTCXXXEKXXXFGYGXXLPXXVXXXLXXXXXXXXXXXXXXXXXXLXXQXXXXXXLXXXLAXHXAXVGLIGLXXIXXXTXFXGXTXEHXXGXAFXEXLPFTALLXVFFXXVAVIXDQXLFXPXIXXVLXXXXXXXQXXXFYXXNGLLSXXSDNVFVXTXYINEXKXAXXXGXIXXXQFXXLAVAINTGTNLPSVATPNGQAAFLFLLTSXXAPLIRLSYGRMVXMALPYTXVXXXXG

SEQ ID NO: 1000 - protein, 57 aa, Artificial sequence
  protein pattern
  Variant (2)..(2): Xaa in position 2 is Phe or Tyr
  Variant (3)..(3): Xaa in position 3 is Asp or Glu
  Variant (4)..(4): Xaa in position 4 is any amino acid
  Variant (5)..(5): Xaa in position 5 is Ile or Leu
  Variant (6)..(6): Xaa in position 6 is Ala or Ser
  Variant (15)..(15): Xaa in position 15 is Ile or Leu
  Variant (18)..(18): Xaa in position 18 is Ile or Val
  Variant (30)..(30): Xaa in position 30 is any or no amino acid
  Variant (32)..(32): Xaa in position 32 is any or no amino acid
  Variant (35)..(35): Xaa in position 35 is Ala, Pro, Ser or Thr
  Variant (36)..(36): Xaa in position 36 is Phe, Ile or Leu
  Variant (37)..(37): Xaa in position 37 is Ala or Ser
  Variant (39)..(39): Xaa in position 39 is Leu or Val
  Variant (40)..(40): Xaa in position 40 is Ile or Leu
  Variant (41)..(41): Xaa in position 41 is Asn or Arg
  Variant (45)..(45): Xaa in position 45 is Gly or Ser
  Variant (46)..(46): Xaa in position 46 is Lys or Arg
  Variant (48)..(48): Xaa in position 48 is Ile or Val
  Variant (49)..(49): Xaa in position 49 is any amino acid
  Variant (52)..(52): Xaa in position 52 is Phe or Leu
  Variant (56)..(56): Xaa in position 56 is Ile, Leu or Val
  Variant (57)..(57): Xaa in position 57 is Ala or Val
QXXXXXVAINTGTNXPSXATPNGQAAFLFXLXTSXXXPXXXLSYXXMXXMAXPYTXX

SEQ ID NO: 1001 - protein, 42 aa, Artificial sequence
  protein pattern
  Variant (2)..(2): Xaa in position 2 is any amino acid
  Variant (3)..(3): Xaa in position 3 is Phe or Tyr
  Variant (5)..(5): Xaa in position 5 is Ala, Gly or Ser
  Variant (9)..(9): Xaa in position 9 is Asn or Ser
  Variant (11)..(11): Xaa in position 11 is Leu or Met
  Variant (14)..(14): Xaa in position 14 is Ala, Gly or Ser
  Variant (15)..(15): Xaa in position 15 is Ala, Cys or Gly
  Variant (24)..(24): Xaa in position 24 is any amino acid
  Variant (26)..(26): Xaa in position 26 is Leu, Met or Val
  Variant (34)..(34): Xaa in position 34 is any or no amino acid
  Variant (36)..(40): Xaa in position 36 to 40 is any amino acid
  Variant (41)..(41): Xaa in position 41 is any or no amino acid
EXXRXFLRXLXMHXXVGTALGGVXTXVGEPQNLXIXXXXXXW

SEQ ID NO: 1002 - protein, 42 aa, Artificial sequence
  protein pattern
  Variant (3)..(3): Xaa in position 3 is any amino acid
  Variant (4)..(4): Xaa in position 4 is Ala or Thr
  Variant (7)..(7): Xaa in position 7 is any or no amino acid
  Variant (9)..(10): Xaa in position 9 to 10 is any amino acid
  Variant (11)..(11): Xaa in position 11 is any or no amino acid
  Variant (15)..(15): Xaa in position 15 is Phe or Leu
  Variant (18)..(18): Xaa in position 18 is Ala, Gly or Ser
  Variant (27)..(27): Xaa in position 27 is any amino acid
  Variant (34)..(34): Xaa in position 34 is Phe, Ile or Leu
  Variant (35)..(35): Xaa in position 35 is Glu or Gln
  Variant (37)..(37): Xaa in position 37 is Ile or Val
  Variant (38)..(38): Xaa in position 38 is any amino acid
  Variant (39)..(39): Xaa in position 39 is Ile or Leu
  Variant (41)..(41): Xaa in position 41 is Leu or Met
  Variant (42)..(42): Xaa in position 42 is Ala or Thr
PFXXGWXLXXXEFIXTLXMALKCYPLXPGGLLAXXAXXXGXX

SEQ ID NO: 1003 - protein, 59 aa, Artificial sequence
  protein pattern
  Variant (2)..(4): Xaa in position 2 to 4 is any or no amino acid
  Variant (10)..(10): Xaa in position 10 is any amino acid
  Variant (11)..(11): Xaa in position 11 is Ile or Val
  Variant (13)..(13): Xaa in position 13 is Ile or Val
  Variant (14)..(14): Xaa in position 14 is Phe, Leu or Met
  Variant (15)..(15): Xaa in position 15 is any amino acid
  Variant (17)..(17): Xaa in position 17 is Ala, Ser or Thr
  Variant (18)..(18): Xaa in position 18 is any amino acid
  Variant (19)..(19): Xaa in position 19 is Ala, Cys, Asn or Thr
  Variant (21)..(21): Xaa in position 21 is Ile or Val
  Variant (22)..(22): Xaa in position 22 is any amino acid
  Variant (23)..(23): Xaa in position 23 is Asp or Glu
  Variant (26)..(26): Xaa in position 26 is any amino acid
  Variant (27)..(27): Xaa in position 27 is Ile, Leu or Met
  Variant (29)..(29): Xaa in position 29 is any amino acid
  Variant (32)..(32): Xaa in position 32 is any amino acid
  Variant (33)..(33): Xaa in position 33 is Asp or Glu
  Variant (34)..(34): Xaa in position 34 is Ala or Ser
  Variant (35)..(35): Xaa in position 35 is Leu or Met
  Variant (42)..(42): Xaa in position 42 is Ala, Cys, Thr or Val
  Variant (46)..(46): Xaa in position 46 is Ala or Ser
  Variant (47)..(47): Xaa in position 47 is Ile or Val
  Variant (52)..(52): Xaa in position 52 is any amino acid
  Variant (53)..(53): Xaa in position 53 is Asp, Glu or Gln
  Variant (55)..(55): Xaa in position 55 is any amino acid
  Variant (58)..(58): Xaa in position 58 is any amino acid
VXXXGLIGLXXIXXXTXXXGXXXEHXXGXAFXXXXPFTALLXVFFXXVAVIXXQXLFXP

SEQ ID NO: 1004 - protein, 60 aa, Artificial sequence
  protein pattern
  Variant (2)..(2): Xaa in position 2 is any or no amino acid
  Variant (5)..(5): Xaa in position 5 is Asp, Glu, Gln or Arg
  Variant (9)..(10): Xaa in position 9 to 10 is any amino acid
  Variant (12)..(12): Xaa in position 12 is Ser or Thr
  Variant (13)..(13): Xaa in position 13 is Lys or Arg
  Variant (14)..(14): Xaa in position 14 is Ile, Leu or Met
  Variant (15)..(15): Xaa in position 15 is Ile or Leu
  Variant (16)..(17): Xaa in position 16 to 17 is any amino acid
  Variant (18)..(18): Xaa in position 18 is Ile or Val
  Variant (22)..(22): Xaa in position 22 is any amino acid
  Variant (23)..(23): Xaa in position 23 is Ala, Ile, Leu or Val
  Variant (24)..(24): Xaa in position 24 is Leu or Val
  Variant (25)..(25): Xaa in position 25 is Ala, Gly or Ser
  Variant (26)..(26): Xaa in position 26 is Ile or Leu
  Variant (27)..(27): Xaa in position 27 is any amino acid
  Variant (29)..(29): Xaa in position 29 is Cys or Ser
  Variant (30)..(30): Xaa in position 30 is Phe, Leu or Val
  Variant (31)..(31): Xaa in position 31 is any amino acid
  Variant (32)..(32): Xaa in position 32 is Ala or Ser
  Variant (34)..(34): Xaa in position 34 is Phe or Leu
  Variant (45)..(45): Xaa in position 45 is any amino acid
  Variant (48)..(48): Xaa in position 48 is Ile or Val
  Variant (50)..(50): Xaa in position 50 is Ser or Thr
  Variant (51)..(51): Xaa in position 51 is Ala or Val
  Variant (52)..(52): Xaa in position 52 is Ala, Gly, Ser, Thr or Val
  Variant (53)..(53): Xaa in position 53 is any amino acid
  Variant (54)..(54): Xaa in position 54 is Ala or Gly
  Variant (56)..(56): Xaa in position 56 is Phe or Tyr
  Variant (57)..(57): Xaa in position 57 is Ala, Gly, Ser or Thr
  Variant (58)..(58): Xaa in position 58 is Ile or Val
FXMKXLLLXXFXXXXXXXRSKXXXXXXFXXXXAXLSAFLDALTVXAVXIXXXXXFXXXYH

SEQ ID NO: 1005 - protein, 44 aa, Artificial sequence
  protein pattern
  Variant (2)..(6): Xaa in position 2 to 6 is any amino acid
  Variant (9)..(9): Xaa in position 9 is Ser or Thr
  Variant (10)..(10): Xaa in position 10 is Ile, Leu, Met or Val
  Variant (13)..(13): Xaa in position 13 is Phe or Leu
  Variant (14)..(14): Xaa in position 14 is any amino acid
  Variant (15)..(15): Xaa in position 15 is Ala or Cys
  Variant (17)..(17): Xaa in position 17 is any or no amino acid
  Variant (19)..(19): Xaa in position 19 is any or no amino acid
  Variant (22)..(23): Xaa in position 22 to 23 is any amino acid
  Variant (24)..(24): Xaa in position 24 is Ile, Leu or Val
  Variant (26)..(26): Xaa in position 26 is Lys or Arg
  Variant (27)..(30): Xaa in position 27 to 30 is any amino acid
  Variant (34)..(35): Xaa in position 34 to 35 is any amino acid
  Variant (36)..(36): Xaa in position 36 is Leu or Met
  Variant (38)..(39): Xaa in position 38 to 39 is any amino acid
  Variant (41)..(42): Xaa in position 41 to 42 is any amino acid
  Variant (43)..(43): Xaa in position 43 is Ile or Val
FXXXXXPVXXPVXXXGXLXTCXXXEXXXXXGYGXXXPXXVXXXL

SEQ ID NO: 1006 - protein, 38 aa, Artificial sequence
  protein pattern
  Variant (2)..(2): Xaa in position 2 is Leu or Pro
  Variant (3)..(3): Xaa in position 3 is Ala, Gly, Ser, Thr or Val
  Variant (4)..(4): Xaa in position 4 is Ile, Leu or Met
  Variant (5)..(5): Xaa in position 5 is Phe or Leu
  Variant (6)..(6): Xaa in position 6 is Phe or Tyr
  Variant (7)..(7): Xaa in position 7 is Ile, Leu or Val
  Variant (8)..(8): Xaa in position 8 is any amino acid
  Variant (14)..(15): Xaa in position 14 to 15 is any or no amino acid
  Variant (17)..(18): Xaa in position 17 to 18 is any or no amino acid
  Variant (24)..(24): Xaa in position 24 is Ala or Gly
  Variant (26)..(26): Xaa in position 26 is Ile or Val
  Variant (29)..(29): Xaa in position 29 is Asn or Thr
  Variant (31)..(31): Xaa in position 31 is Ala, Thr or Val
  Variant (32)..(32): Xaa in position 32 is Lys or Arg
  Variant (33)..(33): Xaa in position 33 is Ala, Gln, Ser or Thr
  Variant (35)..(35): Xaa in position 35 is Phe, Leu or Met
  Variant (36)..(37): Xaa in position 36 to 37 is any amino acid
QXXXXXXXNGLLSXXSXXDNVFVXTXYIXEXXXAXXXG

SEQ ID NO: 1007 - protein, 20 aa, Artificial sequence
  protein pattern
  Variant (2)..(3): Xaa in position 2 to 3 is any or no amino acid
  Variant (5)..(5): Xaa in position 5 is any amino acid
  Variant (6)..(6): Xaa in position 6 is Ile, Met or Val
  Variant (8)..(8): Xaa in position 8 is Ala or Gly
  Variant (9)..(10): Xaa in position 9 to 10 is any amino acid
  Variant (11)..(11): Xaa in position 11 is Ala or Gly
  Variant (12)..(12): Xaa in position 12 is Ile, Leu or Val
  Variant (13)..(13): Xaa in position 13 is any amino acid
  Variant (15)..(15): Xaa in position 15 is Ile or Val
  Variant (16)..(16): Xaa in position 16 is any amino acid
  Variant (17)..(17): Xaa in position 17 is Ala or Gly
  Variant (20)..(20): Xaa in position 20 is Phe, Leu or Met
KXXLXXQXXXXXXLXXXLAX

SEQ ID NO: 1008 - protein, 19 aa, Artificial sequence
  protein pattern
  Variant (2)..(2): Xaa in position 2 is Ile, Leu or Val
  Variant (3)..(3): Xaa in position 3 is any amino acid
  Variant (4)..(4): Xaa in position 4 is Ala, Gly, Asn or Gln
  Variant (5)..(5): Xaa in position 5 is Asn or Ser
  Variant (6)..(6): Xaa in position 6 is Phe, Ile or Leu
  Variant (7)..(7): Xaa in position 7 is Glu or Lys
  Variant (9)..(9): Xaa in position 9 is Ile, Leu or Val
  Variant (10)..(10): Xaa in position 10 is Leu or Met
  Variant (13)..(13): Xaa in position 13 is Ile, Met or Val
EXXXXXXVXXLLXFMVAGI

SEQ ID NO: 1009 - DNA, 993 bp, Escherichia coli K12
  CDS (1)..(993): transl_table=11
atgccattactcgatattcgtaacctgaccattgaatttaaaaccggtgatgagtgggttaaagccgtcgaccgggtaagtatgaccttaaccgaaggtgaaatccgcggtcttgttggtgaatccggttccggcaagagtttgattgcgaaagcgatttgtggggtgaataaagataactggcgtgttactgctgaccgtatgcgttttgatgatatcgatttgctgcgtctctccgcacgcgaacggcgcaaactggttggccataacgtgtcgatgattttccaggaaccgcagtcgtgtcttgacccttcagaacgtgtgggccgccagttgatgcaaaacatcccagcctggacctataaaggccgttggtggcagcgttttggctggcgcaaacgccgtgccattgaactgctgcaccgcgtggggattaaagatcacaaagatgcgatgcgcagttttccctatgagttgaccgaaggtgaatgtcagaaagtgatgatagccattgcactggcgaatcaaccgcgtctgctgattgctgacgaaccgaccaactcaatggagccaacaacccaggcgcaaatctttcgcctgctgacgcgtctcaaccaaaacagcaataccactattttgcttatcagccatgacttacaaatgcttagccaatgggcggataaaattaacgtgctttactgcggtcaaacagtggaaaccgcgccgagtaaggagttggtgacgatgccacatcatccttatacccaggcgctgatccgcgcgataccagacttcggcagcgcgatgccgcataaaagtcgcctcaatacgctgcccggcgctatcccactgctggaacagttaccgattggttgtcgtctggggccacgttgcccgtatgcacaacgagaatgcattgtgacgccacgtttgacgggggcgaaaaatcatctctatgcctgtcatttcccgctgaacatggagaaagagtga

SEQ ID NO: 1010 - protein, 330 aa, Escherichia coli K12
MPLLDIRNLTIEFKTGDEWVKAVDRVSMTLTEGEIRGLVGESGSGKSLIAKAICGVNKDNWRVTADRMRFDDIDLLRLSARERRKLVGHNVSMIFQEPQSCLDPSERVGRQLMQNIPAWTYKGRWWQRFGWRKRRAIELLHRVGIKDHKDAMRSFPYELTEGECQKVMIAIALANQPRLLIADEPTNSMEPTTQAQIFRLLTRLNQNSNTTILLISHDLQMLSQWADKINVLYCGQTVETAPSKELVTMPHHPYTQALIRAIPDFGSAMPHKSRLNTLPGAIPLLEQLPIGCRLGPRCPYAQRECIVTPRLTGAKNHLYACHFPLNMEKE

SEQ ID NO: 1011 - DNA, 993 bp, Photorhabdus luminescens
atgccattactcgacattcgcaatctcactattgaatttatgactgccaaagggccggttaaagcggttgatcgcgtcagtatgtcactgatagaaggcgaaatacgcggtctggttggtgaatccggctcaggtaaaagcttgattgccaaagcaataagcggagtcactaaagataatctcaaagtgacggctgaccgttttcgcttcgatgatattgacctgctccgtctgactccacgtcagcgccgaaaagtgatcggccacaatatctcaatgatttttcaggagccacaatcctgtcttgatccttctgaaaatattggtcggcaactcattcaagctatcccctgctggacttacaaaggccgttggtggcaacgtttcaaatggcgaaaacgccgggctattgaattactccaccgtgtgggaattaaagatcataatgacatcatgagtagcttcccttgcgagttaacggagggagagtgccaaaaggtcatgattgctatcgcattggcgaaccaaccacgcctgctgattgcagatgaaccaaccaatgcgatggaaccgaccacacaagctcagattttccgtctgttagcacgattgaatcagaacaataacaccaccattttactgataagtcatgacttgcaaatcatgagcaaattggtggatcgcattaatgttctgtactgtggtcaaacggtcgaaagcgccgttcccgatgaattactggtaacaccacaccacccttacacacaagcgttaagccgcgctatccctgattttggtagttctttgccccataaaagcaggttaaacaccttatcaggcgctattccatcccttgagcatttacccattggctgccgtttaggtccgcgttgcccttatgcgcaaaaaacgtgtattgaaacaccacggttgcgggtgattaaaaaccacgcttttgcctgccactttccactaaatctggaggaacagtaa

SEQ ID NO: 1012 - protein, 331 aa, Photorhabdus luminescens
MPLLDIRNLTIEFMTAKGPVKAVDRVSMSLIEGEIRGLVGESGSGKSLIAKAISGVTKDNLKVTADRFRFDDIDLLRLTPRQRRKVIGHNISMIFQEPQSCLDPSENIGRQLIQAIPCWTYKGRWWQRFKWRKRRAIELLHRVGIKDHNDIMSSFPCELTEGECQKVMIAIALANQPRLLIADEPTNAMEPTTQAQIFRLLARLNQNNNTTILLISHDLQIMSKLVDRINVLYCGQTVESAVPDELLVTPHHPYTQALSRAIPDFGSSLPHKSRLNTLSGAIPSLEHLPIGCRLGPRCPYAQKTCIETPRLRVIKNHAFACHFPLNLEEQZ

SEQ ID NO: 1013 - DNA, 981 bp, Photorhabdus luminescens
atggcactgttaaatgtagaaaaattatcggttcactttggtgacgaagaggcaccattccgcgccgttgaccgcatcagttaccgagttgagcaagggcaggttgttgggattgttggagaatctggctcaggtaaatcggtgagttcattggctgtaatgggattgattgattatccgggtagagtgatggctgacaaactggaatttaaccagcgtgatctgaccaaaatttctgaacaggaacgtcgccaactggttggtgcggaagtggcaatgatcttccaagatccgatgaccagcttgaacccctgttataccgttgggtttcagattatggaggcgttaaaagtgcatcaaggcggcaatcgccgcacccgacgccagcgggcgattgatctgttgaccttggttggtatccctgatccggcatcgcgtctggatgtgtatccgcaccaattatcgggtggtatgagtcaacgggtgatgatcgcaatggcgattgcctgccggccaaaattactgattgctgatgaaccgacaaccgctttagatgtcaccattcaggcgcaggttattgaactgttgttggagttgcaacaacgggaaaatatggcgctaatattaatcacccatgacctggcattggttgcagaagctgctcatcatattatcgtgatgtatgccgggcaggtggtggaatccgccaaggcatcggaaatcttccgggcaccacgtcatccgtatactcaggcgctgcttcgggcattacctgaatttgctacggataaatcccgtcttgcctctttaccgggtgttgtgccggggaaatatgaccggcctatcgggtgtttactgaatccgcgttgtccctatgcaaatgaccattgtcgtcaggtggagccggaattaagaacggtaggagaacgtcaggtgaaatgccatataccgttggatgatgcggggaggccgacagtatga

SEQ ID NO: 1014 - protein, 327 aa, Photorhabdus luminescens
MALLNVEKLSVHFGDEEAPFRAVDRISYRVEQGQVVGIVGESGSGKSVSSLAVMGLIDYPGRVMADKLEFNQRDLTKISEQERRQLVGAEVAMIFQDPMTSLNPCYTVGFQIMEALKVHQGGNRRTRRQRAIDLLTLVGIPDPASRLDVYPHQLSGGMSQRVMIAMAIACRPKLLIADEPTTALDVTIQAQVIELLLELQQRENMALILITHDLALVAEAAHHIIVMYAGQVVESAKASEIFRAPRHPYTQALLRALPEFATDKSRLASLPGVVPGKYDRPIGCLLNPRCPYANDHCRQVEPELRTVGERQVKCHIPLDDAGRPTVZ

SEQ ID NO: 1015 - DNA, 1170 bp, Klebsiella pneumoniae
  CDS (1)..(1170)
tctcggcgcccagctgccttcgccggaatggggagccatgctgggcgatgcgctggagcttatctatgtggcgccgtggaccgtgatgctccccggggcggcgattatgctcagcgtactgctggtcaacctgctgggcgacggtattcgccgggcgatcattgccggggtagaataatgccgttactcgatattcgtcacttaaccattgaatttaaaaccagcgaaggctgggtaaaagccgtcgatcgcgtcagcctgacgctgaccgaaggcgaaatccgcggcctggtgggggaatccggctccgggaaaagccttattgccaaagctatctgcggcgtgactaaagacaactggcgggtcacggccgaccgcatgcgcttcgatgacatcgacctgctgcgactgtcgaaccgcgagcgccggaagctgatcggccataacgtgtcgatgatttttcaggagccccagtcgtgcctcgatccctctgagcgcatcggccagcagctgattcagagtatccccggctggacctacaagggccgctggtggcaacggctgggctggcgcaagcgccgggccatcgagctgttacaccgcgtaggcattaaagatcacaaagatgccatgcgcagcttcccctatcagctgaccgagggcgagtgccagaaggtgatgatcgccatcgccctggccaaccagccgcgtctgctgattgccgacgagccgaccaacgccatggagccgaccacccaggcgcagattattcgcctgctgacgcggctcaaccagaacaacaacaccaccatcttgctgatcagccatgacctgcaaatgctcagcaaatgggcggataaaatcaacgtcatgtactgcgggcagacggtggagagcgggcccagcgaagagctgatcactctcccacatcacccctacacccaggcgttaatccgcgcgatcccggatttcggtagcgccatgccgcataaaagtcgcctcaacaccctgcctggagcgatcccgctactggagcagttgcctatcggctgtcggctggggccgcgctgcccgtacgcccagcgcgagtgtatcgaaacgccgcgtcttaccggggcgcgcaaccatctgtacgcctgtcatttcccgttgaacatggagaaagagtga

SEQ ID NO: 1016 - protein, 389 aa, Klebsiella pneumoniae
SRRPAAFAGMGSHAGRCAGAYLCGAVDRDAPRGGDYAQRTAGQPAGRRYSPGDHCRGRIMPLLDIRHLTIEFKTSEGWVKAVDRVSLTLTEGEIRGLVGESGSGKSLIAKAICGVTKDNWRVTADRMRFDDIDLLRLSNRERRKLIGHNVSMIFQEPQSCLDPSERIGQQLIQSIPGWTYKGRWWQRLGWRKRRAIELLHRVGIKDHKDAMRSFPYQLTEGECQKVMIAIALANQPRLLIADEPTNAMEPTTQAQIIRLLTRLNQNNNTTILLISHDLQMLSKWADKINVMYCGQTVESGPSEELITLPHHPYTQALIRAIPDFGSAMPHKSRLNTLPGAIPLLEQLPIGCRLGPRCPYAQRECIETPRLTGARNHLYACHFPLNMEKE

SEQ ID NO: 1017 - DNA, 1002 bp, Klebsiella pneumoniae
  CDS (1)..(1002)
agcagtaagaggttcgagatggcgttattgaatgtagataaattatcggtgcatttcggcgatgaaaacgcgccgttccgcgccgtagaccgcatcagctatagcgtgaagcagggtgaagtggtcggtatcgtcggggagtccggctccggtaaatccgtcagctcgctggcgattatggggctgattgactatcccggccgggtgatggcggacaaactggaatttaacggccgcgatctgcagcgcatttctgaaaaagagcggcgccagctggtgggggcggaagtggcgatgatcttccaggatccaatgaccagcctcaacccttgcttcaccgtcggctaccagattatggaagcgattaaggtccatcagggcggtaataagcaaacccgccgccagcgggccatcgacctgctgaacctggtgggcattcccgatccggcctcgcggctggacgtctatccgcatcagctttccggcggcatgagccagcgcgtgatgatcgcgatggcgattgcctgtcggccaaaactactgattgccgatgaaccgaccaccgcgctggacgtgaccattcaggcgcaaatcattgagctactgctggatctgcagcagcaggagaatatggcgctggtgctgatcacccacgacctggcgctggtggcggaagccgcgcataaaattatcgttatgtacgcgggtcaggtggtggagaccggtgacgcgaaagatatcttccgcgcgccgcgccatccttatacccaggcgctgctgcgcgcgctgccggaattcgcccaggataaagcgcgtctggcctcgctgccgggcgtggtgccggggaaatatgaccgtcccaacggctgcctgcttaatccgcgctgcccctatgccacggataaatgccgtagcgaagagccggcgctcgcggatctgaccggcggccgccagtctaaatgtcactacccactcgatgatgccgggaggcctggattatga

SEQ ID NO: 1018 - protein, 333 aa, Klebsiella pneumoniae
SSKRFEMALLNVDKLSVHFGDENAPFRAVDRISYSVKQGEVVGIVGESGSGKSVSSLAIMGLIDYPGRVMADKLEFNGRDLQRISEKERRQLVGAEVAMIFQDPMTSLNPCFTVGYQIMEAIKVHQGGNKQTRRQRAIDLLNLVGIPDPASRLDVYPHQLSGGMSQRVMIAMAIACRPKLLIADEPTTALDVTIQAQIIELLLDLQQQENMALVLITHDLALVAEAAHKIIVMYAGQVVETGDAKDIFRAPRHPYTQALLRALPEFAQDKARLASLPGVVPGKYDRPNGCLLNPRCPYATDKCRSEEPALADLTGGRQSKCHYPLDDAGRPGL

SEQ ID NO: 1019 - DNA, 1041 bp, Pseudomonas aeruginosa
  CDS (1)..(1041)
agaacgcggcatgaggagcacaaccatgaacagcgcatccgtatccgcgccacaggagaccgccgcatgagcctcctcgatatcaagaacctcagcgtgcgcttcggcgacaccaccgccgtgcccgtggtcgacggcctcgacctgagcgtcgacaagggcgaggtgctggccatcgtcggcgagtccggctccggcaagtcggtgaccatgatggccctgatgggcctgatcgacgcccccggctgggtatccgccgatcacctgcgcttcgacggccacgacatgctcaccctcaagggccgccagcgccggcgcatcgtcggcaaggacatggcgatggtattccaggacccgatgaccgccctcaaccccagctacaccgtcggctaccagatcgaggaagtcctccgcctgcatctcggcctgcgcggcaaggccctgcgccagcgcgccctggaactgctcgaacgggtcgagatcccggccgccgccagccgtctcgacgcctacccgcaccagctctccggcggcatgagccagcgcgtggcgatcgccatggctatcgccgccgagcccaagctgctgatcgccgacgagccgaccaccgccctcgacgtgaccatccaggcgcagatcatggagctgctgctgaacctgcagcgcgaccaggacatggcgctgatcctgatcacccacgatctcgccgtggtcgccgagaccgcccagcgcgtctgcgtgatgtacgccggcgaagcggtggaaatcggcggcgtgccggcgctgttcgaccgcccgacccatccctacaccgaggcgctgatcaaggcgatccccgagcactgtgccggcgaagcccgcctggccaccctgcccggcatcgttccggggcgctacgaccgcccgcgcggttgcctgctgtcgccacgctgcccctatgcccaggagcattgccgccaggagcggccggccctggaggcacacgagcgcggcgcggtgcgctgcttctatccgttgaacctgctgaacgaggtggcctga

SEQ ID NO: 1020 - protein, 346 aa, Pseudomonas aeruginosa
RTRHEEHNHEQRIRIRATGDRRMSLLDIKNLSVRFGDTTAVPVVDGLDLSVDKGEVLAIVGESGSGKSVTMMALMGLIDAPGWVSADHLRFDGHDMLTLKGRQRRRIVGKDMAMVFQDPMTALNPSYTVGYQIEEVLRLHLGLRGKALRQRALELLERVEIPAAASRLDAYPHQLSGGMSQRVAIAMAIAAEPKLLIADEPTTALDVTIQAQIMELLLNLQRDQDMALILITHDLAVVAETAQRVCVMYAGEAVEIGGVPALFDRPTHPYTEALIKAIPEHCAGEARLATLPGIVPGRYDRPRGCLLSPRCPYAQEHCRQERPALEAHERGAVRCFYPLNLLNEVA

SEQ ID NO: 1021 - DNA, 1026 bp, Enterococcus faecium
  CDS (1)..(1026)
gaagcagagaggggtattcgattgtccgataaccaattattagaagttcagaacctacatacaggattccgactcaaagatgactattacgatgcagtagatgacgtttcatttactttagacaaaaacgagattttagcaatcgttggggaatctgggtgcgggaaaagtaccttggctactacgattatgggattacttgatcctaataacacaaaaattacaggtgagattttatataacgatctgaatttaatcgacctgaacgaaacgctctataataaaatccgcggaaatgatatcggaatgattttccaagatccgttgtctgcattaaatcctctcatgagaatcgaagaccagatcaaagaaggactttcctatcacacaaagatgaatgcagaacagcgtcaagctcgtgcactagaattgctagaacaagtagggattcctaatcctgcgagagttggacgccaatatccccatgaactatcaggcggtatgagacaacgtgtcatcatcgcaatcgcaatcgcctgcaaacctccaatcgtcattgcagatgaaccgacgacagccctagatgtaaccatccaagcacagattcttgatttactgaaagaccttcaggaagaaacaaaaacagggatcatcttgatcactcatgacttaggagtcgtagcagaaatggctgatcgagtggcagtgatgtatggcggacagttcgttgaagtagcaggtgtaaaagaactgtttgatcatcctaagcatccttatacacgctctttactgaactctataccacaagaaggaaatcatgatgcagaactccatgtgatcgaaggtgtcgttccttctctgaaaaacatgcctcgtaaaggttgtcggtttgcaccacgtattccatggataccagcaagcgatcatgaagaagagcctatccttcatgaagtcgcaccgaaccacttggtacgttgctcctgctataagcatttccactttagagacgaaaaaggagaggtgtag

SEQ ID NO: 1022 - protein, 341 aa, Enterococcus faecium
EAERGIRLSDNQLLEVQNLHTGFRLKDDYYDAVDDVSFTLDKNEILAIVGESGCGKSTLATTIMGLLDPNNTKITGEILYNDLNLIDLNETLYNKIRGNDIGMIFQDPLSALNPLMRIEDQIKEGLSYHTKMNAEQRQARALELLEQVGIPNPARVGRQYPHELSGGMRQRVIIAIAIACKPPIVIADEPTTALDVTIQAQILDLLKDLQEETKTGIILITHDLGVVAEMADRVAVMYGGQFVEVAGVKELFDHPKHPYTRSLLNSIPQEGNHDAELHVIEGVVPSLKNMPRKGCRFAPRIPWIPASDHEEEPILHEVAPNHLVRCSCYKHFHFRDEKGEV

SEQ ID NO: 1023 - DNA, 1014 bp, Proteus mirabilis
  CDS (1)..(1014)
gggggtggaataatgccgttattagacatacgcaacctaactattgaatttatgacgcccgatggcccagtaaaagcggtagatcgcgtttccattaccctcagtgagggagaagtaagaggtttagtcggtgaatctggctccggaaaaagtttgatcgctaaggcaatttgtggcgtgactaaagataatattaaagtgactgcggatcgctttcggttcgatgatattgatttacttaaattgtcaccaagagcacgtcgtcgggtgattggtcataatgtgtcgatgattttccaagagcctcaatcttgtcttgatccggcgaccaaaattgaacaccagcttattcaagcaatccctggttggacatttaaaggccactggtggcaacgttttcattggcgaaaacgccgtgcaattgagttacttcatcgggttggtattaaagatcataaagatatcatgcgtagctatccttatgagttaaccgagggtgaatgccaaaaagtgatgatagccattgccattgctaaccaaccccgtttactgattgccgatgaaccaactaatgcgatggagccggcaacgcaaacacaaatatttcgtttactcacccgtttaaatcaaaataataatatgactattttattaattagccatgatttgcagtggatgagtaaattagccagtaaaattacggtcatgtattgtggtcagaccgtggaaaccgccatacctgaagaactattggttaccccctatcatccttatacacaagcccttatccgctctattcctgattttactaactctttgcctcataaaagccgtttaaatacgctacccggtgcgatcccctctttagagcacctacctgttgggtgccgtttaggccctcgttgtccttatgcacaacgtcaatgtattgaagcacctcgattacgtgcatttaaaaatcatgcggtggcttgtcatttcccattaaatgtggagacgacagatgttcgataa

SEQ ID NO: 1024 - protein, 337 aa, Proteus mirabilis
GGGIMPLLDIRNLTIEFMTPDGPVKAVDRVSITLSEGEVRGLVGESGSGKSLIAKAICGVTKDNIKVTADRFRFDDIDLLKLSPRARRRVIGHNVSMIFQEPQSCLDPATKIEHQLIQAIPGWTFKGHWWQRFHWRKRRAIELLHRVGIKDHKDIMRSYPYELTEGECQKVMIAIAIANQPRLLIADEPTNAMEPATQTQIFRLLTRLNQNNNMTILLISHDLQWMSKLASKITVMYCGQTVETAIPEELLVTPYHPYTQALIRSIPDFTNSLPHKSRLNTLPGAIPSLEHLPVGCRLGPRCPYAQRQCIEAPRLRAFKNHAVACHFPLNVETTDVR

SEQ ID NO: 1025 - DNA, 996 bp, Proteus mirabilis
  CDS (1)..(996)
cggagtaagagcatggcgttattaaatataaatcaattatcagttcactttggtgatgaagatactccgtttaaagcggtagaccggatcagttatcaagtagaagaaggtcaagtggtgggcattgttggcgagtctggctcagggaaatcagttagttcattagcgattatggggcttattgattttcccggtcgagtatcagcagaagccttgcaatttgatggacgtgatctgatgcaaatttctgaatctgaacgtcgtgatttggttggtgctgaggttgccatgatatttcaagatccgatgacaagccttaacccttgttttacggtcggttatcaaattatggaggccctcaaagttcatcaaggaggaagtcatcgtacgcgtaaacagcgggcgattgatctattaacgctggtgggtattcctgatcccgcatcacgtttaaatgtttatcctcatcaactgtcgggtggaatgagccaacgggtgatgattgcgatggcaattgcttgccaacctaaattattgattgctgatgagccaactactgctcttgatgtcaccattcaagcgcaaattatcgagctattacttgaattacaaaaacaagaaaatatggcgttagtgttaattactcatgatttggcattagtcgcagaagctgcagataccattattgtgatgtatgcagggcaagttgttgaatcaggcctcgcaacagaaattttcaaagcgcctcgccatccttatacgcaagctttattaaaagcattacctgaatttgcgagtgataaagctcggcttgagtcattaccgggcgtggttccgggacgttatgatagaccgatggggtgcttacttaatcctcgttgcccctatgcacaggatacttgttttcagatagagcccgaattgaaagagataggtaaacatcgagtgaaatgtcatacaccattggatgatacagggagaccaacatatggctaa

SEQ ID NO: 1026 - protein, 331 aa, Proteus mirabilis
RSKSMALLNINQLSVHFGDEDTPFKAVDRISYQVEEGQVVGIVGESGSGKSVSSLAIMGLIDFPGRVSAEALQFDGRDLMQISESERRDLVGAEVAMIFQDPMTSLNPCFTVGYQIMEALKVHQGGSHRTRKQRAIDLLTLVGIPDPASRLNVYPHQLSGGMSQRVMIAMAIACQPKLLIADEPTTALDVTIQAQIIELLLELQKQENMALVLITHDLALVAEAADTIIVMYAGQVVESGLATEIFKAPRHPYTQALLKALPEFASDKARLESLPGVVPGRYDRPMGCLLNPRCPYAQDTCFQIEPELKEIGKHRVKCHTPLDDTGRPTYG

SEQ ID NO: 1027 - DNA, 1002 bp, Enterobacter cloacae
  CDS (1)..(1002)
agcagtaagaggcacgagatggcgttattaaatgtaaataaattatccgtgcactttggcgacgaaggcacaccgtttcgcgccgtggaccgtatcagctacagcgttaatcagggcgaagtggtcgggattgtaggagagtcgggctccggtaagtcagtgagttcgctggcgattatggggctgattgactaccccggccgcgtgatggcagaaaatctggagttcaacggtcaggatctgaagcgtatttccgaaaaacagcgccgccagctggtgggcgcggaagtggcgatgatcttccaggaccccatgaccagcctgaacccatgctacaccgtgggtttccagattatggaagcgattaaggtgcatcagggtgggaataagaaaacccgtcgccagcgtgctatcgatctgctgaaccaggtggggatacctgacccagcatcgcgtctggacgtttacccgcatcagctttccggcggcatgagtcagcgcgtgatgatcgccatggcgattgcctgtcgaccaaaactgctgattgccgatgaaccaactaccgcgctggacgtgaccatccaggcgcaaatcatcgagctgctgctggagttgcagcagaaagagaatatggcgctggtgctgattacgcacgacctggcgctggtggcggaagcggcacacaaaatcatcgtgatgtacgcgggtcaggtggtggagaccggaagttcgcacgatatcttccgcgcgccgcgtcatccgtatacgcaggcgttgctgcgtgcgctgccggagtttgcccaggacaaagcgcgtctggcgtcactgccgggtgtggttccgggtaaatatgaccgtccgcagggctgcctgctgaatccgcgctgcccgtatgcgacagataaatgccgcgccgaggagccagagctgaatctgctggccgatggtcggcagtcaaaatgccactacccactcgatgatgccgggaggccaacactatga

SEQ ID NO: 1028 - protein, 333 aa, Enterobacter cloacae
SSKRHEMALLNVNKLSVHFGDEGTPFRAVDRISYSVNQGEVVGIVGESGSGKSVSSLAIMGLIDYPGRVMAENLEFNGQDLKRISEKQRRQLVGAEVAMIFQDPMTSLNPCYTVGFQIMEAIKVHQGGNKKTRRQRAIDLLNQVGIPDPASRLDVYPHQLSGGMSQRVMIAMAIACRPKLLIADEPTTALDVTIQAQIIELLLELQQKENMALVLITHDLALVAEAAHKIIVMYAGQVVETGSSHDIFRAPRHPYTQALLRALPEFAQDKARLASLPGVVPGKYDRPQGCLLNPRCPYATDKCRAEEPELNLLADGRQSKCHYPLDDAGRPTL

SEQ ID NO: 1029 - DNA, 1041 bp, Enterobacter cloacae
  CDS (1)..(1041)
cctgctgggcgacgggatccgccgcgcaatcaatgcgggggtgcaataatgccgttactcgatatccgcaacctcacaatagaaattaaaacgggcgaaggctgggtcaaggccgtggatcgcatcagtattacgctcgcagagggcgaaatccgcgggctggtgggcgaatcgggttcggggaaaagtctgatcgccaaggccatttgcggcgtggcgaaagacaactggcgggtgaccgccgatcgtatgcgcttcgacgacatcgatctgttgcgtctctccccgcgcgaacgccgcaaactggtgggccataacgtctcgatgattttccaggagccgcaatcctgtctcgatccgtccgagcgcgtcgggaaacagctgatgcagaacatccccggctggacctataaaggccgctggtggcagcgtttcggctggcgtaaacgtcgtgccattgagctgttgcaccgtgtcgggatcaaagaccataaagacgcgatgcgcagtttcccctacgaactgaccgacggtgaatgccagaaagtgatgattgccatcgccctggcgaatcagccgcgtctgctgattgcggacgaaccaacgaacgcgatggagccaaccacccaggcccagattttccgcctgctcacgcgtctgaaccagaataacaacaccaccattttgctgatcagtcacgacctgcaaatgctgagcaagtgggcggataaaattgatgtaatgtattgcggccagacggtagaaaccgcgccaagtgaagacctggtgacgacgccacatcatccctacacgcaggcgctgatcagggcgatcccggactttggcagcgcgatgccgcacaaaagccgtctgaatacgctgcctggcgcgataccgctgctggaatcgctgcccattggctgccgtctgggaccacgttgcccgtatgctcagcgtaaatgcattgaaacaccgcgcctgacagggccgaaaaaccatctgtttgcctgtcatttcccgctgaacatggagagagagtga

SEQ ID NO: 1030 - protein, 346 aa, Enterobacter cloacae
PAGRRDPPRNQCGGAIMPLLDIRNLTIEIKTGEGWVKAVDRISITLAEGEIRGLVGESGSGKSLIAKAICGVAKDNWRVTADRMRFDDIDLLRLSPRERRKLVGHNVSMIFQEPQSCLDPSERVGKQLMQNIPGWTYKGRWWQRFGWRKRRAIELLHRVGIKDHKDAMRSFPYELTDGECQKVMIAIALANQPRLLIADEPTNAMEPTTQAQIFRLLTRLNQNNNTTILLISHDLQMLSKWADKIDVMYCGQTVETAPSEDLVTTPHHPYTQALIRAIPDFGSAMPHKSRLNTLPGAIPLLESLPIGCRLGPRCPYAQRKCIETPRLTGPKNHLFACHFPLNMERE

SEQ ID NO: 1031 - DNA, 996 bp, Vibrio cholerae O1 biovar eltor str. N16961
  CDS (1)..(996): transl_table=11
atgccgttacttgatattcgtcacttgacgattgagattgatactccacaaggtcttgtgaaagcggttgatcgtatgagcttgaccatgaatgaaggggaaattcgtggcttagtgggtgaatcaggctcaggtaagagcttggttgcgaaagcgattgttggtatctgtaaagaaaactggcgcgtcacggctgaccgtatgcgtcttggcaatattgatttgttgcagctcaccccgcgtgaacgccgacgcgtgatcgcacgcgatgtggcaatgattttccaagagccttccacctgtcttgatccatctgaagaggttggacgacaactgattgagtccatcccatttcgcaccttcgaaggacgctggtgggagcgtttcacatggcggaaaaagcaggcgattgctttgctgcacaaagtcggcatcaaagatcacaaagacatcatgtctagctacccttatgagctgacggatggcgagtgtcagaaagtgatgattgcgatggccattgccgctaaaccgaaattgctgatcgcagatgaacccaccaacgacgtggatcccatcactcaatcgcaaattttgcgtttgctgagtcgcatgaatcaggtcaataacacctcgatcctgctcatcggccatgacttaaccaccattactcagtgggcggatcgcattacggttatgtattgcgggcaatcggtggaatcggcggaaactgcaaaaattgtggcagagccaaagcacccctacaccgcagcgctgctgaaagccatgccagattttagtgactggatcccgcacaaacagaaattacaatctctccccggctcaattccgccactgcaacacttaccgattggctgccgcttagggccacgttgcccttacgctcagcgtcagtgtgttgaagtccctcattcacgctgggtaaaaaaccataaattttcttgccatttcccgctcaatatggagtcgccacaatga

SEQ ID NO: 1032 - protein, 331 aa, Vibrio cholerae O1 biovar eltor str. N16961
MPLLDIRHLTIEIDTPQGLVKAVDRMSLTMNEGEIRGLVGESGSGKSLVAKAIVGICKENWRVTADRMRLGNIDLLQLTPRERRRVIARDVAMIFQEPSTCLDPSEEVGRQLIESIPFRTFEGRWWERFTWRKKQAIALLHKVGIKDHKDIMSSYPYELTDGECQKVMIAMAIAAKPKLLIADEPTNDVDPITQSQILRLLSRMNQVNNTSILLIGHDLTTITQWADRITVMYCGQSVESAETAKIVAEPKHPYTAALLKAMPDFSDWIPHKQKLQSLPGSIPPLQHLPIGCRLGPRCPYAQRQCVEVPHSRWVKNHKFSCHFPLNMESPQ

SEQ ID NO: 1033 - DNA, 999 bp, Pasteurella multocida subsp. multocida str. Pm70
  CDS (1)..(999): transl_table=11
atggcgttattaaatgtagaaaatctttcggtgcattttggtgatgaaaataccccttttaaagcggtggatcgcgtcagttacacggtcaatgaaggtgaagtattaggtattgttggcgaatcaggttcaggaaaatcggtgagctcactcgcgattatgggtctaattgattatccggggcgtgtacaagcggaacaattgctgtttaatcaaagtgatttacttgccttgactgaaaaacaaaagcagaaaattgtgggagccgatgtgtccatgattttccaagatgcgatgaccagtttaaacccaagttatacggtgggttatcaaattatggaagcactgaaagttcatcaaggtggggctaaagcatggcgtaaagaacgtgctatcgaattattaaccttagtgggcattcctgatccgcgttcgcgtttagatgtgtatccgcatcaattatcggggggcatgagtcaacgtgtgatgattgcgatggcgattgcctgtaatccgaaattattaattgcggatgaaccgacaactgcgttagacgtgacgattcaagcacagattattgatttattgctggaattacagcgtaaagaaaatatggcgttaatcctgatcactcatgatcttgccttagtcgcggaagcagcccaccgcattattgtgatgtatgcagggcaagtggttgaagaaggacgagcggaggaaatttttaaatgtccacgccatccatatactcaagcgctattacgtgcgttaccggaatttgcagaaggaaaatcgcgtttacaatctttaccgggggttgtgccggggaaatatgatcgcccaacaggctgtttattaaatccacgttgcccatacgccacagatcgttgtcgtgagcaagaaccagaaacccgtttggtgaatggacatcgcgtcaaatgtcatacgccgttgaatgcgcaaggtatgccaagttgtacagaatttgcagtgtcataa

SEQ ID NO: 1034 - protein, 332 aa, Pasteurella multocida subsp. multocida str. Pm70
MALLNVENLSVHFGDENTPFKAVDRVSYTVNEGEVLGIVGESGSGKSVSSLAIMGLIDYPGRVQAEQLLFNQSDLLALTEKQKQKIVGADVSMIFQDAMTSLNPSYTVGYQIMEALKVHQGGAKAWRKERAIELLTLVGIPDPRSRLDVYPHQLSGGMSQRVMIAMAIACNPKLLIADEPTTALDVTIQAQIIDLLLELQRKENMALILITHDLALVAEAAHRIIVMYAGQVVEEGRAEEIFKCPRHPYTQALLRALPEFAEGKSRLQSLPGVVPGKYDRPTGCLLNPRCPYATDRCREQEPETRLVNGHRVKCHTPLNAQGMPSCTEFAVS

SEQ ID NO: 1035 - DNA, 1050 bp, Pasteurella multocida subsp. multocida str. Pm70
  CDS (1)..(1050): transl_table=11
atggcgctattagatattcgaaacctgtgtattgaaattgaaacatcgcaagggcgtatcaaggttgtcgataatgtcaatcttacccttaacgaaggcgaaatttgtggtttagtcggagaatcaggttcaggaaaaagcttaatcgcaaaagtaatttgtaatgtgtttcgtgactcttggattgtcaccgccgaccgtttccgttttgacaacattgaattactaaaattaccgcccaaaaaacgacgtaaattaattgggcaagaaatatcaatgatcttccaagacccactgacttgtttagacccgagcaaaacgattggcaaacaaatcatccagaatatcccctcatggacatttaaaggtcgttggtggcagtggtttggttggaaaaaacgtcgtgcaatcgaattattgcacaaagtaggcattaaagaacacgaggatatcatgcaaagttatcctgaagagattaccgaaggtgaaggacaaaaagtcatgatcgccattgccgttgcgaatcagcctcgtttactcattgctgatgagcctactaactctgtggaatcaatcactaaagctcagatctttcgcttactctcaagtatgaaccaaaatcaaggcacatctattttactgaccagtaacgatatcaagagtatcagtgaatggtgtgatacattttctgtactttactgtggacaaaatgccgaatctggaccaaaagaagagattttagaacacccacatcatccctatacacaagccttgttacattcgattccagactttagtcaaccattacccttgaaaagtcgcttgaatacattaaaaggcaccgttcctttattagaacaaatgccaattggttgtcgccttggaccaagatgcccctttgcgcaaaaaaaatgtattgtaaaacctacaaggtatcgtattaaacagcatgaattttcctgtcactaccctttaaatttacgcgaaaaacaatttaaagaaaaacaggttagcgcccctttaatactccaaaatgcaaaatcagaatag

SEQ ID NO: 1036 - protein, 349 aa, Pasteurella multocida subsp. multocida str. Pm70
MALLDIRNLCIEIETSQGRIKVVDNVNLTLNEGEICGLVGESGSGKSLIAKVICNVFRDSWIVTADRFRFDNIELLKLPPKKRRKLIGQEISMIFQDPLTCLDPSKTIGKQIIQNIPSWTFKGRWWQWFGWKKRRAIELLHKVGIKEHEDIMQSYPEEITEGEGQKVMIAIAVANQPRLLIADEPTNSVESITKAQIFRLLSSMNQNQGTSILLTSNDIKSISEWCDTFSVLYCGQNAESGPKEEILEHPHHPYTQALLHSIPDFSQPLPLKSRLNTLKGTVPLLEQMPIGCRLGPRCPFAQKKCIVKPTRYRIKQHEFSCHYPLNLREKQFKEKQVSAPLILQNAKSE

SEQ ID NO: 1037 - DNA, 975 bp, Pseudomonas aeruginosa PAO1
  CDS (1)..(975): transl_table=11
atgagcctcctcgatatcaagaacctcagcgtacgcttcggcgacaccaccgccgtgcccgtggtcgacggcctcgacctgagcgtcgacaagggcgaggtgctggccatcgtcggcgagtccggctccggcaagtcggtgaccatgatggccctgatgggcctgatcgacgcgcccggctgggtgtccgccgatcacctgcgcttcgacggccacgacatgctcaccctcaagggccgccagcgccggcgtatcgtcggcaaggacatggcgatggtcttccaggacccgatgaccgcgctcaaccccagctacaccgtcggctaccagatcgaggaggttcttcgcctgcatctcggcctgcgcggcaaggccctgcgccagcgcgccctggaactgctcgaacgggtcgagatcccggccgccgccagccgcctcgacgcctacccgcaccaactctccggcggcatgagccagcgcgtggcgatcgccatggccatcgccgccgagcccaagctgctgatcgccgacgagccgaccaccgccctcgacgtgaccatccaggcgcagatcatggagctgctgctgaacctgcagcgcgaccaggacatggcgctgatcctgatcacccacgatctcgccgtggtcgccgagaccgcccagcgcgtctgcgtgatgtacgccggcgaagcggtggagatcggcggcgtgccggcgctgttcgaccgcccgacccatccctacaccgaggcgctgatcaaggcgatccccgagcactgtgccggcgaagcccgtctggccaccctgcccggcatcgttccggggcgctacgaccgcccgcgcggttgcctgctgtcgccacgctgtccctatgctcaggagcattgccgccaggagcggccggccttggagacgcacgagcgcggcgcggtgcgctgcttctatccgttgaacctgctgaacgaggtggcctga

SEQ ID NO: 1038 - protein, 324 aa, Pseudomonas aeruginosa PAO1
MSLLDIKNLSVRFGDTTAVPVVDGLDLSVDKGEVLAIVGESGSGKSVTMMALMGLIDAPGWVSADHLRFDGHDMLTLKGRQRRRIVGKDMAMVFQDPMTALNPSYTVGYQIEEVLRLHLGLRGKALRQRALELLERVEIPAAASRLDAYPHQLSGGMSQRVAIAMAIAAEPKLLIADEPTTALDVTIQAQIMELLLNLQRDQDMALILITHDLAVVAETAQRVCVMYAGEAVEIGGVPALFDRPTHPYTEALIKAIPEHCAGEARLATLPGIVPGRYDRPRGCLLSPRCPYAQEHCRQERPALETHERGAVRCFYPLNLLNEVA

SEQ ID NO: 1039 - DNA, 981 bp, Yersinia pestis CO92
  CDS (1)..(981): transl_table=11
atggcacttttaaatgtagataaattgtcggtgcattttggtgacgacgctgcgccgttcaaggccgtagaccgtatcagttacagcattgatcaaggacaggtggtggggattgtcggtgaatccggctccggtaaatcggtcagctcactggcgatcatggggttgattgattatcccggaaaggtgatggccgataagctggaatttaacggtcgcgacctgaccaaaatttcggaaaaagagcggcgtcaattggtaggcgcggaagtcgcgatgattttccaagacccaatgaccagcctgaacccgtgttacaccgttggttttcagattatggaagcgttaaaggtgcatcaggggggcaatcgcaaaactcgccatcagcgggcggtggatttgttgacgctggtgggtatccctgatcctgcttcgcgtctggatgtgtatccacatcaactctccggtgggatgagccaacgggtgatgatcgccatggcgattgcctgtcggcctaaattgctcattgccgatgagccaacgaccgcgctggatgtgacaattcaggcgcagattattgaattactcttggaattacagcggcgtgaaaatatggcgttgctgctgattacccatgatctggcactggttgcagaagcggcccatcaaattattgtgatgtatgcgggtcaggtagttgaaaccggcaaggcggcggaaattttccgtgcgccacgccatccgtacacacaagcattactacgcgcattaccggagtttgctcaggataaagcgcggttagcatccttaccgggtgtggtaccgggtaaatatgaccgaccagaaggctgtctgcttaacccgcgttgcccgtacgccactgatcgttgtcgcgatgaagagcctgagttactgggcacaccagggcgtcaggttaaatgccatacaccgcttaatgatgcggggaggccatccctatga

SEQ ID NO: 1040 - protein, 326 aa, Yersinia pestis CO92
MALLNVDKLSVHFGDDAAPFKAVDRISYSIDQGQVVGIVGESGSGKSVSSLAIMGLIDYPGKVMADKLEFNGRDLTKISEKERRQLVGAEVAMIFQDPMTSLNPCYTVGFQIMEALKVHQGGNRKTRHQRAVDLLTLVGIPDPASRLDVYPHQLSGGMSQRVMIAMAIACRPKLLIADEPTTALDVTIQAQIIELLLELQRRENMALLLITHDLALVAEAAHQIIVMYAGQVVETGKAAEIFRAPRHPYTQALLRALPEFAQDKARLASLPGVVPGKYDRPEGCLLNPRCPYATDRCRDEEPELLGTPGRQVKCHTPLNDAGRPSL

SEQ ID NO: 1041 - DNA, 984 bp, Salmonella enterica subsp. enterica serovar Typhi str. CT18
  CDS (1)..(984): transl_table=11
atggcgttattaaatgtagatcaattatcggtgcacttcggcgacgaagggacaccgttcaaagccgtcgaccgcattagctacagcgtgaagcagggtgaggtggtcggtattgtcggcgagtctggttccggcaaatccgtcagctcgctggcgattatggggcttatcgattacccaggccgcgtgatggcggaaaacctgctctttaacggacaggatctgaagcgcatttccgagaaggaacgtcgcaacctggtgggcgctgaagtggcgatgattttccaggacccgatgaccagcctcaatccttgctataccgttggctttcagattatggaagccatcaaggtacatcagggcgggaacaagaaaacccgtcgtcagcgagcgattgacctgttgaaccaggtgggtattcccgatccggcttctcgtctggatgtctatccgcaccagctttctggcggcatgagtcagcgcgtgatgattgcgatggccatagcctgtcgaccaaagctgttaattgctgatgaaccgaccacggcgctggatgtgaccattcaggcgcaaatcattgagctgctgctggagttgcagcaaaaagagaacatggcgctggtgctgattacccatgacttggcgctggtggcggaagcggcgcacaaaattatcgtcatgtacgccgggcaggtcgtcgaaaccggcgctgcgcaggatattttccgcgcgccgcgtcatccgtatacccaggcattgctacgtgcgttaccagagtttgcgcaagataaagcgcgtctggcgtcgctgccgggcgtggtgccggggaaatatgaccgaccgacgggttgtctgcttaaccctcgctgcccccacgccacggacagatgtcgtgcggaagaacctgctctcaaccaactggacgatggacgtcagtcaaaatgtcattacccactcgatgatgccgggaggcccacactatga

SEQ ID NO: 1042 - protein, 327 aa, Salmonella enterica subsp. enterica serovar Typhi str. CT18
MALLNVDQLSVHFGDEGTPFKAVDRISYSVKQGEVVGIVGESGSGKSVSSLAIMGLIDYPGRVMAENLLFNGQDLKRISEKERRNLVGAEVAMIFQDPMTSLNPCYTVGFQIMEAIKVHQGGNKKTRRQRAIDLLNQVGIPDPASRLDVYPHQLSGGMSQRVMIAMAIACRPKLLIADEPTTALDVTIQAQIIELLLELQQKENMALVLITHDLALVAEAAHKIIVMYAGQVVETGAAQDIFRAPRHPYTQALLRALPEFAQDKARLASLPGVVPGKYDRPTGCLLNPRCPHATDRCRAEEPALNQLDDGRQSKCHYPLDDAGRPTL

SEQ ID NO: 1043 - DNA, 984 bp, Salmonella typhimurium LT2
  CDS (1)..(984): transl_table=11
atggcgttattaaatgtagatcaattatcggtgcacttcggcgacgaagggacaccgttcaaagccgtcgaccgcattagctacagcgtgaagcagggtgaggtggtcgggattgtcggcgagtctggttccggcaaatccgtcagctcgctggcaattatggggcttatcgattacccaggccgcgtgatggcggaaaacctgctctttaacggacaggatctgaagcgcatttccgagaaggaacgtcgcaacctggtgggcgctgaagtggcgatgattttccaggacccgatgaccagcctcaatccttgctataccgttggctttcagattatggaagccatcaaggtacatcagggcgggaacaagaaaacccgtcgtcagcgagcgattgacctgttgaaccaggtgggtattcccgatccggcttctcgtctggatgtctatccgcaccagctttctggcggcatgagtcagcgtgtgatgattgcgatggccatagcctgtcgaccaaagctgttaattgccgatgaaccgaccacggcgctggatgtgaccattcaggcgcaaatcattgagctgctgctggagttgcagcaaaaagagaacatggcgctggtgctgattacccatgacctggcgctggtggcggaagcggcgcacaaaattatcgtcatgtacgccgggcaggtcgtcgaaaccggcgctgcgcaggatattttccgcgcgccgcgtcatccctacacccaggcactgctacgcgcgttaccagagtttgctcaggacaaagcgcgcctggcgtcgctgccgggcgtggtgccggggaaatatgaccgaccgacgggctgtctgcttaacccgcgctgcccctacgccacggacagatgtcgtgcggaagaacctgctctcaaccaactggacgatggacgtcagtcaaaatgtcattacccactcgatgatgccgggaggcccacactatga

SEQ ID NO: 1044 - protein, 327 aa, Salmonella typhimurium LT2
MALLNVDQLSVHFGDEGTPFKAVDRISYSVKQGEVVGIVGESGSGKSVSSLAIMGLIDYPGRVMAENLLFNGQDLKRISEKERRNLVGAEVAMIFQDPMTSLNPCYTVGFQIMEAIKVHQGGNKKTRRQRAIDLLNQVGIPDPASRLDVYPHQLSGGMSQRVMIAMAIACRPKLLIADEPTTALDVTIQAQIIELLLELQQKENMALVLITHDLALVAEAAHKIIVMYAGQVVETGAAQDIFRAPRHPYTQALLRALPEFAQDKARLASLPGVVPGKYDRPTGCLLNPRCPYATDRCRAEEPALNQLDDGRQSKCHYPLDDAGRPTL

SEQ ID NO: 1045 - DNA, 993 bp, Yersinia pestis KIM
  CDS (1)..(993): transl_table=11
atgccattacttgatattcgcaaccttaccatcgaatttatgacgtcagaagggccagtaaaagccgttgaccgcatcagcatgaccttaactgagggcgaagttcgtggcttagtcggtgagtctgggtccggtaaaagtttgatagccaaagctatctgcggtgtcagcaaggataactggcgcattactgctgaccgctttcgctttaacgacattgatttactccaactgactccccgtcagcggcgtaaggtgatcggccataatatttctatgatttttcaggagccgcaatcttgcctcgatccatcagaaagtattggcctgcaactgatacaagcgatccctggctggacatataaaggccgctggtggcagcgttttcattggcgtaaacggcgggcaatcgagttattgcatcgggttggtatcaaagatcacaaagacattatgcacagttacccctacgagctaaccgaaggtgagtgtcaaaaggtgatgattgctatcgcgctggcaaatcagccacggttgctgatcgccgatgaacccaccaatgcgatggaacccacgacacaagcacagatttttcgcctgttggcccggttaaatcagaataacaacaccacgattttgttgatcagtcacgatttacagatgatgagtaaatgggcaacccgggttaacgtactttattgtggtcagacggtagaaagcgccgtctgtgaagacttactgtctaccccacatcacccttatacccaagcactgattcgtgcaatgcctgattttggccgatccctgccccataaaagtcgcctgaatacgttgccgggtgctatcccatcgctggaacatttaccggtcggttgccgtcttggcccacgttgcccttacgctcagaaaacctgtattgaaacaccgcgcttgcggctggtgaaaaaccacgcctttgcctgtcatttccccttaaatctggaggagcaataa

SEQ ID NO: 1046 - protein, 330 aa, Yersinia pestis KIM
MPLLDIRNLTIEFMTSEGPVKAVDRISMTLTEGEVRGLVGESGSGKSLIAKAICGVSKDNWRITADRFRFNDIDLLQLTPRQRRKVIGHNISMIFQEPQSCLDPSESIGLQLIQAIPGWTYKGRWWQRFHWRKRRAIELLHRVGIKDHKDIMHSYPYELTEGECQKVMIAIALANQPRLLIADEPTNAMEPTTQAQIFRLLARLNQNNNTTILLISHDLQMMSKWATRVNVLYCGQTVESAVCEDLLSTPHHPYTQALIRAMPDFGRSLPHKSRLNTLPGAIPSLEHLPVGCRLGPRCPYAQKTCIETPRLRLVKNHAFACHFPLNLEEQ

SEQ ID NO: 1047 - DNA, 1026 bp, Yersinia pestis KIM
  CDS (1)..(1026): transl_table=11
gtgatgctctcgaccccaaactcaagcagtaatagaggtagagagatggcacttttaaatgtagataaattgtcggtgcattttggtgacgacgctgcgccgttcaaggccgtagaccgtatcagttacagcattgatcaaggacaggtggtggggattgtcggtgaatccggctccggtaaatcggtcagctcactggcgatcatggggttgattgattatcccggaaaggtgatggccgataagctggaatttaacggtcgcgacctgaccaaaatttcggaaaaagagcggcgtcaattggtaggcgcggaagtcgcgatgattttccaagacccaatgaccagcctgaacccgtgttacaccgttggttttcagattatggaagcgttaaaggtgcatcaggggggcaatcgcaaaactcgccatcagcgggcggtggatttgttgacgctggtgggtatccctgatcctgcttcgcgtctggatgtgtatccacatcaactctccggtgggatgagccaacgggtgatgatcgccatggcgattgcctgtcggcctaaattgctcattgccgatgagccaacgaccgcgctggatgtgacaattcaggcgcagattattgaattactcttggaattacagcggcgtgaaaatatggcgttgctgctgattacccatgatctggcactggttgcagaagcggcccatcaaattattgtgatgtatgcgggtcaggtagttgaaaccggcaaggcggcggaaattttccgtgcgccacgccatccgtacacacaagcattactacgcgcattaccggagtttgctcaggataaagcgcggttagcatccttaccgggtgtggtaccgggtaaatatgaccgaccagaaggctgtctgcttaacccgcgttgcccgtacgccactgatcgttgtcgcgatgaagagcctgagttactgggcacaccagggcgtcaggttaaatgccatacaccgcttaatgatgcggggaggccatccctatga

SEQ ID NO: 1048 - protein, 341 aa, Yersinia pestis KIM
MMLSTPNSSSNRGREMALLNVDKLSVHFGDDAAPFKAVDRISYSIDQGQVVGIVGESGSGKSVSSLAIMGLIDYPGKVMADKLEFNGRDLTKISEKERRQLVGAEVAMIFQDPMTSLNPCYTVGFQIMEALKVHQGGNRKTRHQRAVDLLTLVGIPDPASRLDVYPHQLSGGMSQRVMIAMAIACRPKLLIADEPTTALDVTIQAQIIELLLELQRRENMALLLITHDLALVAEAAHQIIVMYAGQVVETGKAAEIFRAPRHPYTQALLRALPEFAQDKARLASLPGVVPGKYDRPEGCLLNPRCPYATDRCRDEEPELLGTPGRQVKCHTPLNDAGRPSL

SEQ ID NO: 1049 - DNA, 1008 bp, Shewanella oneidensis MR-1
  CDS (1)..(1008): transl_table=11
atgccattactcgacgttagaaacctgaccattgaactcgacacgccccacggcaaagtgcgggcccttgagaaagtgagcttgaccctcaatgctggtgaaatccacggcttagttggggaatcaggctcaggccgcagtctgcttgccagagccattctagggatcccaggccccaactggaccattacggccgaccgcatgatgtgggatggtaataatctgatggccatgagttcaaaggagcgccgtaatctgatgggctcggatatggcgatgatcttccaagacccttcaggcagccttgatccttcgcaaactgtaggcagtcagcttatgcaagcgatgccgaaaaatcctaaggcctatttttggcaaaagcataaacatgccaagctcacggcgcaaaagtggcttcacaaggtcggcattaaaaatccgcaaaaagtcatgtccagctacgcttgggagttgtcagagggcgaatgtcaaaaagtgatgatcgccatggcgattgccaaccagccaagattattgattgctgacgagccgacaaactcgatggagctgagcactcaagcacaaattttccgcctattgtcgcagctcaaccaactacaaaacgtgtcgattttaatcatcagtcacgagcttgaaacgctggcccaatggtgcgatcacttatccgtgctctattgcggccaagtgatggagtcaggcccaacggatgaactgattaatcagccctatcatccctacactaaggcgctattggataatatgccggattactcagggatagaggcacacaaggcgattatgccaacgctgccaggatcggcacccgctttgcaacatctgcccattggctgtcgcttggggccaagatgccctgaagcacaaaagaaatgtgttaatcagccaagtttaagtcattcgagagaccgctactttgcctgccatttcccttaccacggtgaaacgacaaatgacgaccccactgcttaa

SEQ ID NO: 1050 - protein, 335 aa, Shewanella oneidensis MR-1
MPLLDVRNLTIELDTPHGKVRALEKVSLTLNAGEIHGLVGESGSGRSLLARAILGIPGPNWTITADRMMWDGNNLMAMSSKERRNLMGSDMAMIFQDPSGSLDPSQTVGSQLMQAMPKNPKAYFWQKHKHAKLTAQKWLHKVGIKNPQKVMSSYAWELSEGECQKVMIAMAIANQPRLLIADEPTNSMELSTQAQIFRLLSQLNQLQNVSILIISHELETLAQWCDHLSVLYCGQVMESGPTDELINQPYHPYTKALLDNMPDYSGIEAHKAIMPTLPGSAPALQHLPIGCRLGPRCPEAQKKCVNQPSLSHSRDRYFACHFPYHGETTNDDPTA

SEQ ID NO: 1051 - DNA, 969 bp, Pseudomonas putida KT2440
  CDS (1)..(969): transl_table=11
atgtcactgttgcagatcaacaacctgaatgtgcgcttcggcgacgccaatgcagtaccggtggtagacggcctggacctgaaagtggacgctggcgagatcctggccatcgtcggcgagtccggctcgggcaagtcggtcaccatgatggccctgatgggcctgatcgacgctcccgggcgcatcaccgccgactcactgaccttcgacggcactgatatgctcaagctcagcggccgtcagcggcgcaaggtggtgggcaaggacatcgccatggtcttccaggacccgatgaccgcgctcaaccccagctacaccgtaggcttccagatcgaggaagtgctacgacagcacctgggcctgaaaggcaaggctgcacgccagcgtgctctggagctcttgaaaaaggtcgagatcccggccgcagaaagccgcctggacgcttacccgcaccagctgtcaggcggcatgagccaacgtgtggcgatcgccatggccattgccggcgagcccaagctgctgatcgcagacgaaccgaccacggccctcgacgtgacgatccaggcacagatcatggaactgctggtcaacctgcagaaggagcgcaacatggcgctcatcctgatcacccacgacctcgccgtggtcgccgaaaccgccaggcgggtgtgcgtgatgtacgccggccaagccgtggaagtgggccaggtgccagaactgttcgatgtgcccgcccacccttacagcgaagccctgctcgccgcgatccccgagcacagcattggcgccgaacgcctggccaccctgcctggcatcgtccccggccgctacgaccgcccggtcggttgcctgctgtcaccacgctgcccctatgtacaggacaattgccggcgccagcgcccgcccctcgaccctcaggcccacagcctggtgcgttgcttctacccgctgaaccaggaggtggcgtga

SEQ ID NO: 1052 - protein, 322 aa, Pseudomonas putida KT2440
MSLLQINNLNVRFGDANAVPVVDGLDLKVDAGEILAIVGESGSGKSVTMMALMGLIDAPGRITADSLTFDGTDMLKLSGRQRRKVVGKDIAMVFQDPMTALNPSYTVGFQIEEVLRQHLGLKGKAARQRALELLKKVEIPAAESRLDAYPHQLSGGMSQRVAIAMAIAGEPKLLIADEPTTALDVTIQAQIMELLVNLQKERNMALILITHDLAVVAETARRVCVMYAGQAVEVGQVPELFDVPAHPYSEALLAAIPEHSIGAERLATLPGIVPGRYDRPVGCLLSPRCPYVQDNCRRQRPPLDPQAHSLVRCFYPLNQEVA

SEQ ID NO: 1053 - DNA, 984 bp, Escherichia coli CFT073
  CDS (1)..(984): transl_table=11
atggcgttattaaatgtagataaattatcggtgcatttcggcgacgaaagcgcaccgttccgcgccgtagaccgcatcagctacagcgtaaaacagggtgaagtggtcgggattgtgggtgagtccggctctggtaaatcggtcagttcgctggcaattatggggctgattgattatccgggccgcgtaatggcggaaaagctggagtttaacggtcaggatttgcagcgtatctcagaaaaagagcgccgcaacctggtgggtgccgaagtggcaatgatcttccaggacccgatgaccagccttaacccgtgctacaccgtgggtttccagattatggaagcgattaaggtgcatcaaggcggcaacaaaagtacccgccgtcagcgagcgattgacctgctgaatctggtcggtattcccgatccggcatcgcgtctggatgtttacccgcatcagctttccggcggcatgagccagcgcgtgatgatcgccatggcgattgcctgtcgaccaaaactgctgattgccgatgaaccgaccactgcgctggacgtgaccattcaggcgcaaattatcgaactgctgctggagctacagcagaaagagaacatggcgctggtgttaattacccatgacctggcgctggtggcggaagcggcacataaaattatcgtgatgtatgcaggccaggtagtagaaacgggcgatgcgcacgctatcttccatgcgccgcgtcacccgtatactcaggcattgctgcgtgcgctgccggaatttgctcaggacaaagaacgtctggcgtcgttgccaggtgtcgttcccggcaagtacgaccgcccgaacggctgcctgcttaacccgcgctgcccctacgccactgacaaatgccgtgctgaagaaccggcgctgaatatgctcgctgacgggcgtcagtccaaatgccattacccacttgatgatgccgggaggccgacactatga

SEQ ID NO: 1054 - protein, 327 aa, Escherichia coli CFT073
MALLNVDKLSVHFGDESAPFRAVDRISYSVKQGEVVGIVGESGSGKSVSSLAIMGLIDYPGRVMAEKLEFNGQDLQRISEKERRNLVGAEVAMIFQDPMTSLNPCYTVGFQIMEAIKVHQGGNKSTRRQRAIDLLNLVGIPDPASRLDVYPHQLSGGMSQRVMIAMAIACRPKLLIADEPTTALDVTIQAQIIELLLELQQKENMALVLITHDLALVAEAAHKIIVMYAGQVVETGDAHAIFHAPRHPYTQALLRALPEFAQDKERLASLPGVVPGKYDRPNGCLLNPRCPYATDKCRAEEPALNMLADGRQSKCHYPLDDAGRPTL

SEQ ID NO: 1055 - DNA, 996 bp, Vibrio vulnificus CMCP6
  CDS (1)..(996): transl_table=11
atgccattattggatattcgtcatttgacgatcgaaattgagactccgcaaggcttggtgaaagccgttgatcgcatgagcctcacgctaaatgaaggtgaaattcgcggcctagttggcgaatctggctctggtaaaagcttggtcgccaaagccatcgttggggtatgcaaagacaactggagagtcaccgccgaccgcatgcgattgggcaacattgacctactgcaactcacgccaagtgagcgtcgacgtgtcatcgcccgcgacatcgcaatgattttccaagagccgtctacctgccttgacccgtctgaagaagtgggcaagcagttgattgaatcgattccatcacgcacttttgaagggaaatggtgggagcgatttaagtggcgtaaaaaacgcgcgattgcacttttgcataaagtgggcattaaagatcatcaacgcttgatgaaaagctatccctatgaactcacagatggtgaatgccaaaaagtgatgattgcgatggcgatcgccacggcgccaaaactgttgatcgcggatgagccgactaacgacctcgatccgatcacgcaaaatcagatcctacgcttgttgagcagaatgaatcagttgaacaacacgacgattttgctcatcggccacgacttaaccaacattacccaatgggccaaccgtattacggtgatgtactgtggccaatcggtggaatcggctgacacagatcgtattttggaagcaccgaagcatccctataccgcagccctactgaaagccatgccggactttagtcattggattcctcacaagcagaagttgcagtcgctcccgggctcgattcctccgttgcaacatttgccgatagggtgccgcttgggacctcgttgcccatacgcgcagcgccagtgtgttgagattccgtatgcgcgtcgtattaaaaatcataagtttagctgtcatttccctcttaacacggagaaagattcatga

SEQ ID NO: 1056 - protein, 331 aa, Vibrio vulnificus CMCP6
MPLLDIRHLTIEIETPQGLVKAVDRMSLTLNEGEIRGLVGESGSGKSLVAKAIVGVCKDNWRVTADRMRLGNIDLLQLTPSERRRVIARDIAMIFQEPSTCLDPSEEVGKQLIESIPSRTFEGKWWERFKWRKKRAIALLHKVGIKDHQRLMKSYPYELTDGECQKVMIAMAIATAPKLLIADEPTNDLDPITQNQILRLLSRMNQLNNTTILLIGHDLTNITQWANRITVMYCGQSVESADTDRILEAPKHPYTAALLKAMPDFSHWIPHKQKLQSLPGSIPPLQHLPIGCRLGPRCPYAQRQCVEIPYARRIKNHKFSCHFPLNTEKDS

SEQ ID NO: 1057 - DNA, 996 bp, Vibrio parahaemolyticus RIMD 2210633
  CDS (1)..(996): transl_table=11
atgccgttattagatattcgacatctgactatcgagatcgaaacaccacaagggatggtgaaagccgtcgaccgaatgagcctaacgctcaacgaaggtgaaatccgaggcttggtaggagagtctggctcaggtaaaagcttagttgcgaaagcgatcgtgggggtttgtaaggacaactggcgaatcaccgcggaccgaatgcgcttgggtaacatcgaccttttacagcttacgccgaaagagcgtcgacgcgtcattgcccgcgatatcgcgatgatcttccaagaaccctcaacctgtttggacccttccgaagaagtaggacgtcagttaattgagtctatcccctctcgcgcctttgaaggcaagtggtgggagcgattcaaatggcgtaaaaaacaggccattgcgctactgcacaaagttggtatcaaagatcacaaacgcttgatgggcagctacccgtacgagctaacagatggtgaatgtcaaaaagtcatgatcgccatggccatcgcaaccaaacctaaattgttgattgccgatgaaccaactaacgacttggaccccatcactcaatcgcagattctgcgtttgttgagccgaatgaaccagctcaacaacaccactattttgctgatcggtcacgacttggctaccatcacgcaatgggcaagccgaattaccgtcatgtactgtggtcagtcggttgagtctgccgacaccgacaaaatcatcgaagcacctaaacacccttacactgacgcgctgctaaaagcgatgccagattttaatgattgggtaccgcacaagcagaaactgcaatcgctacctgggtctatccctcctttgcagcacttgccaattggttgtcgattagggccgcgttgtccgtacgcgcaaaaacagtgtgttgaaattccacacacgcgacgcattaaaaaccataagtttaactgccactttccattgaacacggagaagaagtcatga

SEQ ID NO: 1058 - protein, 331 aa, Vibrio parahaemolyticus RIMD 2210633
MPLLDIRHLTIEIETPQGMVKAVDRMSLTLNEGEIRGLVGESGSGKSLVAKAIVGVCKDNWRITADRMRLGNIDLLQLTPKERRRVIARDIAMIFQEPSTCLDPSEEVGRQLIESIPSRAFEGKWWERFKWRKKQAIALLHKVGIKDHKRLMGSYPYELTDGECQKVMIAMAIATKPKLLIADEPTNDLDPITQSQILRLLSRMNQLNNTTILLIGHDLATITQWASRITVMYCGQSVESADTDKIIEAPKHPYTDALLKAMPDFNDWVPHKQKLQSLPGSIPPLQHLPIGCRLGPRCPYAQKQCVEIPHTRRIKNHKFNCHFPLNTEKKS

SEQ ID NO: 1059 - DNA, 1005 bp, Haemophilus ducreyi 35000HP
  CDS (1)..(1005): transl_table=11
atggcattattgacagtaaatcagctttctgttcattttggtgatgaaaaagtacccttcaaagcggtagatcgaattagttataccgttaatgaaggcgaagtattaggtatcgttggagaatctggatcaggtaaatcagtcagttctcttgcgattatgggcctaattgattttccaggcaaagttattgctgagcaattggcttttgatggtaataatttattagccttaaaagcaaaagagaagcagaaaatcattggtgctgatgtatctatgattttccaagatgcaatgactagccttaatccaagctacacggttggttttcagattatggaagcacttaaggtgcatcaaggtggctcaaaagcgactcgtcggcaacgtactattgaattacttacgatggtgggtattcccgatcctatctcacgtttagaggtttatcctcatcaactttcgggaggaatgagccagcgtgtcatgattgctatggcaatcgcttgtaatccaaaactattgattgccgatgaaccgactactgcgttagatgtgactattcaagcacaaattattgatttattgcttgagttacagcgtaaagaaaatatggcgttgattttgattactcacgatttagcattggttgcagagtcagctcaccgtataatcgtgatgtatgccgggcaaatagttgaagaaggcgctgcagaacatatatttaaatttccgcttcatccttacacacaggcattattgagggcattaccggagtttgcagaagggaagtctcgtttacagtctttgcctggtgtggtaccgggtaaatatgatcgtccgtctggttgcttgttaaatacacgttgtccatatgcaacggaatattgtcgtcaaactgaacctgctttgcatgcgattaaggggcgtcaagtgaaatgccattatcctttagataaaaatggtcagccgatgttaaacaatgagagtggcgagggtgagtaa

SEQ ID NO: 1060 - protein, 334 aa, Haemophilus ducreyi 35000HP
MALLTVNQLSVHFGDEKVPFKAVDRISYTVNEGEVLGIVGESGSGKSVSSLAIMGLIDFPGKVIAEQLAFDGNNLLALKAKEKQKIIGADVSMIFQDAMTSLNPSYTVGFQIMEALKVHQGGSKATRRQRTIELLTMVGIPDPISRLEVYPHQLSGGMSQRVMIAMAIACNPKLLIADEPTTALDVTIQAQIIDLLLELQRKENMALILITHDLALVAESAHRIIVMYAGQIVEEGAAEHIFKFPLHPYTQALLRALPEFAEGKSRLQSLPGVVPGKYDRPSGCLLNTRCPYATEYCRQTEPALHAIKGRQVKCHYPLDKNGQPMLNNESGEGE

SEQ ID NO: 1061 - DNA, 1038 bp, Haemophilus ducreyi 35000HP
  CDS (1)..(1038): transl_table=11
atggctctattagatattcgccatttaagcattgaaattgatacgccaacagggcgagtaaaaatggtggataatgtcaatttaacgcttgatgaaggacagatttgtggtttagtgggcgagtctggatcaggtaaaagtttgattgccaaagtgatttgtggcgtgatgaaagatgagtggattgtgaccgcggatcgttttcgttttaatgatattgaattacttaaactttcacctattcagcgacgtaaattagtgggtgaacaaattgcaatgattttccaagaacctcgctcaagtttggatccaagtaaaaatattggccaacaattaatccagaccattaattttaaaggtaagtggtggcagtggtttggttggaaaaaaaagaaagcgattgaattattgcaccgtgttggtatccgtgatcataaagcgatgatgcaaagctatcctgtagatattacagaaggtgaggcccaaaaagtgattattgcaatggcagtggctaatcaacctcgtttgctgatagctgatgaaccaacacatactttagaaccgaccactcaattacagatttatcgtctgctagccagtatgaataagaatttaggcacttctattttattagtcgccaatgatattaggagtacccataaatgggtggattctttcaatgtgctttattgtggacaaacagctgaagcaggtagtaaagaggtgattatggaagagccttttcatccatatacggcagtgttattaaatggtattcctgatttttcgcagccgttagtctttaaaagtagcttaaatacgttaaaaggcagtattccaatgtttcaacatatacccattggttgccgtttaggaccacgttgcccatttgcacagaaaaaatgtgtacaaaaaccaccattacgtaaatataaacagcatgaatttgcctgccattttccgattaattttagagagaaaaactttttgaagcgggcagaatttgagcctgtagtcgtgagcgagaaaagtgaataa

SEQ ID NO: 1062 - protein, 345 aa, Haemophilus ducreyi 35000HP
MALLDIRHLSIEIDTPTGRVKMVDNVNLTLDEGQICGLVGESGSGKSLIAKVICGVMKDEWIVTADRFRFNDIELLKLSPIQRRKLVGEQIAMIFQEPRSSLDPSKNIGQQLIQTINFKGKWWQWFGWKKKKAIELLHRVGIRDHKAMMQSYPVDITEGEAQKVIIAMAVANQPRLLIADEPTHTLEPTTQLQIYRLLASMNKNLGTSILLVANDIRSTHKWVDSFNVLYCGQTAEAGSKEVIMEEPFHPYTAVLLNGIPDFSQPLVFKSSLNTLKGSIPMFQHIPIGCRLGPRCPFAQKKCVQKPPLRKYKQHEFACHFPINFREKNFLKRAEFEPVVVSEKSE

SEQ ID NO: 1063 - DNA, 981 bp, Chromobacterium violaceum ATCC 12472
  CDS (1)..(981): transl_table=11
atgagtctgttgcaaatcaaaaacctgtccgtggagttcggatcggagaagaacccgttccgcgcggtggaagggctggagctgagcgtcgcccagggcgagatcgtcggcatcgtcggcgagtccggctccggcaagtcggtgaccatgatggcgatgatgggcctcttggaagggcagggccgcatcgtcgccgaccaactgaccttcgacggcaaggacctgctgaccatctcggcgcgcggccgccgcaagatcgtcggcaaggacatctcgatgatcttccaggatccgatgaccgcgctgaaccccagctacaccgtcggctaccagatcatggaagtgctgaaggtgcaccagggcttgcgcggcgcggcgctgaaggcgcgcgcgctggagctgatgcaactggtggagatcccggcggcggcgacgcggctgaacgcctatccgcaccagttgtctggcggcatgagccagcgcgtcgccatcgccatggccatcgcctgcaatcccaagctcttgatcgccgacgagccgaccaccgcgctcgacgtcaccatccaggcccagatcatggaactgctggtgtctttgcagaagagccagaacatggcgctgatcctgatcacccacgacctggccgtggtggccgaggtcgcgcagcggctggtggtgatgtacgccggccaggtggccgagatgggcacggtgccggagatcttccgccatcccgctcatccgtacaccgaggcgctgctgtcgtcgattcccgagcacagcaagggcgcgcgccgcctggcgacgctacccggcatcgtgcccggccagtacgaccggccgagcggctgcctgttgtcgccgcgctgcccgtacgcgcaggacaactgccgcggccagcggcccggattgaccgcccacgagcatggcgcggtgcgttgccactacccgttgctggccaaggagaagcagcatggctaa

SEQ ID NO: 1064 - protein, 326 aa, Chromobacterium violaceum ATCC 12472
MSLLQIKNLSVEFGSEKNPFRAVEGLELSVAQGEIVGIVGESGSGKSVTMMAMMGLLEGQGRIVADQLTFDGKDLLTISARGRRKIVGKDISMIFQDPMTALNPSYTVGYQIMEVLKVHQGLRGAALKARALELMQLVEIPAAATRLNAYPHQLSGGMSQRVAIAMAIACNPKLLIADEPTTALDVTIQAQIMELLVSLQKSQNMALILITHDLAVVAEVAQRLVVMYAGQVAEMGTVPEIFRHPAHPYTEALLSSIPEHSKGARRLATLPGIVPGQYDRPSGCLLSPRCPYAQDNCRGQRPGLTAHEHGAVRCHYPLLAKEKQHG

SEQ ID NO: 1065 - DNA, 981 bp, Photorhabdus luminescens subsp. laumondii TTO1; identical to SEQ ID NO: 1013
  CDS (1)..(981): transl_table=11

SEQ ID NO: 1066 - protein, 326 aa, Photorhabdus luminescens subsp. laumondii TTO1
MALLNVEKLSVHFGDEEAPFRAVDRISYRVEQGQVVGIVGESGSGKSVSSLAVMGLIDYPGRVMADKLEFNQRDLTKISEQERRQLVGAEVAMIFQDPMTSLNPCYTVGFQIMEALKVHQGGNRRTRRQRAIDLLTLVGIPDPASRLDVYPHQLSGGMSQRVMIAMAIACRPKLLIADEPTTALDVTIQAQVIELLLELQQRENMALILITHDLALVAEAAHHIIVMYAGQVVESAKASEIFRAPRHPYTQALLRALPEFATDKSRLASLPGVVPGKYDRPIGCLLNPRCPYANDHCRQVEPELRTVGERQVKCHIPLDDAGRPTV

SEQ ID NO: 1067 - DNA, 993 bp, Photorhabdus luminescens subsp. laumondii TTO1; identical to SEQ ID NO: 1011
  CDS (1)..(993): transl_table=11

SEQ ID NO: 1068 - protein, 330 aa, Photorhabdus luminescens subsp. laumondii TTO1
MPLLDIRNLTIEFMTAKGPVKAVDRVSMSLIEGEIRGLVGESGSGKSLIAKAISGVTKDNLKVTADRFRFDDIDLLRLTPRQRRKVIGHNISMIFQEPQSCLDPSENIGRQLIQAIPCWTYKGRWWQRFKWRKRRAIELLHRVGIKDHNDIMSSFPCELTEGECQKVMIAIALANQPRLLIADEPTNAMEPTTQAQIFRLLARLNQNNNTTILLISHDLQIMSKLVDRINVLYCGQTVESAVPDELLVTPHHPYTQALSRAIPDFGSSLPHKSRLNTLSGAIPSLEHLPIGCRLGPRCPYAQKTCIETPRLRVIKNHAFACHFPLNLEEQ

SEQ ID NO: 1069 - DNA, 1275 bp, Vibrio vulnificus YJ016
  CDS (1)..(1275): transl_table=11
gtggaactccattttgccgaacgtactgaccgtgattgcgaccgaaattaccttggcgctgtctgttgctgttttagacatcaccgcgcttggctttctggggctgggggcacaagcaccgagcaccgaatggggcgcaattcttggcgattccgtggagctgatttatctcgcgccttggaccgtaacactgcccggattgtccattatgtttaccgttatcgtcatcaaccttgtcggggatggcgtacgccgagctctcaatgcggggatcgaataatgccattattggatattcgtcatttgacgatcgaaattgagactccgcaaggcttagtgaaagccgttgatcgcatgagcctcacgctaaatgaaggcgaaattcgcggcctcgttggcgaatctggctcaggaaaaagcttggtcgccaaagccatcgttggggtatgcaaagacaactggagagtcaccgccgaccgcatgcgattgggcaacattgacctactgcaactcacgccaagtgaaagacgacgtgtcatcgctcgcgacatcgcgatgattttccaagagccatccacctgtcttgacccgtctgaagaagtgggcaagcagttgattgaatcgattccatcacgcacttttgaagggaagtggtgggagcgatttaagtggcgtaaaaaacgcgcgattgcacttttgcataaagtgggcattaaagatcatcaacgcttgatgaaaagctatccctatgaactcactgatggtgaatgccaaaaagtgatgattgcgatggcgatcgccacggcaccaaaactgttgattgcggatgagccgactaacgacctcgatccgatcacgcaaaatcagatcctacgcttgttgagcagaatgaatcagttgaacaacacgacgattttgctcatcggccacgacttaaccaatattacccaatgggccaaccgtattacggtgatgtactgtggccaatcggtggaatcggccgacacagatcgtattttggaagcaccgaagcatccctataccgcagccctactaaaagcgatgccggactttagtcattggattccccacaagcaaaaattgcagtcgctgccgggctcgattcctccgttgcaacatttgccgatcgggtgccgcttgggaccacgttgcccatacgcgcagcgccagtgtgttgaaataccttatgcacgcagaatcaaaaaccacaagttcagctgccacttccctcttaacacggagaaagattcatga

SEQ ID NO: 1070 - protein, 424 aa, Vibrio vulnificus YJ016
MELHFAERTDRDCDRNYLGAVCCCFRHHRAWLSGAGGTSTEHRMGRNSWRFRGADLSRALDRNTARIVHYVYRYRHQPCRGWRTPSSQCGDRIMPLLDIRHLTIEIETPQGLVKAVDRMSLTLNEGEIRGLVGESGSGKSLVAKAIVGVCKDNWRVTADRMRLGNIDLLQLTPSERRRVIARDIAMIFQEPSTCLDPSEEVGKQLIESIPSRTFEGKWWERFKWRKKRAIALLHKVGIKDHQRLMKSYPYELTDGECQKVMIAMAIATAPKLLIADEPTNDLDPITQNQILRLLSRMNQLNNTTILLIGHDLTNITQWANRITVMYCGQSVESADTDRILEAPKHPYTAALLKAMPDFSHWIPHKQKLQSLPGSIPPLQHLPIGCRLGPRCPYAQRQCVEIPYARRIKNHKFSCHFPLNTEKDS

SEQ ID NO: 1071 - DNA, 993 bp, Erwinia carotovora subsp. atroseptica SCRI1043
  CDS (1)..(993): transl_table=11
atgccattacttgatatccgtaacctgacgattgagtttctgaccgccgacggcgcggtaaaagccgtcgatcgcgtcagcatgacgctgagcgaaggggaaattcgcgggctggtgggcgaatcaggctcaggcaaaagcctgatcgctaaagccatctgtgggatcaccaaagataactggcgcgtgaccgccgaccgcttccgctttgatgatatcgacctgctgcaactgtcatcgcgcgagcggcgtaaactggtcggtcataacgtttccatgatttttcaggagccgcaatcctgcctcgatccgtccgaaagtgtgggtcggcagttggtgcaggcaattcccggctggacgtataaaggccgctggtggcagcgatttaactggcgcaagcgccgcgctatcgaattgctgcaccgcgtcgggattaaagatcacaaagacatcatgggcagttatccctatgaactaagcgatggcgagtgtcagaaagtgatgattgccatcgcgctggcgaaccagccgcgtctgctgattgccgatgaaccgaccaacgcgatggaatccaccacgcaggcgcagattttccgcctgctatcgcgcctaaaccaaaacaataacaccacgattctgctcatcagccatgacctacaaaccatgagtaaatgggcagaccggattaacgtgctttactgcggacaaacagtagagagcgctacctgtgaagatttgatcaccgcgccgcatcatccttatacgcaggcgctgatccgcgcaatgccagatttcggccgctcactgccacacaaaagccggttaaataccctgaacggcgcgatcccctcactggaacacctgccgattggctgccgactcggcccgcgctgcccttattcacaaaaacagtgtatgcaaacgccgccgctgctctccgtgaagaaccacttatatgcctgccacttcccacttaacatggaggagccgtaa

SEQ ID NO: 1072 - protein, 330 aa, Erwinia carotovora subsp. atroseptica SCRI1043
MPLLDIRNLTIEFLTADGAVKAVDRVSMTLSEGEIRGLVGESGSGKSLIAKAICGITKDNWRVTADRFRFDDIDLLQLSSRERRKLVGHNVSMIFQEPQSCLDPSESVGRQLVQAIPGWTYKGRWWQRFNWRKRRAIELLHRVGIKDHKDIMGSYPYELSDGECQKVMIAIALANQPRLLIADEPTNAMESTTQAQIFRLLSRLNQNNNTTILLISHDLQTMSKWADRINVLYCGQTVESATCEDLITAPHHPYTQALIRAMPDFGRSLPHKSRLNTLNGAIPSLEHLPIGCRLGPRCPYSQKQCMQTPPLLSVKNHLYACHFPLNMEEP

SEQ ID NO: 1073 - DNA, 981 bp, Erwinia carotovora subsp. atroseptica SCRI1043
  CDS (1)..(981): transl_table=11
atggcgttgctcaatgtagataaactgtcggttcactttggtgatgaggatctgccgttccgtgcggttgaccgtattagttaccaggtcgaacaaggtcaggtcgtcggtatcgtcggggaatccggctccggtaaatccgtcagctcgctggcgattatgggactgattgattaccccggcaaagtgatggccgacaagctggaatttaaccagcgtgatttaacaaaaatttctgagaaagaacggcgtaatctggtgggttcggaagtcgcgatgattttccaggacccgatgactagcctgaacccgtgctacaccgtgggctaccagatcatggaagccatcaaggtgcatcagggtggcaaccgcaaaacccgtcgtcagcgtgcgattgacctgctgacgttggtcgggatccccgatccgggatcgcgtcttgacgtgtatccgcatcagctttccggtggaatgagccagcgcgtgatgatcgcgatggcgattgcctgtcgaccgaaactgctgattgccgatgaacccactacggcgctggacgtaaccattcaggcgcagattatcgagctgctgctcgaattgcagcagcgcgagaacatggcgctgatcctgattacacacgatttggcgctggtggctgaagcggcacatcacattatcgtgatgtatgccgggcaggtggtggaatccggcaaagcagcggatattttccgcgcgccctgccatccgtatactcaggcgctgctgcgtgcgctaccggagtttgcggtggataaagcgcgtctggcatcgctgccgggtgtggttccgggtaaatatgatcgccccaacggctgtctgttaaacccgcgctgcccctatgcgcatgaccgctgccgtcaggaagaacctgaactgcgtgatattcctggtcgtcaggtgaaatgtcatacaccgctagatgatgcggggaggccgaccttatga

SEQ ID NO: 1074 - protein, 326 aa, Erwinia carotovora subsp. atroseptica SCRI1043
MALLNVDKLSVHFGDEDLPFRAVDRISYQVEQGQVVGIVGESGSGKSVSSLAIMGLIDYPGKVMADKLEFNQRDLTKISEKERRNLVGSEVAMIFQDPMTSLNPCYTVGYQIMEAIKVHQGGNRKTRRQRAIDLLTLVGIPDPGSRLDVYPHQLSGGMSQRVMIAMAIACRPKLLIADEPTTALDVTIQAQIIELLLELQQRENMALILITHDLALVAEAAHHIIVMYAGQVVESGKAADIFRAPCHPYTQALLRALPEFAVDKARLASLPGVVPGKYDRPNGCLLNPRCPYAHDRCRQEEPELRDIPGRQVKCHTPLDDAGRPTL

SEQ ID NO: 1075 - DNA, 1023 bp, Yersinia pseudotuberculosis IP 32953
  CDS (1)..(1023): transl_table=11
atgctctcgaccccaaactcaagcagtaatagaggtagagagatggcacttttaaatgtagataaattgtcggtgcattttggtgacgacgctgcgccgttcaaggccgtagatcgtatcagttacagcattgatcaaggacaggtggtggggattgtcggtgaatccggctctggtaaatcggtcagctcactggcgatcatggggttgattgattatcccggaaaggtgatggccgataagctggaatttaacggtcgcgacctgaccaaaatttcggaaaaagagcggcgtcaattggtaggcgcggaagtcgcgatgattttccaagacccaatgaccagcctgaacccgtgttacaccgttggttttcagattatggaagcgttaaaggtgcatcaggggggcaatcgcaaaactcgccatcagcgggcggtggatttgttgacgctggtgggtatccctgatcctgcttcgcgtctggatgtgtatccacatcaactctccggtgggatgagccaacgggtgatgatcgccatggcgattgcctgtcggcctaaattgctcattgccgatgagccaacgaccgcgctggatgtgacaattcaggcgcagattattgaattactcttggaattacagcggcgtgaaaatatggcgttgctgctgattacccatgatctggcactggttgcagaagcggcccatcaaattattgtgatgtatgcgggtcaggtagttgaaaccggcaaggcggcggaaattttccgtgcgccacgccatccgtacacacaagcattgctacgcgcattaccggagtttgctcaggataaagcgcggttagcatccttaccgggtgtggtaccgggtaaatatgaccgaccagaaggctgtctgcttaacccgcgttgcccgtacgccactgatcgttgtcgcgatgaagagcctgagttactgggcacaccagggcgtcaggttaaatgccatacaccgcttaatgatgcggggaggccatccctatga

SEQ ID NO: 1076 - protein, 340 aa, Yersinia pseudotuberculosis IP 32953
MLSTPNSSSNRGREMALLNVDKLSVHFGDDAAPFKAVDRISYSIDQGQVVGIVGESGSGKSVSSLAIMGLIDYPGKVMADKLEFNGRDLTKISEKERRQLVGAEVAMIFQDPMTSLNPCYTVGFQIMEALKVHQGGNRKTRHQRAVDLLTLVGIPDPASRLDVYPHQLSGGMSQRVMIAMAIACRPKLLIADEPTTALDVTIQAQIIELLLELQRRENMALLLITHDLALVAEAAHQIIVMYAGQVVETGKAAEIFRAPRHPYTQALLRALPEFAQDKARLASLPGVVPGKYDRPEGCLLNPRCPYATDRCRDEEPELLGTPGRQVKCHTPLNDAGRPSL

SEQ ID NO: 1077 - DNA, 1053 bp, Mannheimia succiniciproducens MBEL55E
  CDS (1)..(1053): transl_table=11
atggctttactcgatattcgaaatttaacaattaaagtaaatacgccaaacggctatgttagcgttgtcgataacgttaatctaaccctgaatgaaggtgaaatctgtggcttggtcggcgaatccggttcaggaaaaagcctgatagctaaagtgatttgcaacaccagcaaagacaattggattattaccgcggatcgttttcgttttaacgacgtcgaattacttaaattaagcccttataaacgccggaaattggtgggaaaagagatttcgatgatttatcaggagccgctgagctaccttgatcccagtaaaaaaatcggtcagcaaattatgcagaatattccttcctggacatttaaaggaaaaatctggcattggttcggctggcgtaaacgtcgggctattgagctgcttcatcgtgtcggaataaaagatcataaagatattatgaacagctaccccaatgaaattaccgagggtgaagggcaaaaagtgatgattgccattgccattgccaatcaaccgagattgttgattgccgatgaaccgacaaattcattggaatccaccacccagctacaaatttttcgtctgctctccagcatgaaccaaaataacggcacctcagtactgcttgccagcaacgatatggcgggaatcagcgaatggtgccatagttttatagttctttactgcggtcaaaatgcggaatcggggccgaaagaaaatattcttgaaacgccgcatcatccttatacttctgcattgctgcactcaatgcccgatttttcgcaaccgatgccgttaaaaagtaaactaaacacgttgcgcggaacggttccgctgctggaacaaatgcctatgggttgccggttaggaccacgctgcccgtttgcacagaaaaaatgtattaaaaaaccgcctttacgtcgcataaaacagcatgaatttgcctgtcattatccactaaatttattagaaaccaatcgtaaagaaaaagataccattacaccgctaacattgagcccggaaagcaaaatcagttaa

SEQ ID NO: 1078 - protein, 350 aa, Mannheimia succiniciproducens MBEL55E
MALLDIRNLTIKVNTPNGYVSVVDNVNLTLNEGEICGLVGESGSGKSLIAKVICNTSKDNWIITADRFRFNDVELLKLSPYKRRKLVGKEISMIYQEPLSYLDPSKKIGQQIMQNIPSWTFKGKIWHWFGWRKRRAIELLHRVGIKDHKDIMNSYPNEITEGEGQKVMIAIAIANQPRLLIADEPTNSLESTTQLQIFRLLSSMNQNNGTSVLLASNDMAGISEWCHSFIVLYCGQNAESGPKENILETPHHPYTSALLHSMPDFSQPMPLKSKLNTLRGTVPLLEQMPMGCRLGPRCPFAQKKCIKKPPLRRIKQHEFACHYPLNLLETNRKEKDTITPLTLSPESKIS

SEQ ID NO: 1079 - DNA, 984 bp, Mannheimia succiniciproducens MBEL55E
  CDS (1)..(984): transl_table=11
atgtcattattaaatgtaaaccaactttccgttcattttggtgatggaaaagccccttttaaagcggtagatcgtattagttattcggtcaataagggcgaagtgttgggcattgtgggggaatccggttccggtaaatccgtcagttctctggcaattatggggttgattgattatccggggcgggtatccgcagaagctttatcttttgacggcgtggatttgttaagtttaaatgaaaaacaaaaacgaaaaatagtaggtgccgatgtgtcgatgatttttcaggatccgatgaccagcctaaatccttgttataccgtgggttatcagattatggaagcgctgaaggcacatcagggcggcagcaaaaaagaacgtcgagaacgaaccgtcgagttattaaaattggtcggtattcccgctcccgagtcccgtttagatgtttatccgcaccaactttccggtggaatgtcgcaacgggtgatgattgccatggcgatcgcctgtaaacctagattattaattgccgacgaaccgacaacggcactggacgtaactattcaggcacaaatcgtcgatttgttgttaactttgcaaaagcaagaaaatatggcattgattctgatcactcatgatctggcgttagtagcggaagccgcccatcgtattattgtgatgtatgccggacaggtagtcgaagaagggcgggcggaagaaattttcaaacggccgaaacatccttatacccaggcactattgcgttcgttgcccgaatttgccgaaggtaaatcccgattgcagtctttacagggtgtcgtaccgggaaaatacgacaggccacaaggctgtttattaaatcctcgttgcccttatgcaacggaacattgccgtcgggttgaaccggatttgattcaattgggtgaaggcaaggtaaaatgccataccccgttaaacgcacaaggagaaccgagcaatgtctga

SEQ ID NO: 1080 - protein, 327 aa, Mannheimia succiniciproducens MBEL55E
MSLLNVNQLSVHFGDGKAPFKAVDRISYSVNKGEVLGIVGESGSGKSVSSLAIMGLIDYPGRVSAEALSFDGVDLLSLNEKQKRKIVGADVSMIFQDPMTSLNPCYTVGYQIMEALKAHQGGSKKERRERTVELLKLVGIPAPESRLDVYPHQLSGGMSQRVMIAMAIACKPRLLIADEPTTALDVTIQAQIVDLLLTLQKQENMALILITHDLALVAEAAHRIIVMYAGQVVEEGRAEEIFKRPKHPYTQALLRSLPEFAEGKSRLQSLQGVVPGKYDRPQGCLLNPRCPYATEHCRRVEPDLIQLGEGKVKCHTPLNAQGEPSNV

SEQ ID NO: 1081 - DNA, 993 bp, Burkholderia mallei ATCC 23344
  CDS (1)..(993): transl_table=11
atgagcgatttattgaccatccgcaatctcgcggtgaacttcagcgggctgcccgcggtcgacaggatcaacctgtccatcgcgcgcggcgaagtggtcggcgtggtgggcgagtccggctcgggcaagagcgtgacgatgatggcgctgatgagcctgatcgacgcgcccggcatcgtcaccgccgacgaagtcacgttcgacggcgtcgatctgctcaaggcgagcgcgaaggcgcgccgccgcatcatcggcaaggacgtcgcgatggtgttccaggatgcgctgacgagcctgaacccgagctacacggtcggctatcagatcaaggaggtgctgaagctgcacgagggcctgcgcggcgacgcgctgaacaagcgcgcgctcgaactgctcgatcaggtcgggattcccgatgcgaggaaccgcatcggcacgtttccgcaccagatgtcgggcggcatgaaccagcgcgtgatgatcgcgatggcggtggcgtgcaacccgaagctcctgatcgccgacgagccgacgaccgcgctcgacgtgacgatccaggcgcagatcatggatctgctcgtcacgctgcagaaggagcgcggaatggcgctcgtgctgatctcgcacgatctcgcggtggtctcggaagtcgcgcagcgcgtcgcggtgatgtacgcgggcgagatcatcgagacgaaccgcgtgccggacatcttcgcgcatccgcatcatccgtacaccgaagcgttgctcgcggcgattccggagcacaatgcgggcgcgaagcggctcgccgcgctgccggggatggtgccgggccgcgacgaccggccgagcgggtgcctgttcgcgccgcgctgcaagtacgtcgtcgacgactgcatgaaggcgcggcctacgctcgccgagctcgcgccgggcaccggcatgcgcgcgcgctgcatcaagcccctcaacctggaagcgccgcacacgcaaggaggcgcgcgatga

SEQ ID NO: 1082 - protein, 330 aa, Burkholderia mallei ATCC 23344
MSDLLTIRNLAVNFSGLPAVDRINLSIARGEVVGVVGESGSGKSVTMMALMSLIDAPGIVTADEVTFDGVDLLKASAKARRRIIGKDVAMVFQDALTSLNPSYTVGYQIKEVLKLHEGLRGDALNKRALELLDQVGIPDARNRIGTFPHQMSGGMNQRVMIAMAVACNPKLLIADEPTTALDVTIQAQIMDLLVTLQKERGMALVLISHDLAVVSEVAQRVAVMYAGEIIETNRVPDIFAHPHHPYTEALLAAIPEHNAGAKRLAALPGMVPGRDDRPSGCLFAPRCKYVVDDCMKARPTLAELAPGTGMRARCIKPLNLEAPHTQGGAR

SEQ ID NO: 1083 - DNA, 993 bp, Burkholderia pseudomallei K96243
  CDS (1)..(993): transl_table=11
atgagcgatttattgaccatccgcaatctcgcggtgaacttcagcgggctgcccgcggtcgacaggatcaacctgtccatcgcgcgcggcgaagtggtcggcgtggtgggcgagtccggctcgggcaagagcgtgacgatgatggcgctgatgggcctgatcgacgcgcccggcatcgtcaccgccgacgaagtcacgttcgacggcgtcgatctgctcaaggcgagcgcgaaggcgcgccgccgcatcatcggcaaggacgtcgcgatggtgttccaggatgcgctgacgagcctgaacccgagctacacggtcggctatcagatcaaggaggtgctgaagctgcacgagggcctgcgcggcgacgcgctgaacaagcgcgcgctcgaactgctcgatcaggtcgggattcccgatgcgaggaaccgcatcggcacgtttccgcaccagatgtcgggcggcatgaaccagcgcgtgatgatcgcgatggcggtggcgtgcaacccgaagctcctgatcgccgacgagccgacgaccgcgctcgacgtgacgatccaggcgcagatcatggatctgctcgtcacgctgcagaaggagcgcggaatggcgctcgtgctgatctcgcacgatctcgcggtggtctcggaagtcgcgcagcgcgtcgcggtgatgtacgcgggcgagatcatcgagacgaaccgcgtgccggacatcttcgcgcatccgcatcatccgtacaccgaagcgttgctcgcggcgattccggagcacaatgcgggcgcgaagcggctcgccgcgctgccggggatggtgccgggccgcgacgaccggccgagcgggtgcctgttcgcgccgcgctgcaagtacgtcgtcgacgactgcatgaaggcgcggcctacgctcgccgagctcgcgccgggcaccggcatgcgcgcgcgctgcatcaagcccctcaacctggaagcgccgcacacgcaaggaggcgcgcgatga

SEQ ID NO: 1084 - protein, 330 aa, Burkholderia pseudomallei K96243
MSDLLTIRNLAVNFSGLPAVDRINLSIARGEVVGVVGESGSGKSVTMMALMGLIDAPGIVTADEVTFDGVDLLKASAKARRRIIGKDVAMVFQDALTSLNPSYTVGYQIKEVLKLHEGLRGDALNKRALELLDQVGIPDARNRIGTFPHQMSGGMNQRVMIAMAVACNPKLLIADEPTTALDVTIQAQIMDLLVTLQKERGMALVLISHDLAVVSEVAQRVAVMYAGEIIETNRVPDIFAHPHHPYTEALLAAIPEHNAGAKRLAALPGMVPGRDDRPSGCLFAPRCKYVVDDCMKARPTLAELAPGTGMRARCIKPLNLEAPHTQGGAR

SEQ ID NO: 1085 - DNA, 993 bp, Haemophilus influenzae 86-028NP
  CDS (1)..(993): transl_table=11
atggcattattagacgtaaaagaactttctgttcactttggcgataaaaaaacgccatttaaagcagtggatcgcattagctatcaagtcgcacaaggcgaagtgcttggcattgtgggagaatcaggttcgggtaaatctgtgagttctctcgcaattatgggattaattgatcatcctggacgtgtatctgctgaatccttgcaatttgaaaatactgatttactcactttagagagtaaagctaaacgccagcttattggtgctgatgtagcaatgattttccaagatccgatgacaagtttgaatcctgcttatactgtgggtttccaaattatggaagcgttgaaaactcacgaaggcggcacaaaaaaggcaagaaaagaccgcactttagagcttttaaaattggtcggtattcctgatcctgaatctcggattgatgtttatccccatcagctgtctggtggaatgagccagcgcgtgatgattgcgatggcaattgcttgcagacctaaattattgattgctgacgaaccaaccacggcattggacgtgactatccaagctcaaattatggaactcttacttgaattgcaaaagaaagaatgcatgtccctaattttgattactcacgatctagcacttgtggctgaagcggcagagcgaattatcgtgatgtatgctggacaaatcgttgaagaaggcaccgcaaaagatattttccgcgagccaaaacacccttacacacaagccttgttacgttcattacctgaatttgcagagggaaaatctcgcttagaatcattacaaggggtcgtccctggaaaatacgatcgcccaacaggctgtttattaaatcctcgctgcccttatgccaccgaatattgtcgccaagttgaacctcaattgcatcatatcggttcgcataaagtaaaatgccatactccgctgaacgagcaaggcaatccagttgaatatcaaggagcttaa

SEQ ID NO: 1086 - protein, 330 aa, Haemophilus influenzae 86-028NP
MALLDVKELSVHFGDKKTPFKAVDRISYQVAQGEVLGIVGESGSGKSVSSLAIMGLIDHPGRVSAESLQFENTDLLTLESKAKRQLIGADVAMIFQDPMTSLNPAYTVGFQIMEALKTHEGGTKKARKDRTLELLKLVGIPDPESRIDVYPHQLSGGMSQRVMIAMAIACRPKLLIADEPTTALDVTIQAQIMELLLELQKKECMSLILITHDLALVAEAAERIIVMYAGQIVEEGTAKDIFREPKHPYTQALLRSLPEFAEGKSRLESLQGVVPGKYDRPTGCLLNPRCPYATEYCRQVEPQLHHIGSHKVKCHTPLNEQGNPVEYQGA

SEQ ID NO: 1087 - DNA, 1050 bp, Haemophilus influenzae 86-028NP
  CDS (1)..(1050): transl_table=11
atggcacttttagacatttgtaacctcaatattgaaattcaaacctccaatggacgtataaaaattgtagatggcgtcaatctttcccttaacgaaggggaaatcagtggattagttggcgaatcaggctcaggaaaaagcttaatcgctaaagtcatttgtaatgcaatcaaagaaaattggattattactgccgatcgctttcgttttcacgatatcgaattactaaaactcagtcctaataaacgacgtaagattgtcggcaaagaaatatccatgattttccaaaatcccttatcttgccttgatccaagtcgaaaaatagggaaacaactcatccaaaatattcctaattggacatttaaaaataaatggtggaaatggtttgggtggaaaaaaagacgtgctattgaattgttacatcgcgtaggaattaaagatcatcgtgatattatggcaagctatcctaacgaactgacagaaggcgaaggacaaaaagttatgatcgcaatggctgtcgctaatcagccacgtttattaatcgcagatgaaccaacaaatacattagaatcaaccactgccctacaagtttttcgtttactttccagtatgaaccaaaatcagggaacaacaattttacttacgagtaacgatattaaaagtattagtgaatggtgcgatcaaatttcagtgctttattgtgggcaaaataccgaatctgccccgactgaaatattaatcgaaagtccccatcatccttatacccaagccttaattaatgcagtacccgattttactcaacctttggggtttaaaactaaattgggtacgttagaaggcaccgcgcctattttagagcaaatgccaattggctgtcgtcttggcccaagatgcccttttgcacaaaaaaaatgtatggaaaaaccaagacgattgaaaataaaacaacacgaattttcttgtcattatcctattaatttacgagaaaaaaatttcaaagaaaaaacaaccgccaccccttttatacttaattgcaaaggaaatgaataa

SEQ ID NO: 1088 - protein, 349 aa, Haemophilus influenzae 86-028NP
MALLDICNLNIEIQTSNGRIKIVDGVNLSLNEGEISGLVGESGSGKSLIAKVICNAIKENWIITADRFRFHDIELLKLSPNKRRKIVGKEISMIFQNPLSCLDPSRKIGKQLIQNIPNWTFKNKWWKWFGWKKRRAIELLHRVGIKDHRDIMASYPNELTEGEGQKVMIAMAVANQPRLLIADEPTNTLESTTALQVFRLLSSMNQNQGTTILLTSNDIKSISEWCDQISVLYCGQNTESAPTEILIESPHHPYTQALINAVPDFTQPLGFKTKLGTLEGTAPILEQMPIGCRLGPRCPFAQKKCMEKPRRLKIKQHEFSCHYPINLREKNFKEKTTATPFILNCKGNE

SEQ ID NO: 1089 - DNA, 969 bp, Pseudomonas fluorescens Pf-5
  CDS (1)..(969): transl_table=11
atgtcactgctagaaatcaagaatctcaatgtccgtttcggcgacgccactgcggtgccggtggtcgatggcctcgacctcaaggtcgacaagggcgaagtgctggccatcgtcggcgagtccggctccggcaaatcggtgaccatgatggccctgatgggcctgatcgagcacccgggcatcgtcaccgccgatgccctaagcttcgacggccgcgacatgctcaagctcagcgcgcgccagcgccggcagatcgtcggcaaggacctggccatggtcttccaggacccgatgaccgcgttgaaccccagctacaccgtgggcttccagatcgaggaagtgctgcgcctgcacctgaagatgtccagcaaggccgcacgcaagcgcgccatcgaactgctggaaaaggtcgagatccccggcgccgccagccgcatggacgcctacccgcaccaactgtccggcggcatgagccagcgggtggcaatcgccatggcgatcgccggcgagcccaagctgctgatcgccgacgaacccaccaccgccctggacgtgaccatccaggcgcagatcatggacctgctgctgaacctgcagaaagagcagaacatgggcctggtgctgatcacccacgacctcgccgtggtcgccgaaaccgcccagcgggtgtgcgtgatgtacgccggccaggcggttgaggtgggccaggtaccggagctgttcgacattcccgcgcacccctacagcgaagcgctgctggcggcgattcccgagcacagcctcggcgccactcgcttgtcgaccctgccgggcatcgtccccgggcgctacgaccggcctcaaggctgcctgctgtcgccgcgctgcccctacgtgcaagacaactgccgcgcccagcgccccagcctcgacccgaaagccgccagcctggtgcgctgcttctacccgctgaatcaggaggtggcgtaa

SEQ ID NO: 1090 - protein, 322 aa, Pseudomonas fluorescens Pf-5
MSLLEIKNLNVRFGDATAVPVVDGLDLKVDKGEVLAIVGESGSGKSVTMMALMGLIEHPGIVTADALSFDGRDMLKLSARQRRQIVGKDLAMVFQDPMTALNPSYTVGFQIEEVLRLHLKMSSKAARKRAIELLEKVEIPGAASRMDAYPHQLSGGMSQRVAIAMAIAGEPKLLIADEPTTALDVTIQAQIMDLLLNLQKEQNMGLVLITHDLAVVAETAQRVCVMYAGQAVEVGQVPELFDIPAHPYSEALLAAIPEHSLGATRLSTLPGIVPGRYDRPQGCLLSPRCPYVQDNCRAQRPSLDPKAASLVRCFYPLNQEVA

SEQ ID NO: 1091 - DNA, 1014 bp, Colwellia psychrerythraea 34H
  CDS (1)..(1014): transl_table=11
atgaatttactcgacattcgaaatttatccattgagcttgatacacccagcggacgtgtattagcagtagatagggtcagtttatcgataaaagaaggtgaagtacgcggattagtcggagaatctggctcaggaaagtcactgttagcgcaagctattataggtgttttagaagataagtggcatgttcatgctgatcgattccattggcgaggaatcgatttattgcgcctatccataggtgagcgtagggccttattatgtcgtgatatcgcgatgatcttccaagaaccgatgagctgccttgatcccacaacgttgataggtgagcagttaagtgaagccattgatacctcgcaattgtctggcttcttttggcaacgcaagaaacaacgtaaagaagcggtaataaagttactgcacaaagtaggtattaagaagcatgttcaatgcattaatagctaccctcatcaactgactgaagcaatttgtcaacgtgttatgatagcaattgcgcttgcgggtagacctattctattaattgccgatgaacctactgcagcaatggaaagtacaacccaaggacaaatatttaggttacttgctaatctaaaccaattaaagaacatgtctatcctattaattagccatgacttagaaaaccttacccattggaccaacaccattaccgttatgtatagcggtcagtttgtcgaggctggtagcactgagcaaatatttaataaacctatgcatccttatactcgcgctttagtcgatagcagtaccaaggccaatttacagctaccgacaaaatctcgactgatgaccttacctggtagtattcccgttcttcaacatttacctataggttgtagactcgggcctcgatgccctagagcacaaaaaacttgtgtagctgcccctacagtgagtaattaccatggtcataaagtaagttgtcatttccctttacttagggatacaggaaaaaaaataaagggttctaattaa

SEQ ID NO: 1092 - protein, 337 aa, Colwellia psychrerythraea 34H
MNLLDIRNLSIELDTPSGRVLAVDRVSLSIKEGEVRGLVGESGSGKSLLAQAIIGVLEDKWHVHADRFHWRGIDLLRLSIGERRALLCRDIAMIFQEPMSCLDPTTLIGEQLSEAIDTSQLSGFFWQRKKQRKEAVIKLLHKVGIKKHVQCINSYPHQLTEAICQRVMIAIALAGRPILLIADEPTAAMESTTQGQIFRLLANLNQLKNMSILLISHDLENLTHWTNTITVMYSGQFVEAGSTEQIFNKPMHPYTRALVDSSTKANLQLPTKSRLMTLPGSIPVLQHLPIGCRLGPRCPRAQKTCVAAPTVSNYHGHKVSCHFPLLRDTGKKIKGSN

SEQ ID NO: 1093 - DNA, 999 bp, Burkholderia sp. 383
  CDS (1)..(999): transl_table=11
atgagccaagatcttctgaccatccgcaatctcgcggtgaatttcaacggcctgcctgccgtcgaccggatcaacctgtcgatcgctccgggcgaggtggtgggcgtcgtcggcgaatcgggctcgggcaagagcgtgacgatgatggcgctgatgggcctgatcgatgcgccgggcaaggtgacggccgatgaggttacgttcaacggcgtcgacctgctgaaggcgtcgccgaaggcgcgccgcaagatcgtcggcaaggacatcgcgatggtgttccaggacgcgctgacgagcctgaacccgagctacacggtcggctatcagatcaaggaagtgctgaagctgcacgagggcttgcgcggcgacgcgctgcaccggcgcgcgctcgaactgctcgaccaggtcggcattcccgatgcgaagaaccgcattacgtcgttcccgcaccagatgtcgggcgggatgaaccagcgcgtgatgatcgcgatggcggtggcgtgcaacccgaagctcctgatcgccgacgagccgaccaccgcgctcgacgtgacgatccaggcgcagatcatggacctgctcgtgaagctgcagaaggagcgcgggatggcgctcgtgctgatctcgcacgacctggccgtggtgtcggaggtcgcgcagcgcgtggcggtgatgtacgcgggcgaggtgatcgagacgaacagcgtgcccgacatcttccgcgcgccgcatcatccgtacaccgaagcgctgctcgcggcgattcccgagcacaataagggggcgcgtcgccttgccgcattgcccggcatggtgccgggccgcgatgatcgcccgtccgggtgcctgttcgcgccgcgctgcaagtacgtcgtcgacgactgcttcaaggcgcggccggcgctcgacacgctggtgtccggcaatgaggcgatgcgcgcacgctgcatcaagccgctcaacgtttccaacctcgacctgacgggaggtgcacgatga

SEQ ID NO: 1094 - protein, 332 aa, Burkholderia sp. 383
MSQDLLTIRNLAVNFNGLPAVDRINLSIAPGEVVGVVGESGSGKSVTMMALMGLIDAPGKVTADEVTFNGVDLLKASPKARRKIVGKDIAMVFQDALTSLNPSYTVGYQIKEVLKLHEGLRGDALHRRALELLDQVGIPDAKNRITSFPHQMSGGMNQRVMIAMAVACNPKLLIADEPTTALDVTIQAQIMDLLVKLQKERGMALVLISHDLAVVSEVAQRVAVMYAGEVIETNSVPDIFRAPHHPYTEALLAAIPEHNKGARRLAALPGMVPGRDDRPSGCLFAPRCKYVVDDCFKARPALDTLVSGNEAMRARCIKPLNVSNLDLTGGAR

SEQ ID NO: 1095 - DNA, 1029 bp, Rhodospirillum rubrum ATCC 11170
  CDS (1)..(1029): transl_table=11
atgtccttgcttgaaatcgagaacctgaccgtagaattcggcagcggcgacaaaccgttccgcgccgtcgaggacgtcagcttttccgtcgatgccggagaggttctgggcatcgtcggcgaaagcggctcgggaaaatccgtcagctcgctggcgatgatgggtctggtcgcctatcccgggcgggtcaaggccagcaagatggtgtttgacggcatcgatctgctgacgctgtcgggccgccagcgtcgcaagctgaccggctcggacgtggcgatgatcttccaagagccgatgaccagcctcaacccctgtttcaccatcggctatcagatcaccgagaccctgaagatccaccagggcggcacccgcgcccaacgccgggaccgggccatcgaattgctgtcccaggttggcatccccgatccgggatcgcgcctgggcctgtttccccaccagctttccggcggcatgagccagcgggtgatgatcgccatggccgtcgcctgcgatccccgtctgctgatcgccgacgagccgacgacggcgcttgatgtcaccatccaggcgcagatcatgcacctgctgctgaccctgcaggaaaagcgcggcatgggcatggtgctgatcacccacgaccttgccgtggtcgccgaggccgcccatcgggtggtggtgatgtatgccggtcaggtgatggaaaccggggcggtgccggcgatcttcgatcgtccccaccacccctataccgccgccctgctcgaggccctgcccgaacgggccgagggcaagcgtcggctcaacaccattcccggcgtggtgccgggcgcccacgaccgccccaagggctgtttgctggcgccgcgctgcgccttcgcccaggaccgttgccgggccgaacggccgagcctgacccccaccgatagcggacaggttcgctgcttcttccccctgtcggcccccgatcccctgaaggcgccgccgccggccgccctggacatcgatatccgtggagaggcccggccatga

SEQ ID NO: 1096 - protein, 342 aa, Rhodospirillum rubrum ATCC 11170
MSLLEIENLTVEFGSGDKPFRAVEDVSFSVDAGEVLGIVGESGSGKSVSSLAMMGLVAYPGRVKASKMVFDGIDLLTLSGRQRRKLTGSDVAMIFQEPMTSLNPCFTIGYQITETLKIHQGGTRAQRRDRAIELLSQVGIPDPGSRLGLFPHQLSGGMSQRVMIAMAVACDPRLLIADEPTTALDVTIQAQIMHLLLTLQEKRGMGMVLITHDLAVVAEAAHRVVVMYAGQVMETGAVPAIFDRPHHPYTAALLEALPERAEGKRRLNTIPGVVPGAHDRPKGCLLAPRCAFAQDRCRAERPSLTPTDSGQVRCFFPLSAPDPLKAPPPAALDIDIRGEARP

SEQ ID NO: 1097 - DNA, 993 bp, Burkholderia thailandensis E264
  CDS (1)..(993): transl_table=11
atgagcgatttattgaccatccgcaatctcgcggtgaacttcaacgggctgcccgcggtcgacaggatcaacctgtccgtcgcgcgcggcgaagtggtcggcgtggtgggcgagtccggctcgggcaagagcgtgacgatgatggcgctgatgggcttgatcgacgcgcccggcatcgtcacggccgacgaagtcacgttcgacggcgtcgatctgctgaaggcgagcccgaaggcgcgccgcaggatcatcggcaaggatatcgcgatggtgtttcaggacgcgctgacgagcctgaacccgagctacacggtcggctatcagatcaaggaggtgctgaagctgcacgagggcctgcgcggcgacgcgctgaaccggcgcgcgctcgaactgctcgaccaggtcgggattcccgatgcgaagaaccgcatcggcacgttcccgcaccagatgtcgggcggcatgaaccagcgcgtgatgatcgcgatggcggtcgcatgcaatccgaagcttttgatcgccgacgagccgacgaccgcgctcgacgtgacgatccaggcgcagatcatggatctgctcgtcacgctgcagaaggagcgcgggatggcgctcgtgctgatttcccacgatctcgcggtcgtgtcggaagtcgcgcagcgcgtcgcggtgatgtacgcgggcgagatcatcgagacgaaccgcgtgccggacatcttcgcgcatccgcatcatccgtacaccgaagcgttgctcgcggcgattccggagcacaatgcgggcgcgaagcggctcgccgcgctgcccgggatggtgccgggccgcgacgaccggccgagcggctgcctgttcgcgccgcgctgcaagtacgtcgtcgacgattgcgtgaaggcgcgccccgcgcttgccgagctcgcgccgggcaccggcatgcgcgcgcgctgcatcaagccgctcaacctgcaagcggcgtacacgcaaggaggcgcgcgatga

SEQ ID NO: 1098 - protein, 330 aa, Burkholderia thailandensis E264
MSDLLTIRNLAVNFNGLPAVDRINLSVARGEVVGVVGESGSGKSVTMMALMGLIDAPGIVTADEVTFDGVDLLKASPKARRRIIGKDIAMVFQDALTSLNPSYTVGYQIKEVLKLHEGLRGDALNRRALELLDQVGIPDAKNRIGTFPHQMSGGMNQRVMIAMAVACNPKLLIADEPTTALDVTIQAQIMDLLVTLQKERGMALVLISHDLAVVSEVAQRVAVMYAGEIIETNRVPDIFAHPHHPYTEALLAAIPEHNAGAKRLAALPGMVPGRDDRPSGCLFAPRCKYVVDDCVKARPALAELAPGTGMRARCIKPLNLQAAYTQGGAR

SEQ ID NO: 1099 - DNA, 1005 bp, Burkholderia xenovorans LB400
  CDS (1)..(1005): transl_table=11
atgaccagcttattaaccatccgcaatctcgcggtggacttcaacggactgcccgccgtcgaccggatcagcctcgatatcgcgccgggcgaagtggtcggcgtagtcggcgaatcgggctcgggtaagagcgtgacgatgatggcgctgatgggcctgatcgacgcgcccggcaaagtgacggccgacgaaatcaccttcaacggcacgaacctgctgaaggcatcggcgaaggaacgccgcaagatcgtcggcaaagacatcgcgatggtgttccaggacgcgctcaccagtctgaaccccagctacacggtcggctatcagatcaaggaagtgctgaagctgcacgaaggcctgcgcggcagcgcgctggacaagcgcgctctggaactgctcgaccaggtcggcattccggatgcgaaaagccgtatcagttcgtttccgcatcagatgtccggcggcatgaaccagcgcgtgatgatcgcaatggcgattgcctgcaatccgaagttgctgatcgccgacgagccgaccaccgcgctcgacgtgacgatccaggcccagatcatggaactgctgatcaagctgcagaaggaacgcggcatggcgctcgtgctgatctcgcacgatctggcggtggtgtcggaagtcgcgcaacgcgtcgcggtcatgtacgctggcgaagtgatcgaaacgaacaaggtaccggacattttcgccgcgccgcatcatccgtacacggaagcgttgctggcggcgattcccgagcacaatgtcggcgccgtgcggctcgcggcactgccgggcatggtgccgggccgagatgaccgccctaggggctgtctcttcgcaccgcgctgcaagtacgtggtcgacgattgcacgaaggcgcggcccgcgctcgcgccgatgcaaggtcacgccgaagtggcgcgcgtgcgctgcatcaaacccctgaacctgagcggcgacgccaatgttcacacgcatggaggcgcacgatga

SEQ ID NO: 1100 - protein, 334 aa, Burkholderia xenovorans LB400
MTSLLTIRNLAVDFNGLPAVDRISLDIAPGEVVGVVGESGSGKSVTMMALMGLIDAPGKVTADEITFNGTNLLKASAKERRKIVGKDIAMVFQDALTSLNPSYTVGYQIKEVLKLHEGLRGSALDKRALELLDQVGIPDAKSRISSFPHQMSGGMNQRVMIAMAIACNPKLLIADEPTTALDVTIQAQIMELLIKLQKERGMALVLISHDLAVVSEVAQRVAVMYAGEVIETNKVPDIFAAPHHPYTEALLAAIPEHNVGAVRLAALPGMVPGRDDRPRGCLFAPRCKYVVDDCTKARPALAPMQGHAEVARVRCIKPLNLSGDANVHTHGGAR

SEQ ID NO: 1101 - DNA, 984 bp, Myxococcus xanthus DK 1622
  CDS (1)..(984): transl_table=11
ttgctcgacgtccgagggctgaccacggagctggcgctggaggaagggccggtgcgcgcggtggacgacgtgtccttcgcgctgcccccaggtggaacgctgggcgtggtgggggagagcgggtgtggcaagagcctcacggcgctgtccctgctgcggctggcgcccgagccgccggtgcgcgtggtgggcggagaggtgcgcttccagggccgggacttgctgacgctgccggaggccgagctgcgccgggtgcgcggccgtcacgcggcgatgatcttccaggagccgatgacgtcgctaaacccggtgttcaccgtgggggagcagattgccgagggcgtccggctgcacctgggcgcttcgcgcgcgcaggcccgggacaaggccgtggagatgctgcggcaggtgggcatccccgcgccggccgagcgcgtggacgcgtatccacaccagctctccggaggcatgcggcagcgggtgatgatggcgatggcgctggcgtgtgatccggccttgctcatcgcggacgagcccaccaccgcgctggacgtcaccatccaggcgcagattctggacctgctcgcgcggcttcaggccgagcggggcatggcggtgctgctgattacgcatgacctgggcgtggtggcggagagctgcgacgcggtggtggtgatgtacgcgggccgggtggtggagcgcgccccggtgcgagcgctgttttcccagcccgcgcacccgtacaccgcgggcctgctgcgctcgattccgtccaggcgcgacgtgggtggcgctcgagcctcccgggcgcggctgcgggccattcccggcagggtgccaccgctgcggcagttgcctgtcggctgtgccttccgggagcgctgtgagcgcgcgctggacgtctgtgcgcacgtgaagcccgcgctgacctcgccgcgagaagggcagtgggcggcctgtcacaacccggtgcccgcgccgtga

SEQ ID NO: 1102 - protein, 327 aa, Myxococcus xanthus DK 1622
MLDVRGLTTELALEEGPVRAVDDVSFALPPGGTLGVVGESGCGKSLTALSLLRLAPEPPVRVVGGEVRFQGRDLLTLPEAELRRVRGRHAAMIFQEPMTSLNPVFTVGEQIAEGVRLHLGASRAQARDKAVEMLRQVGIPAPAERVDAYPHQLSGGMRQRVMMAMALACDPALLIADEPTTALDVTIQAQILDLLARLQAERGMAVLLITHDLGVVAESCDAVVVMYAGRVVERAPVRALFSQPAHPYTAGLLRSIPSRRDVGGARASRARLRAIPGRVPPLRQLPVGCAFRERCERALDVCAHVKPALTSPREGQWAACHNPVPAP

SEQ ID NO: 1103 - DNA, 1047 bp, Haemophilus somnus 129PT
  CDS (1)..(1047)
atggctttacttgatattcgtaatctttgtattgaaatagaaacaccaaaaggacgagtcaaaattattgataatgttaatttaaccttaaatgaaggtgaaatctgtggtttagtcggtgaatcaggttccggaaaaagcctgattgctaaagttatttgtaatgcaattaaggattcttggattattacagccgatcgttttcgttttgacgatgtagaactactaaaactaaatcccaaaaaaagacgtaaactggtaggtaaagaaatctccatgatttaccaagagcctttagcatctttagatcctagccgaaaaattggacaacaacttatccagagcattccctcttggacatttaaagggcgatggtggcaatggttcggttggaaaaaacgtcgtgctattgaattattacatcgtgtaggtgtgaaagatcataaagatattatgcaaagttacccacatgaagtaactgaaggtgaaggacaaaaaattatgattgcccttgcaattgcaaaccaacctcgattattaatcgctgatgaacctacaaattctcttgagtcaatgacaaaagtacaaatatttcgtttacttgccagtatgaatcaaaatcagggaacaagtattctgctggtaagtaatgatataaatagtattagtgcatggtgtgatagtttttcagttctttattgcggacaaaacgctgaatcaggatctaaagaaaacattttagaaaatcctcaccatccctatacaagagcattattacattctattcctgattttaaacagcccttagtacataaaagtcgtttgagtacgctaaaaggtgctgttccattattagaaggaatgcctatcggttgccgtttaggtccacgttgtccttttgcacaaaaagaatgtattcgaaaaccaaccgcacaacggattaaacaacatgaatttttctgccatttccctattaatttaaaagaaagtcaacgtagagaaaaagaaatggaaactggcccattagtcgtaaacacaacaaaataa

SEQ ID NO: 1104 - protein, 348 aa, Haemophilus somnus 129PT
MALLDIRNLCIEIETPKGRVKIIDNVNLTLNEGEICGLVGESGSGKSLIAKVICNAIKDSWIITADRFRFDDVELLKLNPKKRRKLVGKEISMIYQEPLASLDPSRKIGQQLIQSIPSWTFKGRWWQWFGWKKRRAIELLHRVGVKDHKDIMQSYPHEVTEGEGQKIMIALAIANQPRLLIADEPTNSLESMTKVQIFRLLASMNQNQGTSILLVSNDINSISAWCDSFSVLYCGQNAESGSKENILENPHHPYTRALLHSIPDFKQPLVHKSRLSTLKGAVPLLEGMPIGCRLGPRCPFAQKECIRKPTAQRIKQHEFFCHFPINLKESQRREKEMETGPLVVNTTK

SEQ ID NO: 1105 - DNA, 1047 bp, Haemophilus somnus 2336
  CDS (1)..(1047)
atggctttacttgatattcgtaatctttgtattgaaatagaaacaccaaaaggacgagtcaaaattattgataatgttaatttaaccttaaatgaaggtgaaatctgtggtttagtcggtgaatcaggttccggaaaaagcctgattgctaaagttatttgtaatgcaattaaggattcttggattattacagccgatcgttttcgttttgacgatgtagaactactaaaactaaatcccaaaaaaagacgtaaactggtaggtaaagaaatctccatgatttaccaagagcctttagcatctttagatcctagccgaaaaattggacaacaacttattcagagcattccctcttggacatttaaagggcgatggtggcaatggttcggttggaaaaaacgtcgtgctattgaattattacatcgtgtaggtgtgaaagatcataaagatattatgcaaagttacccacatgaagtaactgaaggtgaagggcaaaaaattatgattgcccttgcaattgcaaaccaacctcgattattaatcgctgatgaacctacaaattctcttgagtcaatgacaaaagtacaaatatttcgtttacttgccagtatgaatcaaaatcagggaacaagtattctgctggtaagtaatgatataaatagtattagtgcatggtgtgatagtttttcagttctttattgcggacaaaacgctgaatcaggatctaaagaaaacattttagaaaatcctcaccatccctatacaagagcattattacattctattcctgattttaaacagcccttagtacataaaagtcgtttgagtacgctaaaaggtgctgttccattattagaaggaatgcctatcggttgccgtttaggtccacgttgtccttttgcacaaaaagaatgtattcgaaaaccaagtgcacaacggattaaacaacatgaatttttctgccatttccctattaatttaaaagaaagtcaacgtagagaaaaagaaatggaaactggcccattagtcgtaaacacaacaaaataa

SEQ ID NO: 1106 - protein, 348 aa, Haemophilus somnus 2336
MALLDIRNLCIEIETPKGRVKIIDNVNLTLNEGEICGLVGESGSGKSLIAKVICNAIKDSWIITADRFRFDDVELLKLNPKKRRKLVGKEISMIYQEPLASLDPSRKIGQQLIQSIPSWTFKGRWWQWFGWKKRRAIELLHRVGVKDHKDIMQSYPHEVTEGEGQKIMIALAIANQPRLLIADEPTNSLESMTKVQIFRLLASMNQNQGTSILLVSNDINSISAWCDSFSVLYCGQNAESGSKENILENPHHPYTRALLHSIPDFKQPLVHKSRLSTLKGAVPLLEGMPIGCRLGPRCPFAQKECIRKPSAQRIKQHEFFCHFPINLKESQRREKEMETGPLVVNTTK

SEQ ID NO: 1107 - DNA, 1038 bp, Actinobacillus pleuropneumoniae serovar 1 str. 4074
  CDS (1)..(1038)
atggctctattagatattcgccatttaagtattgaaattgacacaccgaacggcagagtcagaatggttgataatattaatctgactttagacgaaggcgaaatctgcggattagtcggtgagtccggctcgggaaaaagtttaatcgctaaagtgatttgcggcgtaatgaaagacgaatggattgtgaccgccgaccgttttcgttttaatgatattgaattgttaaaactgactccgacggaaagacgtaaattggttagcgaacatatttctatgattttccaaaatccgctgtccggtttagacccgagtaagacgatcggcactcaacttatgcaaacgattaattttaaaggtaagtggtggcaatggttcggttggaagaaaaagaaagcgattgaattattgcaccgagtcgggattcgcgatcataagacaatgatgcaaagctatccgttcgatattaccgaaggcgaggcgcaaaaagtgattattgctatggcggtagcaaatcagccccgtttattggttgcggacgaacctacacacacgctggaagcgaccacgcagctacagatttatcgtttgttatccagtatgaataaaaacctcggcacttcaattttattggttgccaatgatattcgtagtattcataagtgggtcgattcgtttaatgtgctttattgcggacaaacggtcgaaattgccggcaaagaaaccattatggaagaaccgtttcatccttatacctcggtattactgaacagtattccggacttttcccagccgttggcgtttaaaagccgtttaaatacgttaaaaggctcggtaccgatgttgcaagatatgccgataggctgccgattaggtccgcgctgcccgtttgcacagaaaaaatgcgtacaaaagccgccattgcgtaaattcaaacagcacgaatttgcgtgccattatccgattaattttagggagaaaaatttcttaaaacgagcggattttgaaccggtcgtggtggcggataaagcggaataa

SEQ ID NO: 1108 - protein, 345 aa, Actinobacillus pleuropneumoniae serovar 1 str. 4074
MALLDIRHLSIEIDTPNGRVRMVDNINLTLDEGEICGLVGESGSGKSLIAKVICGVMKDEWIVTADRFRFNDIELLKLTPTERRKLVSEHISMIFQNPLSGLDPSKTIGTQLMQTINFKGKWWQWFGWKKKKAIELLHRVGIRDHKTMMQSYPFDITEGEAQKVIIAMAVANQPRLLVADEPTHTLEATTQLQIYRLLSSMNKNLGTSILLVANDIRSIHKWVDSFNVLYCGQTVEIAGKETIMEEPFHPYTSVLLNSIPDFSQPLAFKSRLNTLKGSVPMLQDMPIGCRLGPRCPFAQKKCVQKPPLRKFKQHEFACHYPINFREKNFLKRADFEPVVVADKAE

SEQ ID NO: 1109 - DNA, 987 bp, Actinobacillus pleuropneumoniae serovar 1 str. 4074
  CDS (1)..(987)
atggctttattaacggtagatcagctttctgtccatttcggtgatgagaaagcgcccttcaaagcggtagatcgtattagttatacgataaacgaaggcgaagtgttaggcattgtcggtgaatccggatcgggtaagtcggttagctcgttagcgattatgggcttaattgacttccccggtcgtgtggcggcaaactcgcttgagtttaacggcaataatttattagcgttaaaaccgaaagaaaagcaaaaaattgtcggtgcggacgtgtcgatgattttccaagatgcaatgaccagtcttaacccgagttatacggtcgggttccaaattatggaagcgttgaaagtgcatcaaggcggttcaaaagcggctcgtcgtgaacgtgcgattgaattattgacgatggtcggtattccggatccgcaatctcgtttagaggtgtatccgcatcagctttcgggcggtatgagccagcgtgtgatgatcgcaatggcgattgcgtgcaatccgaaattattgattgcggacgaaccgaccaccgcattagacgtaacgattcaagctcaaattattgatttattgttggaattacaacgtaaagaaaatatggcgttgattctgattacccatgatttagcgttagtagcggaatcggcacatcgtattatcgtgatgtatgcagggcaagtggtggaagaaggtaaagcggaattaatctttaaagcaccgcttcacccctatacgcaagcgttgctgaaagcgttgccggagtttgccgaaggtaaatctcgtttgcaatcgctacccggagtggttcccggcagatacgaccgaccgcaaggctgtttgctgaatccccgctgtccgtatgcaacggataaatgccgaaccagcgaacctgaattacgtgttttaaacggtcgccaagtgaaatgccatttcccgttagatgaaaatggcgtaccgactacccaacaataa

SEQ ID NO: 1110 - protein, 328 aa, Actinobacillus pleuropneumoniae serovar 1 str. 4074
MALLTVDQLSVHFGDEKAPFKAVDRISYTINEGEVLGIVGESGSGKSVSSLAIMGLIDFPGRVAANSLEFNGNNLLALKPKEKQKIVGADVSMIFQDAMTSLNPSYTVGFQIMEALKVHQGGSKAARRERAIELLTMVGIPDPQSRLEVYPHQLSGGMSQRVMIAMAIACNPKLLIADEPTTALDVTIQAQIIDLLLELQRKENMALILITHDLALVAESAHRIIVMYAGQVVEEGKAELIFKAPLHPYTQALLKALPEFAEGKSRLQSLPGVVPGRYDRPQGCLLNPRCPYATDKCRTSEPELRVLNGRQVKCHFPLDENGVPTTQQ

SEQ ID NO: 1111 - DNA, 975 bp, Pseudomonas aeruginosa UCBPP-PA14
  CDS (1)..(975)
atgagcctcctcgatatcaagaacctcagcgtgcgcttcggcgacaccaccgccgtgcccgtggtcgacggcctcgacctgagcgtcgacaagggcgaggtgctggccatcgtcggcgagtccggctccggcaagtcggtgaccatgatggccctgatgggcctgatcgacgcccccggctgggtgtccgccgatcacctgcgcttcgacggccacgacatgctcaccctcaagggccgccagcgccggcgcatcgtcggcaaggacatggcgatggtcttccaggacccgatgaccgccctcaaccccagctacaccgtcggctaccagatcgaggaagtcctccgcctgcatctcggcctgcgcggcaaggccctgcgccagcgcgccctggaactgctcgaacgggtcgagatcccggccgccgccagccgtctcgacgcctacccgcaccagctctccggcggcatgagccagcgcgtggcgatcgccatggccatcgctgccgagcccaagctgctgatcgccgacgagccgaccaccgccctcgacgtgaccatccaggcgcagatcatggagctgctgctgaacctgcagcgcgaccaggacatggcgctgatcctgatcacccacgatctcgccgtggtcgccgagaccgcccagcgcgtctgcgtgatgtacgccggcgaagcggtggagatcggcggcgtgccggcgctgttcgaccgcccgacccatccctacaccgaggcgctgatcaaggcgatccccgagcactgtgccggcgaagcccgcctggccaccctgcccggcatcgttccggggcgctacgaccgcccgcgcggttgcctgctgtcgccacgctgtccctatgcccaggagcattgccgccaggagcggccggccctggaagcgcacgagcgcggcgcggtgcgctgcttctatccgttgaacctgctgaacgaggtggcctga

SEQ ID NO: 1112 - protein, 324 aa, Pseudomonas aeruginosa UCBPP-PA14
MSLLDIKNLSVRFGDTTAVPVVDGLDLSVDKGEVLAIVGESGSGKSVTMMALMGLIDAPGWVSADHLRFDGHDMLTLKGRQRRRIVGKDMAMVFQDPMTALNPSYTVGYQIEEVLRLHLGLRGKALRQRALELLERVEIPAAASRLDAYPHQLSGGMSQRVAIAMAIAAEPKLLIADEPTTALDVTIQAQIMELLLNLQRDQDMALILITHDLAVVAETAQRVCVMYAGEAVEIGGVPALFDRPTHPYTEALIKAIPEHCAGEARLATLPGIVPGRYDRPRGCLLSPRCPYAQEHCRQERPALEAHERGAVRCFYPLNLLNEVA

SEQ ID NO: 1113 - DNA, 993 bp, Haemophilus influenzae R2846
  CDS (1)..(993)
atggcattattagacgtaaaagaactttctgttcactttggcgataaaaaaacgccatttaaagcagtggatcgcattagctatcaagtcgcacaaggcgaagtgcttggcattgtaggagaatcaggctcaggtaaatctgtgagttctctcgcaattatgggattaattgatcatcctggacgtgtatcggctgaatccttgcaatttgaaaatactgatttactcactttagagagtaaagctaaacgccagcttattggtgctgatgtagcaatgattttccaagatccgatgacaagtttgaatcctgcttatactgtgggtttccaaattatggaagcgttaaaaactcacgagggcggcacaaaaaaggcgagaaaagaccgcactttagagcttttaaaattggtcggtattcctgatcctgaatctcggattgatgtttatccccatcagctgtctggtggaatgagccagcgcgtgatgattgcgatggcaattgcttgcagacctaaattattgattgctgatgagccaaccacggcattggacgtgactattcaagcacaaattatggaactcttactcgaattgcagaaaaaagaatgcatgtcgctgattttgattacccatgatcttgcgcttgttgctgaagcggcagatcgaattatcgtgatgtatgctggacaaatcgttgaagaaggcaccgcaaaagatattttccgcgaaccaaaacacccttacacacaagccttgttacgttcattacctgaatttgcagagggaaaatctcgcttagaatcattacaaggggtcgtccctggaaaatacgatcgcccaacaggctgtttattaaatcctcgctgcccttatgccaccgaatattgtcgccaagttgaacctctattgcatcatatcggttcgcataaagtaaaatgccatactccactgaacgagcaaggcaatccagttgaatatcaaggagcttaa

SEQ ID NO: 1114 - protein, 330 aa, Haemophilus influenzae R2846
MALLDVKELSVHFGDKKTPFKAVDRISYQVAQGEVLGIVGESGSGKSVSSLAIMGLIDHPGRVSAESLQFENTDLLTLESKAKRQLIGADVAMIFQDPMTSLNPAYTVGFQIMEALKTHEGGTKKARKDRTLELLKLVGIPDPESRIDVYPHQLSGGMSQRVMIAMAIACRPKLLIADEPTTALDVTIQAQIMELLLELQKKECMSLILITHDLALVAEAADRIIVMYAGQIVEEGTAKDIFREPKHPYTQALLRSLPEFAEGKSRLESLQGVVPGKYDRPTGCLLNPRCPYATEYCRQVEPLLHHIGSHKVKCHTPLNEQGNPVEYQGA

SEQ ID NO: 1115 - DNA, 1050 bp, Haemophilus influenzae R2846
  CDS (1)..(1050)
atggcacttttagacatttgtaacctaaatattgaaattcaaacctccaatgggcgtataaaaattgtagatggcgtcaatctttctcttaacgaaggagaaatcactggattagttggcgaatcaggctcaggaaaaagtttaatcgctaaagtcatttgtaatgcaatcaaagaaaattggattattactgccgatcgctttcgttttcacgatgtagaattactgaaactcagtcctcataaacgacgtaagattgttggcaaagaaatttcaatgattttccaaaatcccttatcttgccttgatccaagtcgaaagataggaaaacaactcatccaaaatattcctaattggacatttaaaaataaatggtggaaatggtttgggtggaaaaaaagacgtgctattgaattgttacatcgcgtaggaattaaagatcatcgtgatattatggcaagctatcctaacgaactgacagaaggcgaaggacaaaaagttatgatcgcaatggctgtcgctaatcagccacgcttattaatcgcggatgaaccgacaaatgcgttagaatcaaccactgccctacaagtttttcgtttactttccagtatgaaccaaaatcagggaacaacaattttacttacgagtaacgatattaaaagtattagtgaatggtgcgatcaaatttcagtgctttattgtgggcaaaatacagaatccgctccgactgaaatattaatcgaaagtccccatcacccttatacccaagccttaattaatgctgtacccgattttactcaacctttaggatttaaaactaaattgggtacgttagaaggcaccgtgcctattttagagcaaatgccaattggctgtcgtcttggcccaagatgcccttttgcacaaaaaaaatgtatggaaaaacccagacgattgaaaataaaacaacacgaattttcttgtcattatcctattaatttacgagaaaaaaattttaaagaaaaaacaacagccaccccttttatacttaattacaaaggaaatgaataa

SEQ ID NO: 1116 - protein, 349 aa, Haemophilus influenzae R2846
MALLDICNLNIEIQTSNGRIKIVDGVNLSLNEGEITGLVGESGSGKSLIAKVICNAIKENWIITADRFRFHDVELLKLSPHKRRKIVGKEISMIFQNPLSCLDPSRKIGKQLIQNIPNWTFKNKWWKWFGWKKRRAIELLHRVGIKDHRDIMASYPNELTEGEGQKVMIAMAVANQPRLLIADEPTNALESTTALQVFRLLSSMNQNQGTTILLTSNDIKSISEWCDQISVLYCGQNTESAPTEILIESPHHPYTQALINAVPDFTQPLGFKTKLGTLEGTVPILEQMPIGCRLGPRCPFAQKKCMEKPRRLKIKQHEFSCHYPINLREKNFKEKTTATPFILNYKGNE

SEQ ID NO: 1117 - DNA, 1050 bp, Haemophilus influenzae R2866
  CDS (1)..(1050)
atggcacttttagacatttgtaacctcaatattgaaattcaaacctccaatggacgtataaaaattgtagatggcatcaatctttcccttaacgaaggggaaatcagtggattagttggcgaatcaggctcaggaaaaagcttaatcgctaaagtcatttgtaatgcaatcaaagaaaattggattattactgccgatcgctttcgttttcacgatgtcgaactacttaaactcagtcctaataaacgacgtaagattgtcggcaaagaaatttcaatgattttccaaaatcccttatcttgccttgatccaagccgaaaaatagggaaacaactcatccaaaatattcctaattggacatttaaaaataaatggtggaaatggtttgggtggaaaaaaagacgtgctattgaattgttacatcgcgtaggaattaaagatcatcgtgatattatggcaagctatcctaacgaactgacagaaggcgaaggacaaaaagttatgatcgcaatggctgtcgctaatcagcctcgtttattaatcgcggatgaaccaacaaatgcattagaatcaaccactgccctacaagtttttcgtttactttctagtatgaaccaaaatcagggaacaacaattttacttacgagtaacgatattaaaagtattagtgaatggtgcgatcaaatttcagtgctttattgtgggcaaaataccgaatctgccccgactgaaatattaatcgaaagtccccatcatccttatacccaagccttaattaatgcagtacccgattttactcaacctttgggatttaaaactaaattgggtacgttagaaggcaccgtgcctattttagagcaaatgccaattggctgtcgtcttggcccaagatgcccttttgcacaaaaaaaatgtatggaaaaaccaagacgattgaaaataaaacaacacgaattttcttgtcattatcctattaatttacgagaaaaaaatttcaaagaaaaaacaaccgccaccccttttatacttaattgcaaaggaaatgaataa

SEQ ID NO: 1118 - protein, 349 aa, Haemophilus influenzae R2866
MALLDICNLNIEIQTSNGRIKIVDGINLSLNEGEISGLVGESGSGKSLIAKVICNAIKENWIITADRFRFHDVELLKLSPNKRRKIVGKEISMIFQNPLSCLDPSRKIGKQLIQNIPNWTFKNKWWKWFGWKKRRAIELLHRVGIKDHRDIMASYPNELTEGEGQKVMIAMAVANQPRLLIADEPTNALESTTALQVFRLLSSMNQNQGTTILLTSNDIKSISEWCDQISVLYCGQNTESAPTEILIESPHHPYTQALINAVPDFTQPLGFKTKLGTLEGTVPILEQMPIGCRLGPRCPFAQKKCMEKPRRLKIKQHEFSCHYPINLREKNFKEKTTATPFILNCKGNE

SEQ ID NO: 1119 - DNA, 1059 bp, Burkholderia vietnamiensis G4
  CDS (1)..(1059): transl_table=11
atgcacggcgccccccaagggggcggtcatcctctttgggacggcccggcggaggacgacatgagcaacccactcctgaccatccgcaatctcgcggtgaatttcaacggcctgcccgccgtcgaccggatcaacctgtcgatcgcgccgggcgaggtggtgggcgtcgtcggcgaatcgggctcgggcaagagcgtgacgatgatggcgctgatgggcctgatcgacgcgcccggcaaggtgacggccgacgaggtcacgttcaacggcgtggatctcttgaaggcgtcgccgaaggcgcgccgcaagatcgtcggcaaggacatcgcgatggtgttccaggacgcgctgacgagcctgaacccgagctacacggtcggctaccagatcaaggaggtgctgaagctccacgaagggctgcgcggcgacgcgctgcaccggcgcgcgctcgagctgctcgaccaggtcggcattcccgatgcgaagaaccggatcgcggcgttcccgcaccagatgtcgggcggcatgaaccagcgcgtgatgatcgcgatggccgtcgcgtgcaatccgaagctgctgatcgccgacgagccgaccaccgcgctcgacgtgacgatccaggcgcagatcatggatctgctcgtcaagctgcagaaggaacgcgggatggcgctggtgctgatctcgcacgatctggccgtggtgtcggaggtcgcgcagcgcgtggcggtgatgtacgcgggcgagatcatcgagaccaaccgcgtgccggacatcttccgcgcgccgcatcacccgtacaccgaagcgctgctcgcggcgattcccgagcacaataagggggcgcgtcgccttgccgcattgcccggtatggtgccgggccgcgatgatcgcccgtccggatgcctgttcgcgccgcgctgcaagtacgtcgtcgacgattgccgcaaggcgcgcccggcgctcgatccgctcgtggccggcaacgatgcgatgcgcgcgcgctgcatcaagccgctcaatgtttccagcttcgacctgacgggaggcgcacgatga

SEQ ID NO: 1120 - protein, 352 aa, Burkholderia vietnamiensis G4
MHGAPQGGGHPLWDGPAEDDMSNPLLTIRNLAVNFNGLPAVDRINLSIAPGEVVGVVGESGSGKSVTMMALMGLIDAPGKVTADEVTFNGVDLLKASPKARRKIVGKDIAMVFQDALTSLNPSYTVGYQIKEVLKLHEGLRGDALHRRALELLDQVGIPDAKNRIAAFPHQMSGGMNQRVMIAMAVACNPKLLIADEPTTALDVTIQAQIMDLLVKLQKERGMALVLISHDLAVVSEVAQRVAVMYAGEIIETNRVPDIFRAPHHPYTEALLAAIPEHNKGARRLAALPGMVPGRDDRPSGCLFAPRCKYVVDDCRKARPALDPLVAGNDAMRARCIKPLNVSSFDLTGGAR

SEQ ID NO: 1121 - DNA, 1041 bp, Mesorhizobium sp. BNC1
  CDS (1)..(1041): transl_table=11
atgacgacagccagctcaaaaccatctgcaagcgcaccgctgctgtcagtgcgggacctctctgtgcaattcgcacgcaaggacggaggtctggctcccgcagttcgctcgctgtcgtttgatctgcggcgcggcgaagtccttgctctggtcggcgagtccggatgcggcaaatcggccaccgcgctcgcgctaatcgggctccttgcccgaaatgcccgggtgggcgggagcgttgagttcgacggaagaaacctgctctcgctgcccgagcgcgaatgggagacgatacgcggccggcggatcgcaatgatcttccaggatccgatgacggcgctcgacccgctctaccgcatcggcgaacagatagcagaggcgctgcgacgccatctcgatctctcctccgtcgctttaaggacccgggtcaacgaacttctcacgcttgtcggcatcgatgatcccgaactcagagtccgccaatttccacaccagctctccggggggttgcgccagcgggtcgtgatcgccattgcccttgcctgcaatccggaagtcgtcatagccgacgagccgaccacagctctggatgtaaccatccaagcccagatcgtgaagttgctggccgatctcaacagaaaggtcggcatgggcatgatcttcatctcacacgatcttggggtggtttcacagatcgcagacaagatcgcagtgatgtatgccgggcaggtggtggaaagcggcccccgcgccgagttgctgcgcgacccgaggcacccctacaccaaggccctgctggcgtcggtaccgaatcctgcaatggcgcccaagcaattcctgaacgccattctgggaaccgtacccgacatggcgcgtctggaggctggctgcactttccgcaaccgttgcccccaagcccaagagggctgccacgccgagcccgggctcaccgggatttcgccctcgcggttcgcacgctgctggtttgctgaaacagggagctatgagggaatggaacggcaagcaatccgcccattctcctag

SEQ ID NO: 1122 - protein, 346 aa, Mesorhizobium sp. BNC1
MTTASSKPSASAPLLSVRDLSVQFARKDGGLAPAVRSLSFDLRRGEVLALVGESGCGKSATALALIGLLARNARVGGSVEFDGRNLLSLPEREWETIRGRRIAMIFQDPMTALDPLYRIGEQIAEALRRHLDLSSVALRTRVNELLTLVGIDDPELRVRQFPHQLSGGLRQRVVIAIALACNPEVVIADEPTTALDVTIQAQIVKLLADLNRKVGMGMIFISHDLGVVSQIADKIAVMYAGQVVESGPRAELLRDPRHPYTKALLASVPNPAMAPKQFLNAILGTVPDMARLEAGCTFRNRCPQAQEGCHAEPGLTGISPSRFARCWFAETGSYEGMERQAIRPFS

SEQ ID NO: 1123 - DNA, 1008 bp, Shewanella sp. ANA-3
  CDS (1)..(1008): transl_table=11
atgccattactcgacgttagaaacctgaccattgagctcgacacgccccacggcagagtgcgcgcccttgagaaagtgagtttgaccctgaacgcgggggaaattcacggtctagtgggtgaatcgggctcgggccgcagtctgctcgccagagctattcttgggatcccaggccccaattggaccattaccgccgaccgcatgatgtgggatggtaataatctgatggccatgacctcgaaggagcgccgtaatctgatgggctcagatatggcaatgatcttccaagacccctcaggcagccttgacccttcgcaaactgtgggcagtcagctgatgcaggccatgcctaagaaccctaaggcttacttttggcaaaagcacaaacatgccaaactcacggcacaaaaatggctgcataaggtcgggattaagaatccgcaaaaagtgatgttgagttatgcttgggagctttcggaaggcgaatgccaaaaagtgatgatcgccatggcaattgccaaccaaccgcgattattgattgccgacgaaccgaccaactcgatggagctgagcactcaggcgcagattttccgtctgctatcacagcttaaccagctacaaaacgtgtcgattttaatcatcagccacgagcttgaaacgctggcacagtggtgcgatcacctatccgtgctctattgtggccaagtcatggaatctggcccaacggaagaactgatcaatcagccgtatcatccttacactaaggcactcttggataatatgccggattactcggggatagaggcgcacaaagccattatgccaaccctgccaggctcggcccccgccctgcagcatctgcccattggttgtcgcctagggccaagatgccctgaggcacaaaagaaatgcgttaatcagccaagtttgagtcatttacgcgaccgctactttgcctgccatttcccttaccacggtgaaacgacaaatgacgaccccactgcttaa

SEQ ID NO: 1124 - protein, 335 aa, Shewanella sp. ANA-3
MPLLDVRNLTIELDTPHGRVRALEKVSLTLNAGEIHGLVGESGSGRSLLARAILGIPGPNWTITADRMMWDGNNLMAMTSKERRNLMGSDMAMIFQDPSGSLDPSQTVGSQLMQAMPKNPKAYFWQKHKHAKLTAQKWLHKVGIKNPQKVMLSYAWELSEGECQKVMIAMAIANQPRLLIADEPTNSMELSTQAQIFRLLSQLNQLQNVSILIISHELETLAQWCDHLSVLYCGQVMESGPTEELINQPYHPYTKALLDNMPDYSGIEAHKAIMPTLPGSAPALQHLPIGCRLGPRCPEAQKKCVNQPSLSHLRDRYFACHFPYHGETTNDDPTA

SEQ ID NO: 1125 - DNA, 1008 bp, Shewanella sp. MR-7
  CDS (1)..(1008): transl_table=11
atgccattacttgacgttagaaacctgaccattgagctcgacacgccccacggcagagtccgcgcccttgagaaagtgagtttgaccctcaacgcgggggaaatccacggtctcgtgggagaatcaggctcgggccgcagtctgcttgccagagccattcttgggatcccaggccccaattggaccattaccgccgaccgcatgatgtgggatggtaataatctgatggccatgacctcgaaggagcgccgtaatctgatgggttcagatatggcgatgatcttccaagacccatctggcagccttgacccttcgcaaaccgtgggtagccagctgatgcaggccatgcctaagaatcctaaggcttacttttggcaaaaacacaaacatgccaaacagacagcgcaaaaatggctgcataaggtcgggattaagaatccgcaaaaggtcatgtctagctatgcttgggagctttcggaaggcgaatgccaaaaagtgatgattgccatggcgatcgccaaccaaccgcgactcttaattgccgatgaaccgacaaactcgatggagctgagcacgcaggcacagattttccgtctgctatcacagcttaaccagctacaaaacgtgtcgattttaatcatcagccacgagcttgagaccctagcacaatggtgcgatcacctatccgtgctctattgcggtcaagtcatggaatctggcccaacggaagaactgatcaatcagccctatcatccttacactaaggcactcttggataatatgccggattactcggggatagcggcacataaggcgattatgccaaccctgccaggctcggcccccgccctacagcatctgcccattggttgtcgccttgggcctagatgcccagaggcacaaaagaaatgtgttaatcagccaagtttaagtcatttacgagaccgctactttgcttgccatttcccttatcacggtgaaacgacaaatgacgaccccactgcttaa

SEQ ID NO: 1126 - protein, 335 aa, Shewanella sp. MR-7
MPLLDVRNLTIELDTPHGRVRALEKVSLTLNAGEIHGLVGESGSGRSLLARAILGIPGPNWTITADRMMWDGNNLMAMTSKERRNLMGSDMAMIFQDPSGSLDPSQTVGSQLMQAMPKNPKAYFWQKHKHAKQTAQKWLHKVGIKNPQKVMSSYAWELSEGECQKVMIAMAIANQPRLLIADEPTNSMELSTQAQIFRLLSQLNQLQNVSILIISHELETLAQWCDHLSVLYCGQVMESGPTEELINQPYHPYTKALLDNMPDYSGIAAHKAIMPTLPGSAPALQHLPIGCRLGPRCPEAQKKCVNQPSLSHLRDRYFACHFPYHGETTNDDPTA

SEQ ID NO: 1127 - DNA, 1008 bp, Shewanella sp. MR-4
  CDS (1)..(1008): transl_table=11
atgccattactcgacgttagaaacctgaccattgagctcgacacgccccacggcagagtccgcgcccttgagaaagtgagtttgaccctgaacgcgggggaaatccacggtctcgtgggtgaatcaggctcaggccgcagtctgctcgctagagccattcttgggatcccaggccccaattggaccattaccgccgaccgcatgatgtgggatggtaataatctgatggccatgacctcgaaggagcgccgtaatctgatgggttcagatatggcgatgatcttccaagatccgtctggtagccttgacccttcgcaaaccgtgggtagtcagctgatgcaggccatgcctaagaatcctaaggcttacttttggcaaaagcacaaacatgccaaacagacagcgcaaaaatggctgcataaggtcgggattaagaatccgcaaaaggtcatgtccagctatgcttgggagctttcggaaggcgaatgccaaaaagtgatgatcgcgatggcaattgccaaccaaccgcgattattgatcgccgacgaaccgacaaactcgatggagctgagcactcaggcacagattttccgcctactatcacagcttaaccagctacaaaacgtgtcgattttaatcatcagccacgagcttgaaacgctagcacaatggtgcgatcacctatccgtgctctattgcggccaagtgatggagtcaggcccaacggaagaactgatcaatcagccctatcatccttacactaaggcactcttggataatatgccggattactcggggatagaggcgcacaaggccattatgccgaccctaccaggctcggcccccgccctgcagcatctgcccattggttgtcgcctagggccaagatgccctgaggcacaaaagaaatgcgttaatcagccaagtttgagtcatttacgcgaccgctactttgcctgccatttcccttaccacggtgaaacgacaaatgacgaccccactgcttaa

SEQ ID NO: 1128 - protein, 335 aa, Shewanella sp. MR-4
MPLLDVRNLTIELDTPHGRVRALEKVSLTLNAGEIHGLVGESGSGRSLLARAILGIPGPNWTITADRMMWDGNNLMAMTSKERRNLMGSDMAMIFQDPSGSLDPSQTVGSQLMQAMPKNPKAYFWQKHKHAKQTAQKWLHKVGIKNPQKVMSSYAWELSEGECQKVMIAMAIANQPRLLIADEPTNSMELSTQAQIFRLLSQLNQLQNVSILIISHELETLAQWCDHLSVLYCGQVMESGPTEELINQPYHPYTKALLDNMPDYSGIEAHKAIMPTLPGSAPALQHLPIGCRLGPRCPEAQKKCVNQPSLSHLRDRYFACHFPYHGETTNDDPTA

SEQ ID NO: 1129 - DNA, 978 bp, Sulfitobacter sp. EE-36
  CDS (1)..(978): transl_table=11
atgacacttttgcgtatcagaaacctaagcgttgatttcgccacggcctcgggcaagttccgggcggtggacggtgtcgaccaggacgtgaacgaaagcgagatccttgcgattgtgggggaaagcgggtcgggtaaatccgtgtcgatgctggcgctgatggggctgctgccctggaccgccaccgtcaccgcggacgagctgacctttgacgggcacaacctgctaacgatggacgccaaggcgcgtcgcaagatcgtcggcaatgatctggcgatgatctttcaggagccgatgtcatcgctcaatccctgtttcaccgtgggctggcaaatccgcgaggccctgcgggtgcatcttggcatgggccgccgcgagcgtcagaaacgcgcgatcgagctgtttgaacaggtcggcatccccgatcccgaaaagcgcctgtcggccttcccgcaccagatgtcgggcgggatgaaccagcgggtgatgatcgccatggcgattgcctgcaagcccaagctgctgatcgccgatgaacctaccacggcgctcgacgtgaccattcaggcgcagatcctcgatctgctcgcatccctacgcgaggaaacgggcatggggctggtgttgatcacgcacgacatgggtgttgttgcggaaaccgccgaacgggtcagcgtgcaatatgccggccagaagatcgaagaacagccggtgatcccgctgtttgacgcgccgcaccacccctatacctcggcgctgctggatgcgctgccagaacgggcgactgaaaagcggctgccgaccattccgggcgtggtgccggggcaattcgaccgccccgcaggatgcctgttttcgccacgctgcaaattcgccaacgccaaatgcaagtccgaagcgccgcccgccttgggcgctgatctgggctatgcgcgttgtttctaccccttgaacacagacgaaagggtcgcatcatga

SEQ ID NO: 1130 - protein, 325 aa, Sulfitobacter sp. EE-36
MTLLRIRNLSVDFATASGKFRAVDGVDQDVNESEILAIVGESGSGKSVSMLALMGLLPWTATVTADELTFDGHNLLTMDAKARRKIVGNDLAMIFQEPMSSLNPCFTVGWQIREALRVHLGMGRRERQKRAIELFEQVGIPDPEKRLSAFPHQMSGGMNQRVMIAMAIACKPKLLIADEPTTALDVTIQAQILDLLASLREETGMGLVLITHDMGVVAETAERVSVQYAGQKIEEQPVIPLFDAPHHPYTSALLDALPERATEKRLPTIPGVVPGQFDRPAGCLFSPRCKFANAKCKSEAPPALGADLGYARCFYPLNTDERVAS

SEQ ID NO: 1131 - DNA, 1008 bp, Roseovarius nubinhibens ISM
  CDS (1)..(1008): transl_table=11
atgaccgaagagacgcttctgagtgtgcgcaacctgacgctgaccatccccacggggagcggtatcctgcatgcggtgcgcggtattgatttcgatctcaagcggggcgagaccctgtcgatcgtgggcgaaagcgggtcgggcaaatcgctcacctcgctggcggtgatgggccttctgtcgaagggcatcaagcgcgaggccgacgagatgcgctttgaccagaccgatctgcgcagcgcctcgcccaaggtgatgcgcgatctgcgcggcaaccgcatggcgatgatctttcaggaaccgatgacctcgctcaacccggcctatacgatcggcgatcagctgatcgagaccctgcggctgcaccgccgggtcagcaaggccaaggcgcgcgagcgggcgattgaactgttggaaaaggtcggcatcaccgccgcggcgagccggttggggcaatatccccatcagctctcgggtgggttgcggcagcgggtgatgatcgcgctggcgctgatgtgcgagccggatcttctcatcgcggacgagccgaccacggcgctcgatgtgaccattcaggcgcagatcctgcggctcctggtcgatctcaccaaagagatgaacatggcgatgatcctgatcacccatgatctcggcgtggtggcgcgggtcgccgacaaggtggcggtgatgtatgccggtgagctggtcgagaccggtccggccaaggacatctttgccgcgccgagccatccctacacgcgcggcctgctgcgctgcatcccgcagcccggcaagaccgaacgcggcgcgccgctcggcaccattccgggcatcgtgccgtcgctcatcggcgaggtcacgggctgtgccttccgcacccgttgcgcccatgcgcagccggcctgccgcgaggccatcccgcatcatggcgatgccgcgcatcgtttccgttgtatccatcccgacggggcccgctccgccgagaccgccgaaggagagcccgtatga

SEQ ID NO: 1132 - protein, 335 aa, Roseovarius nubinhibens ISM
MTEETLLSVRNLTLTIPTGSGILHAVRGIDFDLKRGETLSIVGESGSGKSLTSLAVMGLLSKGIKREADEMRFDQTDLRSASPKVMRDLRGNRMAMIFQEPMTSLNPAYTIGDQLIETLRLHRRVSKAKARERAIELLEKVGITAAASRLGQYPHQLSGGLRQRVMIALALMCEPDLLIADEPTTALDVTIQAQILRLLVDLTKEMNMAMILITHDLGVVARVADKVAVMYAGELVETGPAKDIFAAPSHPYTRGLLRCIPQPGKTERGAPLGTIPGIVPSLIGEVTGCAFRTRCAHAQPACREAIPHHGDAAHRFRCIHPDGARSAETAEGEPV

SEQ ID NO: 1133 - DNA, 993 bp, Pseudoalteromonas tunicata D2
  CDS (1)..(993): transl_table=11
atgcaattactcgatattcgtaatctcactattgaactagaaaccggtggcaccatcatacgagcggttgataaagttaatctcagcctaaaagaaggtgaagtacatgcgctagtaggtgaatccggttcgggaaaaagcctgattgcgaaagcaattgtaggggtattaaacgagcgctggaaaattaccgccgatcgaatgcattggcgtggcattgatttaatgcgattgagcccagaaaaacgccgaaaaattattagccaagatattgccatgatttaccaagaaccaagtagatgtcttgacccaaccacaaaaattttcgaacaaatagaagaaagtattcctagctctgatttaactggctttttttggcaaaaaaatgctcaacgtaaaaaattagcccgcgcgttacttcacaaagtgggtattcgagaacataagactattttagacagttacccgcatgaactttctgagggtatttgccaaaaagtaatgattgcaatggcaattgctcgcaaaccaagcctattgatagccgatgaaccaacaacggctcttgaaagcaccacgcgtgcgcaagtttttcgattactcaaaagtttaaacttactaaaaaacatgtcgattctaatgatttctcatgaactagaagagctagtaagctggactcattgcattcatgttttgtactgtgggcaaatggtcgaagcaggtcctacaaagcaaatttttgaagcgcctcatcacccatacacacaagccttactaaaaagtttgcctgaatataatattgggctacaacataaaggtgaaatttacgctcttaaaggcactatccctacattgcaccatttaccaataggctgtcgcttaggcccacgctgtccacaagcacaaaaagcatgcgtaatgaccccgactttaaccaaatatcatgctcatagttacgcttgtcatttcccgttaattaaggatgtgagttaa

SEQ ID NO: 1134 - protein, 330 aa, Pseudoalteromonas tunicata D2
MQLLDIRNLTIELETGGTIIRAVDKVNLSLKEGEVHALVGESGSGKSLIAKAIVGVLNERWKITADRMHWRGIDLMRLSPEKRRKIISQDIAMIYQEPSRCLDPTTKIFEQIEESIPSSDLTGFFWQKNAQRKKLARALLHKVGIREHKTILDSYPHELSEGICQKVMIAMAIARKPSLLIADEPTTALESTTRAQVFRLLKSLNLLKNMSILMISHELEELVSWTHCIHVLYCGQMVEAGPTKQIFEAPHHPYTQALLKSLPEYNIGLQHKGEIYALKGTIPTLHHLPIGCRLGPRCPQAQKACVMTPTLTKYHAHSYACHFPLIKDVS

SEQ ID NO: 1135 - DNA, 1002 bp, Photobacterium sp. SKA34
  CDS (1)..(1002): transl_table=11
atgccattactcgatatacgcaacctcactatcgaaattgatacaccacaaggcatggtgaaagcggttgatagaattagcataaccattaacgaaagcgaaattcgtggtttagtgggtgaatctggttcaggtaaaagccttgtcgcgaaagctattgcgggcgtctctaaagacaattggcgcatcagtgccgatcgaatgcgcttaggtgatattgacttactcactctatctcatcgtgagcgacgtaaaattgtcggccgtgaaatggcaatgatattccaagaaccatcaacctgtcttgatccctctgagacaataggtgaacagttggaagaagccattccctcttcatcatttactgggcatttttggcagcgctttcactggcgccaaaaacaagctatcgcacttttgcataaagtcggtatcaaagagcacaagcgtgtcatgcatagctatccttatgaattaacagatggtgagtgtcaaaaagtcatgattgcgatggcgattgcaaaccgtccacgattattgattgccgatgaacccacaaacgacttagatccgatcacccaggctcaaatttttcgcttattaagcaggatgaaccagttaggtaacaccactattttattagtcagtcatgatcttacaactgttacccagtgggctgatagaattacagtcatgtattgtggacaatcagttgaatccggtacctctaagcaattgttagagtcaccgcaccacccttataccgcagcgttaatgcgtgctatgcctgattttagcttagacaatataagccataagacgaaactagaaacgttaccgggatctattcctccacttcagcacttaccgattggttgtcgattaggccctcgttgtcctcatgcccaacgtaaatgtgttgaagtgcctaaacgtagaaaaattaaaaaccataagtttagctgtcacttcccgctaaacatggaggaaggcagtaaatga

SEQ ID NO: 1136 - protein, 333 aa, Photobacterium sp. SKA34
MPLLDIRNLTIEIDTPQGMVKAVDRISITINESEIRGLVGESGSGKSLVAKAIAGVSKDNWRISADRMRLGDIDLLTLSHRERRKIVGREMAMIFQEPSTCLDPSETIGEQLEEAIPSSSFTGHFWQRFHWRQKQAIALLHKVGIKEHKRVMHSYPYELTDGECQKVMIAMAIANRPRLLIADEPTNDLDPITQAQIFRLLSRMNQLGNTTILLVSHDLTTVTQWADRITVMYCGQSVESGTSKQLLESPHHPYTAALMRAMPDFSLDNISHKTKLETLPGSIPPLQHLPIGCRLGPRCPHAQRKCVEVPKRRKIKNHKFSCHFPLNMEEGSK

SEQ ID NO: 1137 - DNA, 993 bp, Erwinia chrysanthemi
  CDS (1)..(993): transl_table=11
atggcattactggaaattcgtaatgtgaccattgaattcctcacgccggacggcccggtgaaagcagtggatcgtgtcagcatcaacctcaacgaaggcgaaattcgcgggctggtgggtgagtcaggttccggcaagagcctgatcgccaaagccatttgcggcatcaataaagaaaactggcgcatcaccgccgaccgttttcgcttcgatgacgtggacatgctgcaactcacgccgcctcagcgccgtaaactggtgcggcacaacatgtcgatgatctttcaggaaccgcagtcctgtctcgatccgtccgcacgcgtcggccgtcagttgattcaatccatccccggctggacctacaaaggccgttggtggcaacgcttcaactggcgcaaacggcgcgccatcgaattgctgcaccgcgtcggcatcaaggaccataaagatgtcatgcgcagtttcccctacgaattgaccgaaggagagtgccagaaagtgatgatcgccatcgcgctcgccaatcagccccgattgctgattgccgatgaacccaacaacgcgatggaagccaccacgcaggcgcaaatcttccgcctgctctcccggctcaatcagaacaacaacaccaccattttgctgatcagccacgatttgcagaccatgagcaaatgggcggaccgcatcaacgtgttgtattgcggccagacggtggaaagcgccgtcagcgatgaattgatcagcgcgccgcaccatccttatacccaggcgctgatccgcgccatgccggatttcggctgctcgttgccgcataaaagccgccttaacacgctgccgggggcgattccgtcgctggcgcacctgccggtagggtgtcggcttggtccccgttgcccttattcacagaaacagtgcatgacggcaccgccgctgatcccggtaagaaaccattggtatgcctgtcacttcccgctcaacatggaggaatcctga

SEQ ID NO: 1138 - protein, 330 aa, Erwinia chrysanthemi
MALLEIRNVTIEFLTPDGPVKAVDRVSINLNEGEIRGLVGESGSGKSLIAKAICGINKENWRITADRFRFDDVDMLQLTPPQRRKLVRHNMSMIFQEPQSCLDPSARVGRQLIQSIPGWTYKGRWWQRFNWRKRRAIELLHRVGIKDHKDVMRSFPYELTEGECQKVMIAIALANQPRLLIADEPNNAMEATTQAQIFRLLSRLNQNNNTTILLISHDLQTMSKWADRINVLYCGQTVESAVSDELISAPHHPYTQALIRAMPDFGCSLPHKSRLNTLPGAIPSLAHLPVGCRLGPRCPYSQKQCMTAPPLIPVRNHWYACHFPLNMEES

SEQ ID NO: 1139 - DNA, 984 bp, Escherichia coli O157
  CDS (1)..(984): transl_table=11
atggcgttattaaatgtagataaattatcggtgcatttcggcgacgaaagcgcaccgttccgcgccgtagaccgcattagctacagcgtaaaacagggcgaagtagtcgggattgtgggtgagtctggctccggtaagtcggtcagttcgctggcgattatggggctgattgattatccgggccgcgtgatggcggaaaagctggagtttaacggtcaggatttgcagcgtatctcggaaaaagagcgccgcaacctggtgggtgccgaagtggcgatgatcttccaggacccgatgaccagccttaacccgtgctacaccgtgggtttccagattatggaagcgattaaggtgcatcagggcggtaataagagcactcgtcgtcagcgggcgattgacttgttgaatcaggtcggtattcccgatccggcttcgcgtctggatgtttacccgcatcagctttccggcggcatgagccagcgcgtgatgattgcgatggccattgcctgtcggccaaaactgctgattgccgatgaaccaaccactgcgctggacgtgaccattcaggcgcaaatcattgaactactgctggagctacagcagaaagagaacatggcgctggtgttaattacccatgacctggcgctggtggcggaagcggcacataaaatcatcgtgatgtatgccggtcaggtggtggaaacgggcgatgcgcacgccatcttccatgcgccgcgtcacccgtatactcaggcattgctgcgtgcgctgccggaatttgctcaggacaaagaacgtctggcatcgttgcctggcgttgttcccggcaagtacgaccgcccgaacggctgcttgcttaacccgcgctgcccctatgccactgacagatgtcgcgctgaagaaccggcgctgaatatgctcgctgacgggcgtcagtccaaatgccattacccacttgatgatgccgggaggccgacactatga

SEQ ID NO: 1140 - protein, 327 aa, Escherichia coli O157
MALLNVDKLSVHFGDESAPFRAVDRISYSVKQGEVVGIVGESGSGKSVSSLAIMGLIDYPGRVMAEKLEFNGQDLQRISEKERRNLVGAEVAMIFQDPMTSLNPCYTVGFQIMEAIKVHQGGNKSTRRQRAIDLLNQVGIPDPASRLDVYPHQLSGGMSQRVMIAMAIACRPKLLIADEPTTALDVTIQAQIIELLLELQQKENMALVLITHDLALVAEAAHKIIVMYAGQVVETGDAHAIFHAPRHPYTQALLRALPEFAQDKERLASLPGVVPGKYDRPNGCLLNPRCPYATDRCRAEEPALNMLADGRQSKCHYPLDDAGRPTL

SEQ ID NO: 1141 - DNA, 993 bp, Haemophilus influenzae
  CDS (1)..(993): transl_table=11
atggcattattagacgtaaaagaactttctgttcactttggcgataaaaaaacgccatttaaagcagtggatcgcattagctatcaagtcgcacaaggcgaagtgcttggcattgtaggagaatcaggctcaggtaaatctgtgagttctctcgcaattatgggattaattgatcatcctggacgtgtatctgctgaatccttgcaatttgaaaatactgatttactcactttagagagtaaagctaaacgccagcttattggtgctgatgtagcaatgattttccaagatccgatgacaagtttgaatcctgcttatactgtgggcttccaaattatggaagcgttaaaaactcacgaaggcggcacaaaaaaggcgagaaaagaccgcactttagagcttttaaaattggtcggtattcctgatcctgaatctcggattgatgtttatccccatcagctgtctggtggaatgagccagcgcgtgatgattgcgatggcaattgcttgcagacctaaattattgattgctgacgaaccaaccacggcattggacgtgactatccaagctcaaattatggaactcttacttgaattgcaaaagaaagaatgcatgtccctaattttgattactcacgatctagcacttgtggctgaagcggcagagcgaattatcgtgatgtatgctggacaaatcgttgaagaaggcaccgcaaaagatattttccgcgaaccaaaacatccttacacacaagccttgttacgttcattacctgaatttgcagagggaaaatctcgcttagaatcattacaaggggtcgtccctggaaaatacgatcgcccaacaggctgtttattaaatcctcgctgcccttatgccaccgaatattgtcgccaagttgaacctcaattgcatcatatcggttcgcgtaaagtaaaatgccatactccgctgaacgagcaaggcaatccagttgaatatcaaggagcttaa

SEQ ID NO: 1142 - protein, 330 aa, Haemophilus influenzae
MALLDVKELSVHFGDKKTPFKAVDRISYQVAQGEVLGIVGESGSGKSVSSLAIMGLIDHPGRVSAESLQFENTDLLTLESKAKRQLIGADVAMIFQDPMTSLNPAYTVGFQIMEALKTHEGGTKKARKDRTLELLKLVGIPDPESRIDVYPHQLSGGMSQRVMIAMAIACRPKLLIADEPTTALDVTIQAQIMELLLELQKKECMSLILITHDLALVAEAAERIIVMYAGQIVEEGTAKDIFREPKHPYTQALLRSLPEFAEGKSRLESLQGVVPGKYDRPTGCLLNPRCPYATEYCRQVEPQLHHIGSRKVKCHTPLNEQGNPVEYQGA

SEQ ID NO: 1143 - DNA, 1050 bp, Haemophilus influenzae
  CDS (1)..(1050): transl_table=11
atggcacttttagacatttgtaacctcaatattgaaattcaaacctccaatggacgtataaaaattgtagatggcgtcaatctttcccttaacgaaggggaaatcagtggattagttggcgaatcaggctcaggaaaaagcttaatcgctaaagtcatttgtaatgcaatcaaagaaaattggattattactgccgatcgctttcgttttcacgatgtcgaattacttaaactcagtcccaataaacgccgaaagttagtgggtaaagaaatatccatgattttccaaaatcccttatcttgccttgatccaagtcgaaaaatagggaaacaactaatccaaaatattcctaattggacatttaaaaataaatggtggaaatggtttgggtggaaaaaaagacgtgctattgaattgttacatcgcgtaggaattaaagatcatcgtgatattatggcaagctatcctaacgaactgacagaaggcgaaggacaaaaagttatgatcgcaatggctgtcgctaatcagccacgtttattaatcgcagatgaaccaacaaatgcattagaatcaaccactgccctacaagtttttcgtttactttccagtatgaaccaaaatcagggaacaacaattttacttacgagtaacgatattaaaagtattagtgaatggtgcgatcaaatttcagtgctttattgtgggcaaaataccgaatctgccccgactgaaatattaatcgaaagtccccatcatccttatacccaagccttaattaatgcagtacccgattttactcaacctttggggtttaaaactaaattgggtacgttagaaggcaccgcgcctattttagagcaaatgccaattggctgtcgtcttggcccaagatgcccttttgcacaaaaaaaatgtatggaaaaaccaagacgattgaaaataaaacaacacgaattttcttgtcattatcctattaatttacgagaaaaaaatttcaaagaaaaaacaaccgccaccccttttatacttaattgcaaaggaaatgaataa

SEQ ID NO: 1144 - protein, 349 aa, Haemophilus influenzae
MALLDICNLNIEIQTSNGRIKIVDGVNLSLNEGEISGLVGESGSGKSLIAKVICNAIKENWIITADRFRFHDVELLKLSPNKRRKLVGKEISMIFQNPLSCLDPSRKIGKQLIQNIPNWTFKNKWWKWFGWKKRRAIELLHRVGIKDHRDIMASYPNELTEGEGQKVMIAMAVANQPRLLIADEPTNALESTTALQVFRLLSSMNQNQGTTILLTSNDIKSISEWCDQISVLYCGQNTESAPTEILIESPHHPYTQALINAVPDFTQPLGFKTKLGTLEGTAPILEQMPIGCRLGPRCPFAQKKCMEKPRRLKIKQHEFSCHYPINLREKNFKEKTTATPFILNCKGNE

SEQ ID NO: 1145 - DNA, 25 bp, Artificial sequence
  primer
atgccattactcgatattcgtaacc

SEQ ID NO: 1146 - DNA, 25 bp, Artificial sequence
  primer
ttactctttctccatgttcagcggg

SEQ ID NO: 1147 - protein, 337 aa, Artificial sequence
  consensus sequence
  Variant (2)..(2): Xaa in position 2 is any amino acid
  Variant (3)..(4): Xaa in position 3 to 4 is any or no amino acid
  Variant (7)..(10): Xaa in position 7 to 10 is any amino acid
  Variant (12)..(20): Xaa in position 12 to 20 is any amino acid
  Variant (21)..(25): Xaa in position 21 to 25 is any or no amino acid
  Variant (28)..(35): Xaa in position 28 to 35 is any amino acid
  Variant (38)..(39): Xaa in position 38 to 39 is any amino acid
  Variant (41)..(41): Xaa in position 41 is any amino acid
  Variant (51)..(54): Xaa in position 51 to 54 is any amino acid
  Variant (56)..(57): Xaa in position 56 to 57 is any amino acid
  Variant (59)..(67): Xaa in position 59 to 67 is any amino acid
  Variant (68)..(68): Xaa in position 68 is any or no amino acid
  Variant (70)..(72): Xaa in position 70 to 72 is any amino acid
  Variant (73)..(73): Xaa in position 73 is any or no amino acid
  Variant (75)..(78): Xaa in position 75 to 78 is any amino acid
  Variant (80)..(86): Xaa in position 80 to 86 is any amino acid
  Variant (89)..(91): Xaa in position 89 to 91 is any amino acid
  Variant (93)..(96): Xaa in position 93 to 96 is any amino acid
  Variant (101)..(101): Xaa in position 101 is any amino acid
  Variant (103)..(105): Xaa in position 103 to 105 is any amino acid
  Variant (107)..(107): Xaa in position 107 is any amino acid
  Variant (109)..(112): Xaa in position 109 to 112 is any amino acid
  Variant (114)..(114): Xaa in position 114 is any amino acid
  Variant (116)..(133): Xaa in position 116 to 133 is any amino acid
  Variant (134)..(138): Xaa in position 134 to 138 is any or no amino acid
  Variant (141)..(142): Xaa in position 141 to 142 is any amino acid
  Variant (145)..(146): Xaa in position 145 to 146 is any amino acid
  Variant (150)..(159): Xaa in position 150 to 159 is any amino acid
  Variant (161)..(162): Xaa in position 161 to 162 is any amino acid
  Variant (164)..(165): Xaa in position 164 to 165 is any amino acid
  Variant (167)..(168): Xaa in position 167 to 168 is any amino acid
  Variant (170)..(170): Xaa in position 170 is any amino acid
  Variant (175)..(175): Xaa in position 175 is any amino acid
  Variant (177)..(177): Xaa in position 177 is any amino acid
  Variant (179)..(180): Xaa in position 179 to 180 is any amino acid
  Variant (182)..(182): Xaa in position 182 is any amino acid
  Variant (191)..(195): Xaa in position 191 to 195 is any amino acid
  Variant (197)..(197): Xaa in position 197 is any amino acid
  Variant (199)..(199): Xaa in position 199 is any amino acid
  Variant (202)..(203): Xaa in position 202 to 203 is any amino acid
  Variant (206)..(217): Xaa in position 206 to 217 is any amino acid
  Variant (220)..(220): Xaa in position 220 is any amino acid
  Variant (224)..(234): Xaa in position 224 to 234 is any amino acid
  Variant (236)..(236): Xaa in position 236 is any amino acid
  Variant (238)..(238): Xaa in position 238 is any amino acid
  Variant (241)..(242): Xaa in position 241 to 242 is any amino acid
  Variant (244)..(253): Xaa in position 244 to 253 is any amino acid
  Variant (255)..(255): Xaa in position 255 is any amino acid
  Variant (260)..(260): Xaa in position 260 is any amino acid
  Variant (263)..(266): Xaa in position 263 to 266 is any amino acid
  Variant (268)..(274): Xaa in position 268 to 274 is any amino acid
  Variant (275)..(281): Xaa in position 275 to 281 is any or no amino acid
  Variant (283)..(284): Xaa in position 283 to 284 is any amino acid
  Variant (286)..(286): Xaa in position 286 is any amino acid
  Variant (288)..(289): Xaa in position 288 to 289 is any amino acid
  Variant (291)..(295): Xaa in position 291 to 295 is any amino acid
  Variant (296)..(296): Xaa in position 296 is any or no amino acid
  Variant (298)..(298): Xaa in position 298 is any amino acid
  Variant (301)..(301): Xaa in position 301 is any amino acid
  Variant (303)..(303): Xaa in position 303 is any amino acid
  Variant (308)..(308): Xaa in position 308 is any amino acid
  Variant (310)..(312): Xaa in position 310 to 312 is any amino acid
  Variant (314)..(328): Xaa in position 314 to 328 is any amino acid
  Variant (329)..(333): Xaa in position 329 to 333 is any or no amino acid
  Variant (335)..(336): Xaa in position 335 to 336 is any amino acid
MXXXLLXXXXLXXXXXXXXXXXXXXVDXXXXXXXXGEXXGXVGESGSGKSXXXXAXXGXXXXXXXXXXAXXXXFXXXXLXXXXXXXRRXXXGXXXXMIFQXPXXXLXPXXXXGXQXXXXXXXXXXXXXXXXXXXXXXXRAXXLLXXVGIXXXXXXXXXXPXXLXXGXXQXVMIAXAXAXXPXLLIADEPTXXXXXTXQXQIXXLLXXXXXXXXXXXXLIXHDLXXXXXXXXXXXVXYXGQXXEXXXXXXXXXXPXHPYTXALXXXXPXXXXXXXXXXXXXXLXXLXGXXPXXXXXXPXGCXLXPRCPXAXXXCXXXXXXXXXXXXXXXXXXXXCXXP

SEQ ID NO: 1148 - protein, 55 aa, Artificial sequence
  protein pattern
  Variant (2)..(3): Xaa in position 2 to 3 is any amino acid
  Variant (4)..(9): Xaa in position 4 to 9 is any or no amino acid
  Variant (11)..(11): Xaa in position 11 is any amino acid
  Variant (12)..(12): Xaa in position 12 is Asp, Glu or Gln
  Variant (13)..(13): Xaa in position 13 is Ile, Leu or Met
  Variant (14)..(14): Xaa in position 14 is Ser or Thr
  Variant (15)..(15): Xaa in position 15 is Asp, Glu or Gly
  Variant (17)..(17): Xaa in position 17 is any amino acid
  Variant (18)..(18): Xaa in position 18 is Ala, Cys, Gly, Asn or Ser
  Variant (20)..(20): Xaa in position 20 is Lys or Arg
  Variant (22)..(22): Xaa in position 22 is any amino acid
  Variant (25)..(25): Xaa in position 25 is Ile or Met
  Variant (27)..(27): Xaa in position 27 is Ile, Leu or Val
  Variant (29)..(30): Xaa in position 29 to 30 is any amino acid
  Variant (32)..(32): Xaa in position 32 is any amino acid
  Variant (35)..(35): Xaa in position 35 is Ile or Val
  Variant (40)..(40): Xaa in position 40 is Asn or Thr
  Variant (41)..(41): Xaa in position 41 is any amino acid
  Variant (42)..(42): Xaa in position 42 is Ala, Asp, Ser or Thr
  Variant (43)..(43): Xaa in position 43 is Leu, Met or Val
  Variant (44)..(44): Xaa in position 44 is Asp or Glu
  Variant (45)..(49): Xaa in position 45 to 49 is any amino acid
  Variant (51)..(51): Xaa in position 51 is Ile or Val
  Variant (52)..(52): Xaa in position 52 is any amino acid
  Variant (53)..(53): Xaa in position 53 is Asp, Glu, His or Arg
DXXXXXXXXPXXXXXGXXQXVXIAXAXAXXPXLLXADEPXXXXXXXXXXQXXXLL

SEQ ID NO: 1149 - protein, 51 aa, Artificial sequence
  protein pattern
  Variant (2)..(2): Xaa in position 2 is any or no amino acid
  Variant (4)..(4): Xaa in position 4 is Gly, Ser or Thr
  Variant (6)..(6): Xaa in position 6 is Asp or Glu
  Variant (8)..(8): Xaa in position 8 is Ala, Glu, Gly, Gln or Thr
  Variant (9)..(9): Xaa in position 9 is any amino acid
  Variant (10)..(10): Xaa in position 10 is Ile, Leu, Met or Val
  Variant (11)..(11): Xaa in position 11 is Ala, Ser, Thr or Val
  Variant (12)..(13): Xaa in position 12 to 13 is any amino acid
  Variant (14)..(14): Xaa in position 14 is Ala, Cys, Thr or Val
  Variant (15)..(16): Xaa in position 15 to 16 is any amino acid
  Variant (17)..(17): Xaa in position 17 is Ile, Leu or Val
  Variant (18)..(18): Xaa in position 18 is any amino acid
  Variant (20)..(20): Xaa in position 20 is Leu or Met
  Variant (22)..(22): Xaa in position 22 is Ala, Cys, Gly or Ser
  Variant (24)..(24): Xaa in position 24 is Glu, Gln or Arg
  Variant (25)..(26): Xaa in position 25 to 26 is any amino acid
  Variant (28)..(28): Xaa in position 28 is any amino acid
  Variant (29)..(29): Xaa in position 29 is Ala, Gly or Asn
  Variant (30)..(33): Xaa in position 30 to 33 is any amino acid
  Variant (34)..(34): Xaa in position 34 is Ile or Leu
  Variant (35)..(35): Xaa in position 35 is Phe, Ile, Leu or Val
  Variant (36)..(37): Xaa in position 36 to 37 is any amino acid
  Variant (39)..(39): Xaa in position 39 is any amino acid
  Variant (43)..(43): Xaa in position 43 is Ser or Thr
  Variant (44)..(44): Xaa in position 44 is any amino acid
  Variant (45)..(45): Xaa in position 45 is Ala, Gly or Ser
  Variant (47)..(48): Xaa in position 47 to 48 is any amino acid
  Variant (49)..(49): Xaa in position 49 is Ala, Cys, Asn or Ser
  Variant (50)..(50): Xaa in position 50 is any amino acid
  Variant (51)..(51): Xaa in position 51 is Pro or Thr
LXIXHXLXXXXXXXXXXXVXYXGXXXEXXXXXXXXXXPXHPYXXXLXXXXX

SEQ ID NO: 1150 - protein, 52 aa, Artificial sequence
  protein pattern
  Variant (2)..(19): Xaa in position 2 to 19 is any amino acid
  Variant (21)..(21): Xaa in position 21 is any amino acid
  Variant (22)..(22): Xaa in position 22 is Ile, Leu or Val
  Variant (23)..(23): Xaa in position 23 is Ile, Leu, Met or Val
  Variant (24)..(26): Xaa in position 24 to 26 is any amino acid
  Variant (27)..(27): Xaa in position 27 is Ile, Leu, Met or Val
  Variant (28)..(28): Xaa in position 28 is Ala or Ser
  Variant (30)..(30): Xaa in position 30 is Ile or Val
  Variant (33)..(33): Xaa in position 33 is Asp, Glu or Asn
  Variant (34)..(34): Xaa in position 34 is Ala or Pro
  Variant (35)..(35): Xaa in position 35 is any amino acid
  Variant (36)..(36): Xaa in position 36 is Gly, Ser or Thr
  Variant (37)..(37): Xaa in position 37 is Ala, Cys, Gly or Ser
  Variant (39)..(39): Xaa in position 39 is Asp or Asn
  Variant (41)..(41): Xaa in position 41 is Ala, Cys, Ser or Thr
  Variant (42)..(43): Xaa in position 42 to 43 is any amino acid
  Variant (44)..(44): Xaa in position 44 is Ile or Val
  Variant (46)..(46): Xaa in position 46 is any amino acid
  Variant (48)..(48): Xaa in position 48 is Ile or Leu
  Variant (49)..(49): Xaa in position 49 is any amino acid
  Variant (50)..(50): Xaa in position 50 is Glu or Gln
  Variant (51)..(51): Xaa in position 51 is Ala, Asn, Ser, Thr or Val
  Variant (52)..(52): Xaa in position 52 is Ile, Leu or Met
AXXXXXXXXXXXXXXXXXXRXXXXXXXXMXFQXXXXXLXPXXXXGXQXXXXX

SEQ ID NO: 1151 - protein, 32 aa, Artificial sequence
  protein pattern
  Variant (2)..(2): Xaa in position 2 is any or no amino acid
  Variant (4)..(4): Xaa in position 4 is any amino acid
  Variant (5)..(5): Xaa in position 5 is Ile, Leu, Met or Val
  Variant (6)..(6): Xaa in position 6 is Asp, Asn or Ser
  Variant (7)..(8): Xaa in position 7 to 8 is any amino acid
  Variant (9)..(9): Xaa in position 9 is Ile, Leu, Met or Val
  Variant (10)..(11): Xaa in position 10 to 11 is any amino acid
  Variant (13)..(13): Xaa in position 13 is Glu, Gly or Gln
  Variant (14)..(15): Xaa in position 14 to 15 is any amino acid
  Variant (16)..(16): Xaa in position 16 is Ala or Gly
  Variant (17)..(17): Xaa in position 17 is Ile, Leu or Val
  Variant (23)..(23): Xaa in position 23 is Cys or Ser
  Variant (27)..(27): Xaa in position 27 is Leu or Val
  Variant (28)..(30): Xaa in position 28 to 30 is any amino acid
  Variant (31)..(31): Xaa in position 31 is Ala, Ser or Val
  Variant (32)..(32): Xaa in position 32 is Ile, Leu or Val
VXDXXXXXXXXGXXXXXVGESGXGKSXXXXXX

SEQ ID NO: 1152 - protein, 18 aa, Artificial sequence
  protein pattern
  Variant (2)..(2): Xaa in position 2 is any amino acid
  Variant (5)..(5): Xaa in position 5 is any or no amino acid
  Variant (7)..(7): Xaa in position 7 is any amino acid
  Variant (8)..(8): Xaa in position 8 is any or no amino acid
  Variant (13)..(13): Xaa in position 13 is any amino acid
  Variant (14)..(14): Xaa in position 14 is Ala, Ser or Val
  Variant (15)..(15): Xaa in position 15 is any amino acid
  Variant (16)..(16): Xaa in position 16 is Asp, Glu, Lys or Arg
  Variant (17)..(17): Xaa in position 17 is any amino acid
PXGCXLXXPRCPXXXXXC

SEQ ID NO: 1153 - protein, 15 aa, Artificial sequence
  protein pattern
  Variant (2)..(2): Xaa in position 2 is Ala, Pro, Ser or Thr
  Variant (5)..(5): Xaa in position 5 is any amino acid
  Variant (6)..(6): Xaa in position 6 is Ile or Val
  Variant (7)..(8): Xaa in position 7 to 8 is any amino acid
  Variant (10)..(10): Xaa in position 10 is Cys, Asn, Ser or Thr
  Variant (11)..(11): Xaa in position 11 is Ile or Val
  Variant (12)..(12): Xaa in position 12 is Asp, Glu, His, Lys or Arg
  Variant (13)..(13): Xaa in position 13 is Phe, Ile, Leu or Val
  Variant (14)..(14): Xaa in position 14 is any amino acid
  Variant (15)..(15): Xaa in position 15 is Asp, Ser or Thr
MXLLXXXXLXXXXXX

SEQ ID NO: 1154 - DNA, 1644 bp, Escherichia coli K12
  CDS (1)..(1644): transl_table=11
atgcgccaggtattatcgtctcttttggtgattgctggacttgtgagtggtcaggcaatcgccgcgcctgaatctcccccgcatgctgatatccgcgacagcggttttgtctattgcgtcagcgggcaagtcaacacctttaacccatccaaagcgagcagtgggttaattgtcgatacccttgccgcccagttttatgatcgactgctggatgtcgatccctatacctatcgcctgatgccggaacttgccgaaagctgggaagtactcgacaacggcgcgacctatcgcttccacctgcgtcgcgatgttccgtttcaaaaaaccgactggtttactcccactcgtaaaatgaatgccgacgatgtggtgtttaccttccagcgaatttttgaccgcaacaacccgtggcataacgtcaacggcagcaacttcccctacttcgacagcctgcaatttgccgataacgtgaaaagcgtccgcaaactggataatcataccgttgagttccgactcgcccagccggatgcttcttttttgtggcacctcgcaacccattatgcttcggtcatgtcggcagaatatgcccggaagttagagaaagaagatcgccaggagcaactcgaccgtcaaccggtcggcaccggtccgtatcagttgtcggaataccgcgccgggcaatttattcgcctacaacgtcatgatgacttctggcgcggtaaaccgttaatgccgcaggtagtggtggatttaggctccggcggcaccggacgtctgtcgaaactcctgaccggggaatgcgacgttctggcctggcctgctgccagccagctatccattttgcgtgacgacccgcgcttgcgtttaacgctgcgtcctgggatgaacgtcgcctatctggcatttaacaccgccaaaccgccgctaaataatcccgctgtccgccatgcgctggcactggcgattaataaccagcgcctgatgcaatccatctattatggtacggctgaaacggcggcctctattttaccgcgcgcctcgtgggcctatgacaacgaggctaaaattactgaatacaatccggcgaaatcgcgcgaacagttgaagtcgttggggctggaaaatttaacgctgaaactgtgggtgcccacacgttcgcaggcgtggaaccccagtccactgaaaactgccgaactgattcaggcggatatggcgcaggttggcgtaaaagtggtgattgtgccggtagaaggtcgctttcaggaggcgcggttgatggatatgagccatgatctgacgttatccggttgggcgacggacagtaacgacccggacagtttcttccgtccgttactgagctgcgcggcaattcattcgcagaccaacctcgcccactggtgcgatccgaaattcgacagcgtattgcgtaaggcgctctcttcgcagcagctggcggcgcgtattgaagcctatgacgaagcgcagagtattctggcgcaggaattgcccattttgccgctggcgtcgtcattgcgtttgcaggcctatcggtacgatatcaaaggtctggtacttagcccgtttggtaacgcctcctttgctggggtgtatcgcgagaaacaggatgaggtgaaaaaaccatga

SEQ ID NO: 1155 - protein, 547 aa, Escherichia coli K12
MRQVLSSLLVIAGLVSGQAIAAPESPPHADIRDSGFVYCVSGQVNTFNPSKASSGLIVDTLAAQFYDRLLDVDPYTYRLMPELAESWEVLDNGATYRFHLRRDVPFQKTDWFTPTRKMNADDVVFTFQRIFDRNNPWHNVNGSNFPYFDSLQFADNVKSVRKLDNHTVEFRLAQPDASFLWHLATHYASVMSAEYARKLEKEDRQEQLDRQPVGTGPYQLSEYRAGQFIRLQRHDDFWRGKPLMPQVVVDLGSGGTGRLSKLLTGECDVLAWPAASQLSILRDDPRLRLTLRPGMNVAYLAFNTAKPPLNNPAVRHALALAINNQRLMQSIYYGTAETAASILPRASWAYDNEAKITEYNPAKSREQLKSLGLENLTLKLWVPTRSQAWNPSPLKTAELIQADMAQVGVKVVIVPVEGRFQEARLMDMSHDLTLSGWATDSNDPDSFFRPLLSCAAIHSQTNLAHWCDPKFDSVLRKALSSQQLAARIEAYDEAQSILAQELPILPLASSLRLQAYRYDIKGLVLSPFGNASFAGVYREKQDEVKKP

SEQ ID NO: 1156 - DNA, 1623 bp, Vibrio cholerae O1 biovar eltor str. N16961
  CDS (1)..(1623): transl_table=11
atgaatgcattattacgatttacgctagggctgtgcagcatgactctgctggcaggctgcggagaaaacatcgaccacagcaagatccgcagtagcggctttgtctactgtggtgaaagtgcgccgaccacctttaatccgcagttggcggataacgatatcacctctgatgcactcggtccgcagatctacaacaccttgctgacaatagaccccgaaacacacttacccgttgccagtttagccagtagctggaccgtcaatagcaccggacttgagtatgtgtttaagctgcgtcccgatgtcgcgtttcaaaccactccctggtttagcccgacacgtcccctcaatgccgatgacgtcgtgttcagttttcgacgcattattgacccgaccaatccctaccacaaagtaggccaaactcaatatccttggtttaaaggcattgattttcagaatctattggttgatgtcagcgcgctcgatgacttaaccgtaaagtttgtccttagccggcctgataacagttttttatccaacatcgccactagccacgcggtgattctgtcgttggaatacgccaatcagctcatcattgatgatgaaaaagagaagctggataaccttcctctgggtactgggcctttttaccttgccgaataccatccgcgcgatttaattcgcttgaaacgtcatccccaatattgggaaggtgcggcaaaagtcgagcaagtggtgtttgatatttcacaacgtgggactggcatgctggccaaattgctgcgcaatgaatgtgatgtgctcaatgcaccgatttccagccaactgcctgcgattgaaaagaacccagatattgtgctgcaaaccacacctgcgatgaatgtggcctttatcgcggtgaacactcaacatcctgcgttaaatgacaatcgcgtgcgtaaagcactcaatttcgcgattaatcgacaaaatatcttggattctgtctattacggtaccggaagcatcgcttttaccatcttgccccccacctcttgggcctatcagcaagatacggcgcagattcgctacgatcgtaactacgcgcaagctttgctgcgtgaagctggatttgcaacgggtctggagctgaccatgtcagtacctgtagagccgaaagcgtacaatcctagcccgcgcaaaacggcagagctgatccaagcgaatctcgccgacattggggtgacattacgcctcatcagtgaagatcgctcagagcgccaagagctgagtatacgcaacaatattgacctgtacttaagtggctggacgggagatacgggtgacccagataacttcttacgccccttactctcttgtgattccaaccgcgcaggtctcaacgtttccatgtggtgcgacagtgattttgattttctgttggacttggcgctagaagccaataaaccgcgctatcgcctcaatctgtatcatcaggcgcaaaatatcctcaatcaggagtttccggtgattcctctcgcccacggcatacagtttaccgcttatagcaaatcattaacgggcattcgcattagtccatttaatgtccaaccgtttaatactgtcgagagggtggccgagtaa

SEQ ID NO: 1157 - protein, 540 aa, Vibrio cholerae O1 biovar eltor str. N16961
MNALLRFTLGLCSMTLLAGCGENIDHSKIRSSGFVYCGESAPTTFNPQLADNDITSDALGPQIYNTLLTIDPETHLPVASLASSWTVNSTGLEYVFKLRPDVAFQTTPWFSPTRPLNADDVVFSFRRIIDPTNPYHKVGQTQYPWFKGIDFQNLLVDVSALDDLTVKFVLSRPDNSFLSNIATSHAVILSLEYANQLIIDDEKEKLDNLPLGTGPFYLAEYHPRDLIRLKRHPQYWEGAAKVEQVVFDISQRGTGMLAKLLRNECDVLNAPISSQLPAIEKNPDIVLQTTPAMNVAFIAVNTQHPALNDNRVRKALNFAINRQNILDSVYYGTGSIAFTILPPTSWAYQQDTAQIRYDRNYAQALLREAGFATGLELTMSVPVEPKAYNPSPRKTAELIQANLADIGVTLRLISEDRSERQELSIRNNIDLYLSGWTGDTGDPDNFLRPLLSCDSNRAGLNVSMWCDSDFDFLLDLALEANKPRYRLNLYHQAQNILNQEFPVIPLAHGIQFTAYSKSLTGIRISPFNVQPFNTVERVAE

SEQ ID NO: 1158 - DNA, 1644 bp, Escherichia coli O157:H7 EDL933
  CDS (1)..(1644): transl_table=11
atgcgccaggtattatcgtctcttttggtgattgctggacttgtgagtggtcaggcaatcgccgcgcctgaatcccccccgcatgctgatatccgcgacagcggttttgtctattgcgtcagcgggcaagtcaacacctttaacccatccaaagcgagcagtgggttaattgtcgatacccttgccgcccagttttatgatcgactgctggatgtcgatccctatacctatcgcctgatgccagaacttgccgaaagctgggaagtactcgacaacggcgcgacctatcgcttccacctgcgtcgcgatgtcccgtttcaaaaaaccgcctggtttactcccactcgcaaaatgaatgccgacgatgtggtgtttaccttccagcgaatttttgaccgcaacaacccgtggcataacgtcaacggcagcaacttcccctacttcgacagcctgcaatttgccgataacgtgaaaagcgtccgtaaactggataatcataccgttgagttccgtctggctcagccggatgcttcttttttgtggcacctcgcaacccattatgcttcggtcatgtcggcagaatatgcccggaagttagagaaagaagatcgccaggagcaactcgaccgtcaaccggtcggcactggaccgtatcagttgtcggaataccgcgccgggcaatttattcgcctacaacgtcatgatgacttctggcgcggtaaaccgttaatgccgcaggtggtggtggatttaggctccggcggcaccggacgtctgtcgaaactcctgaccggggaatgcgacgttctggcctggcctgctgccagccagctatccattttgcgtgacgacccgcgcttgcgtttaacgctgcgtcctgggatgaacgtcgcctatctggcatttaacaccgccaaaccgccgctaaataatcccgctgtccgccatgcgctggcactggcgattaataaccagcgcctgatgcaatccatctattatggtacggctgaaacggcggcctctattttaccgcgcgcctcgtgggcctatgacaacgaggctaaaattactgaatacaatccggcgaaatcgcgcgaacagttgaagttgttggggctggaaaatttaacgctgaaactgtgggtgcccacacgttcgcaggcgtggaaccccagtccactgaaaactgccgaactgattcaggcggatatggcgcaggttggcgtaaaagtggtgattgtgccggtagaaggtcgctttcaggaggcgcggttgatggatatgagccatgatctgacgttatccggttgggcgacggacagtaacgacccggacagtttcttccgtccgttactgagctgcgcggcaattcattcacagaccaacctcgcccactggtgcgatccgaaattcgacagcgtgttgcgtaagacgctctcctcgcagcagctggcggcgcgtattgaagcctatgacgaagcgcagagtattctggcgcaggaattgcccattttgccgctggcgtcgtcattgcgtttgcaggcctatcggtacgatatcaaaggtctggtacttagcccgtttggtaacgcctcctttgctggggtgtatcgcgagaaacaggatgaggtgaaaaaaccatga

SEQ ID NO: 1159 - protein, 547 aa, Escherichia coli O157:H7 EDL933
MRQVLSSLLVIAGLVSGQAIAAPESPPHADIRDSGFVYCVSGQVNTFNPSKASSGLIVDTLAAQFYDRLLDVDPYTYRLMPELAESWEVLDNGATYRFHLRRDVPFQKTAWFTPTRKMNADDVVFTFQRIFDRNNPWHNVNGSNFPYFDSLQFADNVKSVRKLDNHTVEFRLAQPDASFLWHLATHYASVMSAEYARKLEKEDRQEQLDRQPVGTGPYQLSEYRAGQFIRLQRHDDFWRGKPLMPQVVVDLGSGGTGRLSKLLTGECDVLAWPAASQLSILRDDPRLRLTLRPGMNVAYLAFNTAKPPLNNPAVRHALALAINNQRLMQSIYYGTAETAASILPRASWAYDNEAKITEYNPAKSREQLKLLGLENLTLKLWVPTRSQAWNPSPLKTAELIQADMAQVGVKVVIVPVEGRFQEARLMDMSHDLTLSGWATDSNDPDSFFRPLLSCAAIHSQTNLAHWCDPKFDSVLRKTLSSQQLAARIEAYDEAQSILAQELPILPLASSLRLQAYRYDIKGLVLSPFGNASFAGVYREKQDEVKKP

SEQ ID NO: 1160 - DNA, 1650 bp, Salmonella enterica subsp. enterica serovar Typhi str. CT18
  CDS (1)..(1650): transl_table=11
atgcgcctggttttatcatctctgatcgtgatagcgggtctactgagtagtcaggctacggctgcgactgcgcccgaacaaactgcgagtgcagatattcgcgatagcggctttgtgtattgtgtcagcgggcaggtcaacacctttaatccgcaaaaagcgagtagcggcctcatcgtcgataccctggccgcccagttatatgaccgcctgttggatgtcgatccctatacttatcgtttagtcccagagctggcagaaagctgggaagtgctggataacggggcaacgtaccattttcacctgcgccgcgacgtttcctttcaaaaaaccgcctggtttacgccgacccgaaaactcaatgctgatgatgtcgtctttacctttcagcggattttcgatcgtcgacatccgtggcataacatcaacggcagtagcttcccctactttgatagcctacagttcgccgacaatgtaaaaagcgtgcgtaagctggacaataacaccgttgagtttcgcctgacgcagccagacgcctcctttttatggcatctggccacgcactacgcttccgtcatgtctgctgagtacgccgcgcagcttagccgaaaagatcgtcaggaactgcttgatcggcaaccggtcggcaccgggcctttccagctttcggagtaccgtgccgggcagtttattcgtctccagcgccacgatgggttttggcgcggcaaaccgctaatgccgcaagtggtggtggatttaggctccgggggtattgggcgtttatcgaaattactgaccggtgaatgcgatgttctggcctggcccgccgccagccagctaactattttacgcgacgatccgcgtttgcgtctgacgttgcgcccggggatgaatatcgcctatctggcctttaacaccgacaagccgccgttgaataatcccgcagtgcgccatgcgctggccttatcgatcaacaaccagcgcctgatgcagtcgatttattacggcacggcggaaaccgcagcctccattttaccgagagcctcatgggcttacgataacgatgccaaaattacggagtacaatccgcaaaaatcgcgcgaacaactaaaagcgctgggcattgagaatcttacgctgcatctctgggtgccgaccagttctcaggcctggaacccaagcccgctaaaaacggcggagcttattcaggcggatatggcgcaagttggcgtaaaagtggtcattgtgccggttgaaggtcgttttcaggaggcgcgcctgatggatatgaatcacgatctgaccttatccggctgggccacggacagcaacgatccggatagctttttcagaccgctgttaagctgtgcggccatcaattcgcaaaccaatttcgcccactggtgtaaccctgaatttgacagcgtgctgcgtaaggcactgtcgtcgcagcagttggcttcgcgcatagaagcgtatgacgaagcgcagaatatcctggagaaagagctgccgatactgccgctggcatcatcactacgcttacaggcttaccgctacgatattaaaggactggtgttaagcccgttcggcaatgcgtcttttgccggcgtctcccgcgaaaaacacgaagaggtgaaaaaaccatga

SEQ ID NO: 1161 - protein, 549 aa, Salmonella enterica subsp. enterica serovar Typhi str. CT18
MRLVLSSLIVIAGLLSSQATAATAPEQTASADIRDSGFVYCVSGQVNTFNPQKASSGLIVDTLAAQLYDRLLDVDPYTYRLVPELAESWEVLDNGATYHFHLRRDVSFQKTAWFTPTRKLNADDVVFTFQRIFDRRHPWHNINGSSFPYFDSLQFADNVKSVRKLDNNTVEFRLTQPDASFLWHLATHYASVMSAEYAAQLSRKDRQELLDRQPVGTGPFQLSEYRAGQFIRLQRHDGFWRGKPLMPQVVVDLGSGGIGRLSKLLTGECDVLAWPAASQLTILRDDPRLRLTLRPGMNIAYLAFNTDKPPLNNPAVRHALALSINNQRLMQSIYYGTAETAASILPRASWAYDNDAKITEYNPQKSREQLKALGIENLTLHLWVPTSSQAWNPSPLKTAELIQADMAQVGVKVVIVPVEGRFQEARLMDMNHDLTLSGWATDSNDPDSFFRPLLSCAAINSQTNFAHWCNPEFDSVLRKALSSQQLASRIEAYDEAQNILEKELPILPLASSLRLQAYRYDIKGLVLSPFGNASFAGVSREKHEEVKKP

SEQ ID NO: 1162 - DNA, 1647 bp, Yersinia pestis KIM
  CDS (1)..(1647): transl_table=11
atgcgtggtttactgattttgctgttgtcgctgatttgccttgcaacccctgtgctggcacaacctgttgcagcggagcaaccgctaccggatatccgtcagcgcggatttgtctattgtgtcagtgggatactcaacacatttaacccccaaatggccagtagcggtttaaccgtcgatacacttgcagcacaactctatgaccgtctactggatgttgacccctatacctaccggttaatcccagaactggcggaaagttggcaagttctggataacggcgcaacctaccgttttcatttacgtaaagatgtgccatttcagactaccgactggtttacgcctacgcggatgatgaacgccgatgatgtggtcttcagttttcagcgagtatttgactcaaagcatccgtaccacaaggtcaacggcggagagtacccctactttgatagtttgcagtttgcaagcgccgtaaaaagcgtaaaaaaattggatgattacaccgttgaatttaagctaaaagccccagatgcgtcgtttctttggcatttagcaactcattacgcccccgtattgtcttcagaatacgccgatgtcctgacccagaaagggaaggaagaacagattgaccgtgagccagtcgggaccgggccttttctattggatgaatatcgttctgggcaatatatccgcttgttccgcaacagccactattggaaaggtgtgccacgtatgccacaggtggttatcgacttaggggtcggtggaacggggcgtttatcaaaactgttgaccggagagtgtgatgtgctggcctatcccgccgccagccaattatctattttacgtgatgacccaccacgcctacgcctgacactgcgccctgggatgaacgtcgcctatctcgccttcaatacccgcaagcccccgttaagtgatcaacgggttcgccaagcgatcgctttgtcgatcaataaccaacgattgatgcaatcaatctattacggcacagctgaaacggcagcctctattttacctagagcatcatgggcttatgataatcaggcgcaggtgaccgaatataatccggaaaaagccaaagagatcctcaaagatttggggataacccaactgcaacttaacttatgggtccctactgcatcgcaatcttataatcctagcccattgaaaactgctgaattgatccaagcggatttagcacaagtggggatttccgtcactattgttcccgtcgagggccgtttccaagaggcccgtctgatggagatgaaccacgatctgacactttccggttggtctactgacagtaatgaccccgacagtttcttccggccattattaagctgtgcagcaattcgttcgcaaacaaactatgctcactggtgtgatccggcctttgatgaattactgcaaaaggcattacgttcccaacaattatcggagcgtattgagtattatcagcaggctcagcgtattctggagcaacaattgccgttactgccactggcatcgtccctgcggcttcaggcataccgttatgacattaaaggcttggtattaagcccgttcggtaactcttctttcgccggtgtataccgcgaaagcgatgagggcaagacgccatga

SEQ ID NO: 1163 - protein, 548 aa, Yersinia pestis KIM
MRGLLILLLSLICLATPVLAQPVAAEQPLPDIRQRGFVYCVSGILNTFNPQMASSGLTVDTLAAQLYDRLLDVDPYTYRLIPELAESWQVLDNGATYRFHLRKDVPFQTTDWFTPTRMMNADDVVFSFQRVFDSKHPYHKVNGGEYPYFDSLQFASAVKSVKKLDDYTVEFKLKAPDASFLWHLATHYAPVLSSEYADVLTQKGKEEQIDREPVGTGPFLLDEYRSGQYIRLFRNSHYWKGVPRMPQVVIDLGVGGTGRLSKLLTGECDVLAYPAASQLSILRDDPPRLRLTLRPGMNVAYLAFNTRKPPLSDQRVRQAIALSINNQRLMQSIYYGTAETAASILPRASWAYDNQAQVTEYNPEKAKEILKDLGITQLQLNLWVPTASQSYNPSPLKTAELIQADLAQVGISVTIVPVEGRFQEARLMEMNHDLTLSGWSTDSNDPDSFFRPLLSCAAIRSQTNYAHWCDPAFDELLQKALRSQQLSERIEYYQQAQRILEQQLPLLPLASSLRLQAYRYDIKGLVLSPFGNSSFAGVYRESDEGKTP

SEQ ID NO: 1164 - DNA, 1644 bp, Escherichia coli CFT073
  CDS (1)..(1644): transl_table=11
atgcgccaggtattatcgtctcttttggtgattgctggacttgtgagtggtcaggcaatcgccgcgcctgaatcccccccgcatgctgatatccgcgacagcggttttgtctattgcgtcagcgggcaagtcaacacctttaacccatccaaagcgagcagtgggttaattgtcgatacccttgccgcccagttttatgatcgactgctggatgtcgatccctatacctatcgcctgatgccggaacttgccgaaagctgggaagtactcgacaacggcgcgacctatcgcttccacctgcgtcgcgatgttccgtttcaaaaaaccgactggtttactcccactcgtaaaatgaatgccgatgatgtggtgtttaccttccaacggatttttgaccgcaacaacccgtggcataacgtcaacggcagtaacttcccctatttcgacagtctgcaatttgccgataacgtgaaaagcgtccgcaagctggataatcataccgttgagttccgtctcgcccagccggatgcttcttttttgtggcacctggcgacccattatgcttcggtcatgtcggcagaatatgcagggaagttagagaaagaagatcgccaggagcaactcgaccgtcaaccggtcggcaccggtccgtatcagttgtcggaataccgcgccgggcaatatattcgcttacaacgtcatgatgatttctggcgtggtaagccgttgatgccacaagtggtggtggatttaggctctggcggtacaggacgattgtcgaaactcctgaccggggagtgcgacgttctggcctggcctgctgccagtcagctatccattttgcgtgacgacccacgcttgcgtttaacgctgcgtcctgggatgaatgtcgcctatctggcattcaacaccgccaaaccgccgctaaataatccggcggtccgccatgcgctggcactggcgattaataaccagcgcctgatgcaatccatctattatggtacggctgaaacggcggcctctattttaccgcgagcctcgtgggcctatgacaacgaggctaaaattactgaatacaatccggcaaaatcgcgcgaacagttgaaggcgttggggctggaaaacttaacgctgaaactgtgggtgcccacacgttcgcaggcgtggaaccccagtccactgaaaaccgccgaactgattcaggcggatatggcacaggttggcgtaaaagtggtgattgtgccggtagaaggtcgttttcaggaggcgcggttgatggatatgagccatgatctgacgttatccggttgggcgacggacagtaacgacccggacagtttcttccgtccgttactgagctgcgcagcaattcattcgcagaccaacctcgcccactggtgcgatccgaaattcgacagcgtattgcgtaaggcgctctcttcgcagcagctggcggcgcgtattgaagcctatgacgaagcgcaaagtattctggcgcaggaattacctattctgccgctggcgtcgtcattgcgtttgcaggcctatcggtacgatatcaaaggtctggtacttagcccgtttggtaacgcctcctttgctggggtgtatcgcgagaaacaggatgaggtgaaaaagccatga

SEQ ID NO: 1165 - protein, 547 aa, Escherichia coli CFT073
MRQVLSSLLVIAGLVSGQAIAAPESPPHADIRDSGFVYCVSGQVNTFNPSKASSGLIVDTLAAQFYDRLLDVDPYTYRLMPELAESWEVLDNGATYRFHLRRDVPFQKTDWFTPTRKMNADDVVFTFQRIFDRNNPWHNVNGSNFPYFDSLQFADNVKSVRKLDNHTVEFRLAQPDASFLWHLATHYASVMSAEYAGKLEKEDRQEQLDRQPVGTGPYQLSEYRAGQYIRLQRHDDFWRGKPLMPQVVVDLGSGGTGRLSKLLTGECDVLAWPAASQLSILRDDPRLRLTLRPGMNVAYLAFNTAKPPLNNPAVRHALALAINNQRLMQSIYYGTAETAASILPRASWAYDNEAKITEYNPAKSREQLKALGLENLTLKLWVPTRSQAWNPSPLKTAELIQADMAQVGVKVVIVPVEGRFQEARLMDMSHDLTLSGWATDSNDPDSFFRPLLSCAAIHSQTNLAHWCDPKFDSVLRKALSSQQLAARIEAYDEAQSILAQELPILPLASSLRLQAYRYDIKGLVLSPFGNASFAGVYREKQDEVKKP

SEQ ID NO: 1166 - DNA, 1620 bp, Vibrio parahaemolyticus RIMD 2210633
  CDS (1)..(1620): transl_table=11
atgaatgcttttataagattatcgctgagccttattggtattagcttactgactgcctgtggtgaagaaatcgatcacaacgatattcgccaagcaggttttgttttttgtgggcaaggtaaaccaacaacatttaaccctcagcttatagacagtggtattacagccgaggcgttaagccctcagttgtacgacaccttactcacgcttgatcctaaaacacaccaacctattgcaagcattgcggaaagttggtctgtgaacaaggaaggtactgagtacacattcaagctcaaacatggcgttcagttccaaacgacaccgtggttctctccgactcgcccgttaaattcaaaagacgtggtattcagctttaagcgaatcattgatgtagaccatccttttcatcaagttggtggtggtttttatccatggtttgctggtttagattttcaaaatctattgcaagatgtgattgctgtcgatgattacacagtgacgtttaaactcgctcagccaaacttttcattcttggcaaatatcgccaccagccatgcggtaatactgtcagcagaatacggtcaacaattggcggcaaaagacaacaaagagcaaatcgaccaactccctattggttcagggccttaccagctcaaagagtatcaagtaaacgatttgattcgcttggaacgtcatccaaactactggaactcgccagcgaaaatggaacaagtagtgttcgacatttcacaccgtggtactggcacgttagctaagttgctgcgcaatgaatgcgatgttttgtcttcacctatctctagccagatcccaatcattcaagaagatgaaaaccttgagttgacggcaacaccagcaaataacgtttcctttattgcgattaataccgagactccagcacttcgcgacccaagagtccgccaagcgttgaaccttgcgatcaatcgtcaaaatatcttggattcggtttattacggtacaggtaccctagcttatacattgctgccgccgaactcttgggcgtatcaaaaagacagtgcgaaaattcgttatgaccgaaattacgctctcgctctacttcgtgaagcgggatacgaagatggtctaaaactgtcgatgtgggtgccgctagagccaagagcattcaacccaagtccacgcaaaactgctgagctcattcaggctaacttcgccgatatcggcatcaagctgactctgctcaccgacgaccgtttcgagcgagtggatcttgaaaacatcaacgatatcgacttgctccttactggctggattggcgatactggcgatccggataacttcttccgtcctttactatcgtgcgaatcagaccgagtgggccttaacgtttcgatgtggtgtaacgatgatttcgactttttgctggatctcgcgctagagacgcaagagcaacgttaccgcctaaacctgtatcgtcaggcgcaaaatattttgaatgaagagtttccagttattccgttggcacatggggttcaattccgtgtgcacgacaagtcattaactggcttcaaatcgagccctttcaatgcccaaccgtttgatagagttgagagaatccactga

SEQ ID NO: 1167 - protein, 539 aa, Vibrio parahaemolyticus RIMD 2210633
MNAFIRLSLSLIGISLLTACGEEIDHNDIRQAGFVFCGQGKPTTFNPQLIDSGITAEALSPQLYDTLLTLDPKTHQPIASIAESWSVNKEGTEYTFKLKHGVQFQTTPWFSPTRPLNSKDVVFSFKRIIDVDHPFHQVGGGFYPWFAGLDFQNLLQDVIAVDDYTVTFKLAQPNFSFLANIATSHAVILSAEYGQQLAAKDNKEQIDQLPIGSGPYQLKEYQVNDLIRLERHPNYWNSPAKMEQVVFDISHRGTGTLAKLLRNECDVLSSPISSQIPIIQEDENLELTATPANNVSFIAINTETPALRDPRVRQALNLAINRQNILDSVYYGTGTLAYTLLPPNSWAYQKDSAKIRYDRNYALALLREAGYEDGLKLSMWVPLEPRAFNPSPRKTAELIQANFADIGIKLTLLTDDRFERVDLENINDIDLLLTGWIGDTGDPDNFFRPLLSCESDRVGLNVSMWCNDDFDFLLDLALETQEQRYRLNLYRQAQNILNEEFPVIPLAHGVQFRVHDKSLTGFKSSPFNAQPFDRVERIH

SEQ ID NO: 1168 - DNA, 1644 bp, Shigella flexneri 2a str. 2457T
  CDS (1)..(1644): transl_table=11
atgcgccaggtattatcgtctcttttggtgattgctggacttgtgagtggtcaggcaatcgccgcgcctgaatcccccccgcatgctgatatccgcgacagcggttttgtctattgcgtcagcgggcaagtcaacacctttaacccatccaaagcgagcagtgggttaattgtcgatacccttgccgcccagttttatgatcgactgctggatgtcgatccctatacctatcgcctgatgccggaacttgccgaaagctgggaagtactcgacaacggcgcgacctatcgcttccacctgcgtcgcgatgttccgtttcaaaaaaccgactggtttactcccactcgtaaaatgaatgccgacgatgtggtgtttaccttccagcgaatttttgaccgcaacaacccgtggcataacgtcaacggcagcaacttcccctacttcgacagcctgcaatttgccgataacgtgaaaagcgtccgcaaactggataatcataccgttgagttccgactcgcccagccggatgcttcttttttgtggcacctcgcaacccattatgcttcggtcatgtcggcagaatatgcccggaagttagagaaagaagatcgccaggagcaactcgaccgtcaaccggtcggcaccggtccgtatcagttgtcggaataccgcgccgggcaatttattcgcctacaacgtcatgatgacttctggcgcggtaaaccgttaatgccgcaggtagtggtggatttaggctccggcggcaccggacgtctgtcgaaactcctgaccggggaatgcgacgttctggcctggcctgctgccagccagctatccattttgcgtgacgacccgcgcttgcgtttaacgctgcgtcctgggatgaacgtcgcctatctggcatttaacaccgccaaaccgccgctaaataatcccgctgtccgccatgcactggcactggcgattaataaccagcgcctgatgcaatccatctattatggtacggctgaaacggcggcctttattttaccgcgcgcctcgtgggcctatgacaacgaggctaaaattactgaatacaatccggcgaaatcgcgcgaacagttgaaggcgttggggctggaaaacttaacgctgaaactgtgggtgcccacacgttcgcaggcgtggaaccccagtccactgaaaactgccgaactgattcaggcggatatggcgcaggttggcgtaaaagtggtgattgtgccggtagaaggtcgctttcaggaggcgcggttgatggatatgagccatgatctgacgttatccggttgggcgacggacagtaacgacccggacagtttcttccgtccgttactgagctgcgcggcaattcattcacagaccaacctcgcccactggtgcaatccgaaattcgacagcgtgttgcgtaaggcgctctcctcgcagcagctggcagcgcgtattgaagcctatgacgaagcgcagagtattctggcgcaggaattacctattctgccgctggcgtcgtcattgcgtttgcaggcctatcggtacgatatcaaaggtctggtacttagcccgtttggtaacgcctcctttgctggggtgtatcgcgagaaacaggatgaggtgaaaaaaccatga

SEQ ID NO: 1169 - protein, 547 aa, Shigella flexneri 2a str. 2457T
MRQVLSSLLVIAGLVSGQAIAAPESPPHADIRDSGFVYCVSGQVNTFNPSKASSGLIVDTLAAQFYDRLLDVDPYTYRLMPELAESWEVLDNGATYRFHLRRDVPFQKTDWFTPTRKMNADDVVFTFQRIFDRNNPWHNVNGSNFPYFDSLQFADNVKSVRKLDNHTVEFRLAQPDASFLWHLATHYASVMSAEYARKLEKEDRQEQLDRQPVGTGPYQLSEYRAGQFIRLQRHDDFWRGKPLMPQVVVDLGSGGTGRLSKLLTGECDVLAWPAASQLSILRDDPRLRLTLRPGMNVAYLAFNTAKPPLNNPAVRHALALAINNQRLMQSIYYGTAETAAFILPRASWAYDNEAKITEYNPAKSREQLKALGLENLTLKLWVPTRSQAWNPSPLKTAELIQADMAQVGVKVVIVPVEGRFQEARLMDMSHDLTLSGWATDSNDPDSFFRPLLSCAAIHSQTNLAHWCNPKFDSVLRKALSSQQLAARIEAYDEAQSILAQELPILPLASSLRLQAYRYDIKGLVLSPFGNASFAGVYREKQDEVKKP

SEQ ID NO: 1170 - DNA, 1665 bp, Photorhabdus luminescens subsp. laumondii TTO1
  CDS (1)..(1665): transl_table=11
atgcgcagtttgatttattggatcatattatccctttcagcaccggctattgcagaaacaataactacgcctgaaaaaaatccccacgttccgactgacattcagcaacaagggttcatttattgtgttaatggcaacctgaacacctttaatccccaactggctagcagcggtttaactgtcgatacactggcagcacaactctatgagcgtctgctagatgttgacccttatacttatcgcttactccctgaattagcctcccattgggaaatactggataacggtgctacctaccgtttttatttgcgccataatgtctcatttcaatcaacagactggtttactccgacccgtaacatgaatgctgatgacgtcattttcagctttaagcgtctgtttgataagcaacactattatcacaacgtcaatggcgggcattacccctattttgacagcctccaactggccgattctattcaaagtatccgtaaacttaatgaatatacggtggaatttcgtttgaacgaaccagatgcttcttttctttggcatttggcaacccactatgccccaatactttcacaagaatatgggcaacaattgcatcaaatgaatcgccatgaacaaattgactggaaacctgtcggcacaggcccatttatgttggaagatcatcggaccagacaatttatccgtctggttcgtcatgataaatactggaaaggcaaaccacaaatgcgccagatagttattgacgtcggtgccggcggcaccggcaggatgtctaaacttttaaccggtgaatgtgatgtattagcgtatcccgctgccagtcagcttactgttttacgagatgatcctcgcctgcgtctaactttacgcccaggaatgaatatcgcttatctggctttcaataccagcaagccaccgcttgataagctacaggttcggcaagctattgcttacgctattaataaccaacggctgatgcaatccatctattatggtacggcggaaaccgcctcatcaattttacctagagcgtcatgggcttatgataatcaaactgaaattacggaatataacccagaaaaatcccgtaaaatacttaatgatctcggattgaatggcttgcaattgagtttatgggtaccttccgcctctcaatcatataatccaagtccactcaaaatggcagaactgattcaggccgatttagcccaagttggtattaccatgagcatcaaacctgttgagggccgctttcaggaaaccaaactgatggataaatctcacgatatgacattatcaggctggtcaactgacagtaatgacccagacagttttttccgtccactattaagttgtgcggctatcgcttcacaaacaaatttcagccattggtgtgagccaacatttgataaaattttgcgggaagctttgattaaccagcaattattatcccgaattaaatattatcatgcggctcaacaagtccttgagcagcaattacctatattaccattagcctattctctgcatttacaggcctaccgtcatgatattaaaggactagtactcagtccatttggtaatacctctttcgctggcgtttatcgggaaaaagagactaaccaaatcaatcagaagggtagcaaatga

SEQ ID NO: 1171 - protein, 554 aa, Photorhabdus luminescens subsp. laumondii TTO1
MRSLIYWIILSLSAPAIAETITTPEKNPHVPTDIQQQGFIYCVNGNLNTFNPQLASSGLTVDTLAAQLYERLLDVDPYTYRLLPELASHWEILDNGATYRFYLRHNVSFQSTDWFTPTRNMNADDVIFSFKRLFDKQHYYHNVNGGHYPYFDSLQLADSIQSIRKLNEYTVEFRLNEPDASFLWHLATHYAPILSQEYGQQLHQMNRHEQIDWKPVGTGPFMLEDHRTRQFIRLVRHDKYWKGKPQMRQIVIDVGAGGTGRMSKLLTGECDVLAYPAASQLTVLRDDPRLRLTLRPGMNIAYLAFNTSKPPLDKLQVRQAIAYAINNQRLMQSIYYGTAETASSILPRASWAYDNQTEITEYNPEKSRKILNDLGLNGLQLSLWVPSASQSYNPSPLKMAELIQADLAQVGITMSIKPVEGRFQETKLMDKSHDMTLSGWSTDSNDPDSFFRPLLSCAAIASQTNFSHWCEPTFDKILREALINQQLLSRIKYYHAAQQVLEQQLPILPLAYSLHLQAYRHDIKGLVLSPFGNTSFAGVYREKETNQINQKGSK

SEQ ID NO: 1172 - DNA, 1689 bp, Erwinia carotovora subsp. atroseptica SCRI1043
  CDS (1)..(1689): transl_table=11
atgttcggaaaaacctgtttcgcactggcattcacctggctggctttgcctgcactggccgcaccgcagtccgtgctaacgccacctgctccactggaaaatattcgccagagcggttttgtctattgcgtcaatgatgtcctaaacacgtttaacccgcagatggcacgcagcggcgttacgattgatacgctggcggcgcagctttacgatcgcctgctggatgtcgatccttatacttatcgcctgatgccagaactggcgcagcgttgggacgtgttagataacggttcgacgtaccgtttctacctgcgccacgatgtgccattccagagtaccgactggttcagcccgacccgcatgatgaatgccgacgacgtgatattcagtttccagcgcatgctggataaaaaacacccttatcatgatgtcaacggcggcgaatatccctatttcgacagcctgcaatttgccgattcagtgcaaagtattcgcaagctgggcgagtacagcattgaaatccgcctgaacagcccagatgcctctttcttgtggcatctggctacgcattacgccccgattctgtccgatgaatatgcccaacgtctggcgaaagaggataaaaaggagatgctggatcgcgaaccggtcggcaccgggccttatatgctcaatgaataccgcaacgggcaatatatccggctgacgcgcaacgctgattattggcgcggtttgccacgaatgccgcaggtggttatcgatctcggttccggcggtacgggtcgcctatccaagctgttgacgggcgaatgtgatgttctcgcttatccggctgccagccagttgaccatcctgcgtaacgacccgcgtctgcgtctgtcgctacgtcccggcatgaacgtcgcctatttagccttcaacgtacgaaaaccgccgctggacgatcgccgcgtgcgagaagccatcgcgctggcgatcaataacgacaggctgatgcagtcaatctattacggcacggcggaaaccgccgcctctattctgccccgggcctcgtgggcgtacgacaatgaatcgcaggttacggaatataacccgcagaaagcgcgacaaatcttgcaggaactggggctaactaacctaaaccttcgcctgtgggtgcccagcacctcgcaatcctacaaccccagtccgctgaaaacggcagagctgatacaggccgatttggcgcaaattggcgtcaccgtcaccatcgtgccggtagaaggccgctttcaggaagcacgactgatggaactcagtcacgatttaacactggcaggttgggcaacggacagtaacgacccggacagttttttccgaccattgttaagctgcgcggcgattcgttctcagagcaactacgcacactggtgcgatcctacctttgatgaagtgctacaaaacgcgctctcgtcacagcagctctctaagcggattgactattatcagcaggcacagcgcattctggcagaacaattacccgttctaccgctggcgtcatcattgcgattgctcgcctaccgctacgacattaaagggctggtattgagcccgttcggcaatgcctcgttcgcgggcgtattccgcgaggatcaacaagcgcagcagaagccccctgcaccggaaaccgtggaggaagcacagccgtga

SEQ ID NO: 1173 - protein, 562 aa, Erwinia carotovora subsp. atroseptica SCRI1043
MFGKTCFALAFTWLALPALAAPQSVLTPPAPLENIRQSGFVYCVNDVLNTFNPQMARSGVTIDTLAAQLYDRLLDVDPYTYRLMPELAQRWDVLDNGSTYRFYLRHDVPFQSTDWFSPTRMMNADDVIFSFQRMLDKKHPYHDVNGGEYPYFDSLQFADSVQSIRKLGEYSIEIRLNSPDASFLWHLATHYAPILSDEYAQRLAKEDKKEMLDREPVGTGPYMLNEYRNGQYIRLTRNADYWRGLPRMPQVVIDLGSGGTGRLSKLLTGECDVLAYPAASQLTILRNDPRLRLSLRPGMNVAYLAFNVRKPPLDDRRVREAIALAINNDRLMQSIYYGTAETAASILPRASWAYDNESQVTEYNPQKARQILQELGLTNLNLRLWVPSTSQSYNPSPLKTAELIQADLAQIGVTVTIVPVEGRFQEARLMELSHDLTLAGWATDSNDPDSFFRPLLSCAAIRSQSNYAHWCDPTFDEVLQNALSSQQLSKRIDYYQQAQRILAEQLPVLPLASSLRLLAYRYDIKGLVLSPFGNASFAGVFREDQQAQQKPPAPETVEEAQP

SEQ ID NO: 1174 - DNA, 1644 bp, Yersinia pseudotuberculosis IP 32953
  CDS (1)..(1644): transl_table=11
atgcgtggtttactgattttgctgttgtcgctgatttgccttgcaacccctgtgctggcacaacctgttgcagcggagcaaccgctaccggatatccgtcagcgcggatttgtctattgtgtcagtgggatactcaacacatttaacccccaaatggccagtagcggtttaaccgtcgatacacttgcagcacaactctatgaccgtctactggatgttgacccctatacctaccggttaatcccagaactggcggaaagttggcaagttctggataacggcgcaacctaccgttttcatttacgtaaagatgtgccatttcagactaccgactggtttacgcctacgcggatgatgaacgccgatgatgtggtcttcagttttcagcgagtatttgactcaaagcatccgtaccacaaggtcaacggcggagagtacccctactttgatagtttgcagtttgcaagcgccgtaaaaagcgtaaaaaaattggatgattacaccgttgaatttaagctaaaagccccagatgcgtcgtttctttggcatttagcaactcattacgcccccgtattgtcttcagaatacgccgatgtcctgacccagaaagggaaggaagaacagattgaccgtgagccagtcgggaccgggccttttctattggatgaatatcgttctgggcaatatatccgcttgttccgcaacagccactattggaaaggtgtgccacgtatgccacaggtggttatcgacttaggggtcggtggaacggggcgtttatcaaaactgttgaccggagagtgtgatgtgctggcctatcccgccgccagccaattatctattttacgtgatgacccacgcctacgcctgacactgcgcccagggatgaacgtcgcctatctcgccttcaatacccgcaagcccccgttaagtgatcaacgggttcgccaagcgatcgctttgtcgatcaataaccaacgattgatgcaatcaatctattacggcacagctgaaacggcagcctctattttacctagagcatcatgggcttatgataatcaggcgcaggtgaccgaatataatccggaaaaagccaaagagatcctcaaagatttggggataacccaactgcaacttaacttatgggtccctactgcatcgcaatcttataatcctagcccattgaaaactgctgaattgatccaagcggatttagcacaagtggggatttccgtcactattgttcccgtcgagggccgtttccaagaggcccgtctgatggagatgaaccacgatctgacactttccggttggtctactgacagtaatgaccccgacagtttcttccggccattattaagctgtgcagcaattcgttcgcaaacaaactatgctcactggtgtgatccggcctttgatgaattactgcaaaaggcattacgttcccaacaattatcggagcgtattgagtattatcagcaggctcagcgtattctggagcaacaattgccgttactgccactggcatcgtccctgcggcttcaggcataccgttatgacattaaaggcttggtattaagcccgttcggtaactcttctttcgccggtgtataccgcgaaagcgatgagggcaagacgccatga

SEQ ID NO: 1175 - protein, 547 aa, Yersinia pseudotuberculosis IP 32953
MRGLLILLLSLICLATPVLAQPVAAEQPLPDIRQRGFVYCVSGILNTFNPQMASSGLTVDTLAAQLYDRLLDVDPYTYRLIPELAESWQVLDNGATYRFHLRKDVPFQTTDWFTPTRMMNADDVVFSFQRVFDSKHPYHKVNGGEYPYFDSLQFASAVKSVKKLDDYTVEFKLKAPDASFLWHLATHYAPVLSSEYADVLTQKGKEEQIDREPVGTGPFLLDEYRSGQYIRLFRNSHYWKGVPRMPQVVIDLGVGGTGRLSKLLTGECDVLAYPAASQLSILRDDPRLRLTLRPGMNVAYLAFNTRKPPLSDQRVRQAIALSINNQRLMQSIYYGTAETAASILPRASWAYDNQAQVTEYNPEKAKEILKDLGITQLQLNLWVPTASQSYNPSPLKTAELIQADLAQVGISVTIVPVEGRFQEARLMEMNHDLTLSGWSTDSNDPDSFFRPLLSCAAIRSQTNYAHWCDPAFDELLQKALRSQQLSERIEYYQQAQRILEQQLPLLPLASSLRLQAYRYDIKGLVLSPFGNSSFAGVYRESDEGKTP

SEQ ID NO: 1176 - DNA, 1620 bp, Vibrio sp. Ex25
  CDS (1)..(1620)
atgaatgcttttataagattatcgctgagccttattgggattagcctactgaccgcttgtggtgatgaaattgaccacaatgacattcgcaaagctggctttgtgttttgcggacaaggtaagccaactacgtttaaccctcagcttattgatagcggtattaccgcagaggcactgagcccgcagttgtacgatacgctgctcacgctcgatcctaaatcacatcagccagtagcaaatatcgctgagagttggtctgtgaatgagtcaggaacggaatacacgtttaagcttaaacgtaatgttcaattccaaaccacgtcctggttcactcccactcgcccattgaatgcaaaggatgtggtatttagcttcaagcgaatcattgatgtagaccatccttttcaccaagtaggtggtggtttttatccatggtttgcagggttagattttcaaaacctgctgcaagacgtgactgcgattgacgagcatacggtaaggtttaccttatctcagccaaatttttccttcttggcaaatattgccaccagccatgctgtcatattgtctgcggagtacggacagcaactggcagcaaaagatcataaagaagaaatcgaccaacttcctatcggtaccggcccatatcaactaaaagagtaccaagtgaacgacttgattcgattagagcgtcattctaattactggaagtcaccagcaaaaatggaacaagtggtgttcgatatctctcatcgaggcactggtaccttggcgaaacttttaagaaacgagtgcgatgtgctctcttcgcctatttcgagccaaatacccgttattcaagaaaatgacaaccttgagctaactgctacgccagccaacaacgtttcctttattgcgatcaacactgaaaccaccgcacttagtgatgctcgcgtccgccaagcacttaacttagcgattaaccgtcagaacattttagattcggtttactacggaactggctcgcaagcttatacattgctaccgcctaattcatgggcctatcaaaaggacagcgtaaaaattcgttatgaccgtaactatgcattagcactactccgtgatgctggctatgaagacggtctagagctgaccatgtgggtaccacttgaaccacgcgcctttaacccaagtcctcgcaagaccgcggagctaatccaagcgaattttgccgatattggggttgagttaacgttgctaaccgatgatagattcgaacgtgtggatttagagaacatcaacgacatcgatttacttttaactggttggattggtgataccggggaccctgacaactttttccgcccgttattatcttgtgagtctgatcgcgttggcctcaacgtatcgatgtggtgtaacgatgatttcgatttcttactcgatttggcattggaaactcaagaaccgcgttaccgtctgaacctatatcgccaagcgcagaacattttaaatcaagaattcccggtaattcctctggcacatggtgtgcaattccgtgttcacgacaaatcactgacaggcttcaaatcaagccctttcaatgcccaaccgtttgatagagttgagagaattcactga

SEQ ID NO: 1177 - protein, 539 aa, Vibrio sp. Ex25
MNAFIRLSLSLIGISLLTACGDEIDHNDIRKAGFVFCGQGKPTTFNPQLIDSGITAEALSPQLYDTLLTLDPKSHQPVANIAESWSVNESGTEYTFKLKRNVQFQTTSWFTPTRPLNAKDVVFSFKRIIDVDHPFHQVGGGFYPWFAGLDFQNLLQDVTAIDEHTVRFTLSQPNFSFLANIATSHAVILSAEYGQQLAAKDHKEEIDQLPIGTGPYQLKEYQVNDLIRLERHSNYWKSPAKMEQVVFDISHRGTGTLAKLLRNECDVLSSPISSQIPVIQENDNLELTATPANNVSFIAINTETTALSDARVRQALNLAINRQNILDSVYYGTGSQAYTLLPPNSWAYQKDSVKIRYDRNYALALLRDAGYEDGLELTMWVPLEPRAFNPSPRKTAELIQANFADIGVELTLLTDDRFERVDLENINDIDLLLTGWIGDTGDPDNFFRPLLSCESDRVGLNVSMWCNDDFDFLLDLALETQEPRYRLNLYRQAQNILNQEFPVIPLAHGVQFRVHDKSLTGFKSSPFNAQPFDRVERIH

SEQ ID NO: 1178 - DNA, 1620 bp, Photobacterium sp. SKA34
  CDS (1)..(1620): transl_table=11
atgagcgcttactgtcgtcttttgattgccggcttcactttacttagccttttaggttgtaaagagccgtcacataattccgctaaacaaagtaatggctttgtttattgcggtcaagataccccgacaacattaaatccacagttaacggatggtggattaacagcagaaacactctcggctcaaattttcgatcgcctgctgttactcgatcctatcagccacaaaccacttccagatctagcaaaaagctggactgtcagtgacgatggcttggtatatacctttaagctgcgagatgacgttaaattccaacatactgactggtttactccgacgcgtccgcttaatgccgacgatgttatttttagctttgagcgaatcattaatccacaccacccttttcataatatttctggtggtcgttacccatggtttgaaagccttgggttcgctagcttaattgataccattaaagtaaaagatcctcttacggttcaatttaccttaaatcgcccagataattctttcttatctaacttagcaaccagttatgcggtgatttattctcaggagtatggccaacaattattaaaatcaggacgtatcgatcttattgatacaaaacctattggtacaggtcctttttacgttgatcaatttatacccaatgatcttattcgcttaaaacgtaataaagattattggcaaggtgccgcgccgatggagcaagtagtatttgatatctctgcccgtggcatgggtaatcttgctaagttgctaagctctgaatgtgatgttctctcatctcctgttgcgagccagttaccggttatttcaaataacgataactataaactacttgcacaaacggggatgaacgtatcctttctggcattaaatactgaacgcccaccgttgaacaaattagaaatccgtgaagcaattaattatgcaataaatcgaaaaacactgctcaattctgtttattacggtactgcaacagaagcgaaaagcttattacccccaatgtcttgggcttataaccacgacagcaaagcactttcttataatcctaacaaagcaaaacaactgcttgatgctgcaggctatgattacaaccaagtcctgactatgtgggtaccacttgagcctcgaccttataacccgagtccccgtaaagcagcggaattaatacaagctaatttgaaagcagttggtatcaatgtgtctttacatcatcaagaaactattggtcgtgttggtttaaccaataccactcaatacgatatggttcttgccggttggatcgcagataacggcgatcctgataactttttaagaccattattgtcatgtaatgctaaaaaagcagggctaaatgtagctaactggtgtgatcttggttttgataatttacttgaaattgcgctacgcacgaacaagcaacaacaacgtcaagtatattaccagcaagcgcaaaatattttggatcaacaaatacctgtgatcccattagcccatggtgtccatttccaagcccacaataaatcgttaggtgggttacagattgatccctttggttcgcgatctttttccagtgtttatcgaattgagtaa

SEQ ID NO: 1179 - protein, 539 aa, Photobacterium sp. SKA34
MSAYCRLLIAGFTLLSLLGCKEPSHNSAKQSNGFVYCGQDTPTTLNPQLTDGGLTAETLSAQIFDRLLLLDPISHKPLPDLAKSWTVSDDGLVYTFKLRDDVKFQHTDWFTPTRPLNADDVIFSFERIINPHHPFHNISGGRYPWFESLGFASLIDTIKVKDPLTVQFTLNRPDNSFLSNLATSYAVIYSQEYGQQLLKSGRIDLIDTKPIGTGPFYVDQFIPNDLIRLKRNKDYWQGAAPMEQVVFDISARGMGNLAKLLSSECDVLSSPVASQLPVISNNDNYKLLAQTGMNVSFLALNTERPPLNKLEIREAINYAINRKTLLNSVYYGTATEAKSLLPPMSWAYNHDSKALSYNPNKAKQLLDAAGYDYNQVLTMWVPLEPRPYNPSPRKAAELIQANLKAVGINVSLHHQETIGRVGLTNTTQYDMVLAGWIADNGDPDNFLRPLLSCNAKKAGLNVANWCDLGFDNLLEIALRTNKQQQRQVYYQQAQNILDQQIPVIPLAHGVHFQAHNKSLGGLQIDPFGSRSFSSVYRIE

SEQ ID NO: 1180 - DNA, 1623 bp, Erwinia chrysanthemi
  CDS (1)..(1623): transl_table=11
atgtccggaaaacaccttctgatactggcgctggcctggctgacgcagcccgttatggcacagatgccgaccgtccccgcggcgccggcgcaaattatccgccagagcggttttgtctattgcgtcaatgatgtgctcagcacctttaacccacaaatgtcgcgcagcgggttgatggtggacacgctggccgcgcagctttatgaccgcttgctgggcgtcgatccctacacttaccgcttgatgccggaactggcgcaatgggatgtcagcgataacggctcgacctatcgctttaccctgcgtcgcgatgtgccgttccagcaaaccgcctggtttacccccagccggatgctgaacgccgacgacgacgtgctgttcagtttccagcggatgctggacaaaaagcacccgttccacaacatcaacggcggcgaatacccctatttcgatagcctgcagttggccgacaacgtgcagagcattcgcaagctgggcgattacagcatcgagatcccgtctgaacagcccgatgcgtcgttcctgtggcatctggcgacccactatgcgcccatcctgtcggcggaatacgcccagcaattgacccggcaagatggtcgtgaactgcttgaccgtcaaccggtaggcaccggcccttatcgactggagcaataccgttacggccagtttgtgcgcctgaaacgcaacaacaattactggcgcggtcggccacttatggaacaggtggtggtggacctcggctccggcggcacgggccgactgtccaagctgttgaccggcgaatgtgatgtgctggcctacccggccgccagccaactgagcattctgcgtaatgacccgcgcctgcgtttgtcgctgcgtccggggatgaacgtcgcctatctggcgtttaacgtgcgcaaaccgccgttggatgatgctcgcgtgcgtcacgccgttgcgctggcgatcaacaatgatcgcctgatgcagtcgatttactacggcaccgcggaaaccgccgcgtcgattttgccgcgcgcgtcctgggcttacgacaatgaggcgcaggttaccgagtacaacccggaaaaagcgcgtcagttgctcaaagagctgggcattacccatctacagttacagttgtgggtgccgagcgcttcgcaatcctataaccccagcccggtaaagaccgccgaattgattcaggccgatttggctcaggtgggtatccaggtcaccatcgtgccggtagaaggccgctttcaggaagcacgcctgatggaaatgaaccacgacctgacgctggccggctgggcgaccgacagtaacgacccggacagcgtattccggccgctgctgagttgcgccgctattcgctcccagaccaactatgctcattggtgcgatcccggtttcgatcaggtgctgcaggatgcactctcttcccagcagctctcgcggcgtatggaatactatcgggtcgcgcaccatattctggccgaacagttgccggttctgccgctggcctcgtcattgcggatgcaggcgtatcgctacgatattaaaggtctggtacttagcccgttcgggaatgcctccttcgccgggtttacgggatga

SEQ ID NO: 1181 - protein, 540 aa, Erwinia chrysanthemi
MSGKHLLILALAWLTQPVMAQMPTVPAAPAQIIRQSGFVYCVNDVLSTFNPQMSRSGLMVDTLAAQLYDRLLGVDPYTYRLMPELAQWDVSDNGSTYRFTLRRDVPFQQTAWFTPSRMLNADDDVLFSFQRMLDKKHPFHNINGGEYPYFDSLQLADNVQSIRKLGDYSIEIPSEQPDASFLWHLATHYAPILSAEYAQQLTRQDGRELLDRQPVGTGPYRLEQYRYGQFVRLKRNNNYWRGRPLMEQVVVDLGSGGTGRLSKLLTGECDVLAYPAASQLSILRNDPRLRLSLRPGMNVAYLAFNVRKPPLDDARVRHAVALAINNDRLMQSIYYGTAETAASILPRASWAYDNEAQVTEYNPEKARQLLKELGITHLQLQLWVPSASQSYNPSPVKTAELIQADLAQVGIQVTIVPVEGRFQEARLMEMNHDLTLAGWATDSNDPDSVFRPLLSCAAIRSQTNYAHWCDPGFDQVLQDALSSQQLSRRMEYYRVAHHILAEQLPVLPLASSLRMQAYRYDIKGLVLSPFGNASFAGFTG

SEQ ID NO: 1182 - DNA, 1644 bp, Klebsiella oxytoca
  CDS (1)..(1644): transl_table=11
atgcgcctggttttatcatctctgatcgtgatggctggatttctgagtggtcaggctgcagctgcgcctgagcaggcctcgtacgctgatattcgtgacagtggctttgtctattgcgttagcgggcaggtcaatacgttcaatccacaaaaagcaagcagcggtctcatcgtagacacattagcggcccaattgtatgaccgactgcttgatgtcgatccctacacctatcgcctggtgccagaactggctgaaagctgggaagtattagataacggcgcaacctaccgcttccatttacgacgcgatgttccgtttcaaaagactgcctggttcacgcccacccgcaaactaaatgcggacgatgtggtatttaccttcgagcgcatctttgatcgccagcatccgtggcataatgtcaatggtagcagttttccttattttgatagcctgcagttagccgataacgtccaaagcatgcgtaaactggacagcaacaccgttgaatttagcttaaatcatcccgaagcctccttcttgtggcaccttgccacacattatgcctctgtgatgtcggccgaatatgccgccaaattagcaaaacaggatcgccaggaattactcgacagacaacccgtcggcacaggcccgtaccaactttcagaaaatcgtgcaggccaatatattcgcctacaacggcatgaaaaattctggcgtggtacccccttgatcccgcaggtcgtggtggatctcggctctggcgggaccggacgcttatcgaaattactgaccggcgagtgcgacgtcctggcatggcctgccgccagccagctcagcatactgcgtgatgacccgcggctgcgcctgacgctgcgtccggggatgaatatcgcctatctggcgttcaacacggataaaccgccgttgaacaaccctgccgtacgacatgcgctagcgctggccattaacaaccaacggttaatgcaatctatttactacggtacggcggaaaccgcggcatctattttgcctcgcgcctcgtgggcttatgacaacgaagctaaaattaccgagtacaacccggcaaaatcgcgcgagcagttaaaagcgctggggctggaaaacctgacgttacaactctgggtacctaccagctctcaggcctggaaccccagtccgctgaaaaccgcagagctgattcaggctgatatggctcaggtgggtgtgaaagtgaagatcatcccggtagagggccgttttcaggaggcgcgattaatggatatgaaccatgatctgacgttgtccggttgggcaactgacagtaacgatcctgacagctttttccgaccgatgcttagctgtgccgccattaactcgcagaccaattttgcccactggtgcaatcccgagtttgacagcattttgcgcaaagccctctcttcgcaacaactctcctcgcgaattgatgcctacgacgaagcgcaaaatattcttgcgcgcgagttgccgatcctgcctctggcctcttcgctccgtttgcaggcttaccgctatgacatcaaagggctggtgctcagtccgttcggcaacgcttcttttgccggggtttccagggaaaaggctgacgaggtgaaaaaaccatga

SEQ ID NO: 1183 - protein, 547 aa, Klebsiella oxytoca
MRLVLSSLIVMAGFLSGQAAAAPEQASYADIRDSGFVYCVSGQVNTFNPQKASSGLIVDTLAAQLYDRLLDVDPYTYRLVPELAESWEVLDNGATYRFHLRRDVPFQKTAWFTPTRKLNADDVVFTFERIFDRQHPWHNVNGSSFPYFDSLQLADNVQSMRKLDSNTVEFSLNHPEASFLWHLATHYASVMSAEYAAKLAKQDRQELLDRQPVGTGPYQLSENRAGQYIRLQRHEKFWRGTPLIPQVVVDLGSGGTGRLSKLLTGECDVLAWPAASQLSILRDDPRLRLTLRPGMNIAYLAFNTDKPPLNNPAVRHALALAINNQRLMQSIYYGTAETAASILPRASWAYDNEAKITEYNPAKSREQLKALGLENLTLQLWVPTSSQAWNPSPLKTAELIQADMAQVGVKVKIIPVEGRFQEARLMDMNHDLTLSGWATDSNDPDSFFRPMLSCAAINSQTNFAHWCNPEFDSILRKALSSQQLSSRIDAYDEAQNILARELPILPLASSLRLQAYRYDIKGLVLSPFGNASFAGVSREKADEVKKP

SEQ ID NO: 1184 - DNA, 1644 bp, Klebsiella pneumoniae
  CDS (1)..(1644): transl_table=11
atgcgcctggttttatcatctctgatcgtgatggctggatttctgagtggtcaggctgcagctgcgcctgagcaggcctcgtacgctgatattcgtgacagtggctttgtctattgcgttagcgggcaggtcaatacgttcaatccacaaaaagcaagcagcggtctcatcgtagacacattagcggcccaattgtatgaccgactgcttgatgtcgatccctacacctatcgcctggtgccagaactggctgaaagctgggaagtattagataacggcgcaacctaccgcttccatttacgacgcgatgttccgtttcaaaagactgcctggttcacgcccacccgcaaactaaatgcggacgatgtggtatttaccttcgagcgcatctttgatcgccagcatccgtggcataatgtcaatggtagcagttttccttattttgatagcctgcagttcgccgataacgtccaaagcgtgcgtaaactggacaacaacaccgttgaatttcgcttaaatcaacccgacgcctccttcttgtggcaccttgccacacattatgcctctgtgatgtcggccgaatatgccgccaaattagcaaaacaggatcgccaggaattactcgacagacaacccgtcggcacaggcccgtaccaactttcagaaaatcgtgcaggccaatatattcgcctacaacggcatgaaaaattctggcgtggtacccccttgatgccgcaggtcgtggtggatctcggctctggcgggaccggacgcttatcgaaattactgaccggcgagtgcgacgtcctggcatggcctgccgccagccagctcagcatactgcgtgatgacccgcggctgcgcctgacgctgcgtccggggatgaatatcgcctatctggcgttcaacacggataaaccgccgttgaacaaccctgccgtacgacatgcgctagcgctggccattaacaaccaacggttaatgcaatctatttactacggtacggcggaaaccgcggcatctattttgcctcgcgcctcgtgggcttatgacaacgaagctaaaattaccgagtacaacccggcaaaatcgcgcgagcagttaaaagcgctggggctggaaaacctgacgttacaactctgggtacctaccagctctcaggcctggaaccccagtccgctgaaaaccgcagagctgattcaggctgatatggctcaggtgggtgtgaaagtgaagatcatcccggtagagggccgttttcaggaggcgcgattaatggatatgaaccatgatctgacgttgtccggttgggcaactgacagtaacgatcctgacagctttttccgaccgatgcttagctgtgccgccattaactcgcagaccaattttgcccactggtgcaatcccgagtttgacagcattttgcgcaaagccctctcttcgcaacaactctcctcgcgaattgatgcctacgacgaagcgcaaaatattcttgcgcgcgagttgccgatcctgcctctggcctcttcgctccgtttgcaggcttaccgctatgacatcaaagggctggtgctcagtccgttcggcaacgcttcttttgccggggtttccagggaaaaggctgacgaggtgaaaaaaccatga

SEQ ID NO: 1185 - protein, 547 aa, Klebsiella pneumoniae
MRLVLSSLIVMAGFLSGQAAAAPEQASYADIRDSGFVYCVSGQVNTFNPQKASSGLIVDTLAAQLYDRLLDVDPYTYRLVPELAESWEVLDNGATYRFHLRRDVPFQKTAWFTPTRKLNADDVVFTFERIFDRQHPWHNVNGSSFPYFDSLQFADNVQSVRKLDNNTVEFRLNQPDASFLWHLATHYASVMSAEYAAKLAKQDRQELLDRQPVGTGPYQLSENRAGQYIRLQRHEKFWRGTPLMPQVVVDLGSGGTGRLSKLLTGECDVLAWPAASQLSILRDDPRLRLTLRPGMNIAYLAFNTDKPPLNNPAVRHALALAINNQRLMQSIYYGTAETAASILPRASWAYDNEAKITEYNPAKSREQLKALGLENLTLQLWVPTSSQAWNPSPLKTAELIQADMAQVGVKVKIIPVEGRFQEARLMDMNHDLTLSGWATDSNDPDSFFRPMLSCAAINSQTNFAHWCNPEFDSILRKALSSQQLSSRIDAYDEAQNILARELPILPLASSLRLQAYRYDIKGLVLSPFGNASFAGVSREKADEVKKP

SEQ ID NO: 1186 - DNA, 1650 bp, Salmonella typhimurium
  CDS (1)..(1650): transl_table=11
atgcgcctggttttatcgtctctgatcgtgatagcgggtctactaagtagtcaggctacggctgcgactgcgcccgaacaaactgcgagtgcagatattcgcgatagcggctttgtgtattgtgtcagcgggcaggtcaacacctttaatccgcaaaaagcgagcagcggcctcatcgtcgataccctggccgcccagttatatgatcgcctgttggatgtcgatccctatacttatcgtttagtcccagagctggcagaaagctgggaagtgctggataacggggcaacgtaccgttttcacctgcgccgcgacgtttcctttcaaaaaaccgcctggtttacgccgacccgaaaactcaatgctgatgatgtcgtctttacctttcagcggattttcgatcgtcgacatccgtggcataacatcaacggcagtagcttcccctactttgatagcctacagttcgccgacaatgtaaaaagcgtgcgtaagctggacaataacaccgttgagtttcgcctgacgcagccagacgcctcctttttatggcatctggctacacactacgcttccgtcatgtccgctgagtacgccgcgcagcttagccgaaaagatcgtcaggaactgctagaccgccaaccggtcggtaccgggcctttccagctttcggagtaccgtgccgggcagtttattcgtctccagcgccacgatgggttttggcgcggcaaaccgctgatgccgcaagtggtggtggatttaggctccggcggtaccgggcgtttatcgaaattactgaccggtgaatgcgatgttctggcctggcccgccgccagccagctaactattttacgcgacgatccgcgtttacgtctgacgttgcgcccggggatgaatatcgcctatctggcctttaacaccgataagccgccgttgaataatcccgcagtgcgccatgcgctggccttatcgatcaacaaccagcgcctgatgcagtcgatttattacggcacggcggaaaccgcagcctccattttaccgagagcctcatgggcttacgataacgatgccaaaattacggagtacaatccgcaaaaatcgcgcgaacagctaaaagcgctgggcattgagaatcttacgctgcatctctgggtgccgaccagttctcaggcctggaacccaagtccgctaaaaacggcggagcttattcaggcggatatggcgcaggttggcgtaaaagtggtcattgtgccggttgaaggtcgttttcaggaggcgcgcctgatggatatgaatcacgatctgaccttatccggctgggccacggacagcaacgatccggatagctttttcagaccgctgttaagctgtgcggccatcaattcgcaaaccaatttcgcccactggtgtaaccctgaatttgacagcgtgctgcgtaaggcactgtcgtcgcagcagttggcttcgcgcatagaagcgtatgaggaagcgcagaatatcctggagaaagagctgccgatactgccgctggcatcatcactacgcctgcaggcttaccgctacgatattaaagggctggtgttaagcccgttcggcaatgcgtcttttgccggcgtctcccgcgaaaaacacgaagaggtgaaaaaaccatga

SEQ ID NO: 1187 - protein, 549 aa, Salmonella typhimurium
MRLVLSSLIVIAGLLSSQATAATAPEQTASADIRDSGFVYCVSGQVNTFNPQKASSGLIVDTLAAQLYDRLLDVDPYTYRLVPELAESWEVLDNGATYRFHLRRDVSFQKTAWFTPTRKLNADDVVFTFQRIFDRRHPWHNINGSSFPYFDSLQFADNVKSVRKLDNNTVEFRLTQPDASFLWHLATHYASVMSAEYAAQLSRKDRQELLDRQPVGTGPFQLSEYRAGQFIRLQRHDGFWRGKPLMPQVVVDLGSGGTGRLSKLLTGECDVLAWPAASQLTILRDDPRLRLTLRPGMNIAYLAFNTDKPPLNNPAVRHALALSINNQRLMQSIYYGTAETAASILPRASWAYDNDAKITEYNPQKSREQLKALGIENLTLHLWVPTSSQAWNPSPLKTAELIQADMAQVGVKVVIVPVEGRFQEARLMDMNHDLTLSGWATDSNDPDSFFRPLLSCAAINSQTNFAHWCNPEFDSVLRKALSSQQLASRIEAYEEAQNILEKELPILPLASSLRLQAYRYDIKGLVLSPFGNASFAGVSREKHEEVKKP

SEQ ID NO: 1188 - DNA, 23 bp, Artificial sequence
  primer
atgcgccaggtattatcgtctct

SEQ ID NO: 1189 - DNA, 27 bp, Artificial sequence
  primer
ttatggttttttcacctcatcctgttt

SEQ ID NO: 1190 - protein, 512 aa, Artificial sequence
  consensus sequence
  Variant (3)..(4): Xaa in position 3 to 4 is any amino acid
  Variant (10)..(15): Xaa in position 10 to 15 is any amino acid
  Variant (20)..(23): Xaa in position 20 to 23 is any amino acid
  Variant (26)..(28): Xaa in position 26 to 28 is any amino acid
  Variant (32)..(32): Xaa in position 32 is any amino acid
  Variant (35)..(35): Xaa in position 35 is any amino acid
  Variant (41)..(42): Xaa in position 41 to 42 is any amino acid
  Variant (45)..(45): Xaa in position 45 is any amino acid
  Variant (47)..(50): Xaa in position 47 to 50 is any amino acid
  Variant (52)..(52): Xaa in position 52 is any amino acid
  Variant (55)..(55): Xaa in position 55 is any amino acid
  Variant (58)..(58): Xaa in position 58 is any amino acid
  Variant (60)..(60): Xaa in position 60 is any amino acid
  Variant (62)..(62): Xaa in position 62 is any amino acid
  Variant (64)..(65): Xaa in position 64 to 65 is any amino acid
  Variant (67)..(67): Xaa in position 67 is any amino acid
  Variant (69)..(69): Xaa in position 69 is any amino acid
  Variant (72)..(72): Xaa in position 72 is any amino acid
  Variant (75)..(75): Xaa in position 75 is any amino acid
  Variant (78)..(78): Xaa in position 78 is any amino acid
  Variant (80)..(80): Xaa in position 80 is any amino acid
  Variant (87)..(88): Xaa in position 87 to 88 is any amino acid
  Variant (93)..(93): Xaa in position 93 is any amino acid
  Variant (95)..(95): Xaa in position 95 is any amino acid
  Variant (97)..(97): Xaa in position 97 is any amino acid
  Variant (99)..(99): Xaa in position 99 is any amino acid
  Variant (101)..(102): Xaa in position 101 to 102 is any amino acid
  Variant (104)..(106): Xaa in position 104 to 106 is any amino acid
  Variant (108)..(108): Xaa in position 108 is any amino acid
  Variant (110)..(112): Xaa in position 110 to 112 is any amino acid
  Variant (114)..(116): Xaa in position 114 to 116 is any amino acid
  Variant (118)..(118): Xaa in position 118 is any amino acid
  Variant (120)..(120): Xaa in position 120 is any amino acid
  Variant (123)..(123): Xaa in position 123 is any amino acid
  Variant (126)..(133): Xaa in position 126 to 133 is any amino acid
  Variant (136)..(137): Xaa in position 136 to 137 is any amino acid
  Variant (140)..(140): Xaa in position 140 is any amino acid
  Variant (142)..(142): Xaa in position 142 is any amino acid
  Variant (144)..(145): Xaa in position 144 to 145 is any amino acid
  Variant (148)..(148): Xaa in position 148 is any amino acid
  Variant (152)..(153): Xaa in position 152 to 153 is any amino acid
  Variant (157)..(157): Xaa in position 157 is any amino acid
  Variant (160)..(162): Xaa in position 160 to 162 is any amino acid
  Variant (164)..(164): Xaa in position 164 is any amino acid
  Variant (167)..(169): Xaa in position 167 to 169 is any amino acid
  Variant (171)..(176): Xaa in position 171 to 176 is any amino acid
  Variant (178)..(179): Xaa in position 178 to 179 is any amino acid
  Variant (181)..(182): Xaa in position 181 to 182 is any amino acid
  Variant (184)..(184): Xaa in position 184 is any amino acid
  Variant (189)..(190): Xaa in position 189 to 190 is any amino acid
  Variant (192)..(192): Xaa in position 192 is any amino acid
  Variant (194)..(199): Xaa in position 194 to 199 is any amino acid
  Variant (203)..(203): Xaa in position 203 is any amino acid
  Variant (205)..(208): Xaa in position 205 to 208 is any amino acid
  Variant (210)..(210): Xaa in position 210 is any amino acid
  Variant (212)..(214): Xaa in position 212 to 214 is any amino acid
  Variant (216)..(216): Xaa in position 216 is any amino acid
  Variant (220)..(220): Xaa in position 220 is any amino acid
  Variant (222)..(225): Xaa in position 222 to 225 is any amino acid
  Variant (229)..(229): Xaa in position 229 is any amino acid
  Variant (231)..(231): Xaa in position 231 is any amino acid
  Variant (235)..(236): Xaa in position 235 to 236 is any amino acid
  Variant (242)..(243): Xaa in position 242 to 243 is any amino acid
  Variant (245)..(245): Xaa in position 245 is any amino acid
  Variant (250)..(254): Xaa in position 250 to 254 is any amino acid
  Variant (257)..(257): Xaa in position 257 is any amino acid
  Variant (258)..(258): Xaa in position 258 is any or no amino acid
  Variant (260)..(260): Xaa in position 260 is any amino acid
  Variant (262)..(264): Xaa in position 262 to 264 is any amino acid
  Variant (269)..(269): Xaa in position 269 is any amino acid
  Variant (271)..(271): Xaa in position 271 is any amino acid
  Variant (274)..(274): Xaa in position 274 is any amino acid
  Variant (277)..(278): Xaa in position 277 to 278 is any amino acid
  Variant (282)..(285): Xaa in position 282 to 285 is any amino acid
  Variant (288)..(288): Xaa in position 288 is any amino acid
  Variant (290)..(291): Xaa in position 290 to 291 is any amino acid
  Variant (293)..(293): Xaa in position 293 is any amino acid
  Variant (296)..(296): Xaa in position 296 is any amino acid
  Variant (298)..(298): Xaa in position 298 is any amino acid
  Variant (300)..(301): Xaa in position 300 to 301 is any amino acid
  Variant (303)..(303): Xaa in position 303 is any amino acid
  Variant (309)..(310): Xaa in position 309 to 310 is any amino acid
  Variant (312)..(313): Xaa in position 312 to 313 is any amino acid
  Variant (317)..(318): Xaa in position 317 to 318 is any amino acid
  Variant (323)..(330): Xaa in position 323 to 330 is any amino acid
  Variant (334)..(334): Xaa in position 334 is any amino acid
  Variant (336)..(339): Xaa in position 336 to 339 is any amino acid
  Variant (341)..(343): Xaa in position 341 to 343 is any amino acid
  Variant (345)..(347): Xaa in position 345 to 347 is any amino acid
  Variant (348)..(348): Xaa in position 348 is any or no amino acid
  Variant (350)..(350): Xaa in position 350 is any amino acid
  Variant (352)..(353): Xaa in position 352 to 353 is any amino acid
  Variant (357)..(362): Xaa in position 357 to 362 is any amino acid
  Variant (367)..(367): Xaa in position 367 is any amino acid
  Variant (376)..(377): Xaa in position 376 to 377 is any amino acid
  Variant (379)..(380): Xaa in position 379 to 380 is any amino acid
  Variant (382)..(389): Xaa in position 382 to 389 is any amino acid
  Variant (391)..(391): Xaa in position 391 is any amino acid
  Variant (394)..(397): Xaa in position 394 to 397 is any amino acid
  Variant (399)..(403): Xaa in position 399 to 403 is any amino acid
  Variant (404)..(404): Xaa in position 404 is any or no amino acid
  Variant (407)..(407): Xaa in position 407 is any amino acid
  Variant (409)..(409): Xaa in position 409 is any amino acid
  Variant (412)..(413): Xaa in position 412 to 413 is any amino acid
  Variant (415)..(416): Xaa in position 415 to 416 is any amino acid
  Variant (420)..(420): Xaa in position 420 is any amino acid
  Variant (429)..(429): Xaa in position 429 is any amino acid
  Variant (431)..(435): Xaa in position 431 to 435 is any amino acid
  Variant (437)..(439): Xaa in position 437 to 439 is any amino acid
  Variant (442)..(444): Xaa in position 442 to 444 is any amino acid
  Variant (447)..(448): Xaa in position 447 to 448 is any amino acid
  Variant (450)..(451): Xaa in position 450 to 451 is any amino acid
  Variant (454)..(455): Xaa in position 454 to 455 is any amino acid
  Variant (457)..(460): Xaa in position 457 to 460 is any amino acid
  Variant (462)..(464): Xaa in position 462 to 464 is any amino acid
  Variant (466)..(467): Xaa in position 466 to 467 is any amino acid
  Variant (470)..(470): Xaa in position 470 is any amino acid
  Variant (473)..(476): Xaa in position 473 to 476 is any amino acid
  Variant (478)..(479): Xaa in position 478 to 479 is any amino acid
  Variant (483)..(488): Xaa in position 483 to 488 is any amino acid
  Variant (491)..(495): Xaa in position 491 to 495 is any amino acid
  Variant (498)..(499): Xaa in position 498 to 499 is any amino acid
  Variant (504)..(505): Xaa in position 504 to 505 is any amino acid
  Variant (508)..(509): Xaa in position 508 to 509 is any amino acid
  Variant (511)..(511): Xaa in position 511 is any amino acid
IRXXGFVYCXXXXXXTFNPXXXXSGXXXDTLXAQXYDRLLXXDPXTXXXXPXLAXSWXVXDXGXXYXFXLRXDVXFQXTXWFTPTRXXNADDXVXFXFXRXXDXXXPXHXXXGXXXPXFXSLXFAXXXXXXXXLDXXTVXFXLXXPDXSFLXXLATXYAXXXSXEYXXXLXXXXXXEXXDXXPXGTGPXXLXEXXXXXXIRLXRXXXXWXGXXXMXQVVXDXXXXGTGXLXKLLXXECDVLXXPXASQLXXXXXDPXXLXLXXXPGMNXAXLAXNTXXPPLXXXXVRXAXXLXINXQXLXXSXYYGTAXXAXXILPXXSWAYXXXXXXXXYNPXKXXXXLXXXGXXXXLXLXXWVPXXXXXXNPSPXKTAELIQAXXAXXGXXXXXXXXEXRFXXXXLXXXXXXDLXLXGWXXDXXDPDXFFRPLLSCXAXXXXXNXXXWCXXXFDXXLXXALXXQXXXXRXXXYXXAQXILXXXXPXXPLAXXXXXXAYXXXXXGLXXSPFGXXSFXXVXR

SEQ ID NO: 1191 - protein, 43 aa, Artificial sequence
  protein pattern
  Variant (2)..(2): Xaa in position 2 is any amino acid
  Variant (3)..(3): Xaa in position 3 is any or no amino acid
  Variant (5)..(5): Xaa in position 5 is Ala or Ser
  Variant (8)..(8): Xaa in position 8 is any or no amino acid
  Variant (10)..(10): Xaa in position 10 is any or no amino acid
  Variant (12)..(12): Xaa in position 12 is Ser or Thr
  Variant (13)..(13): Xaa in position 13 is Gly or Asn
  Variant (17)..(17): Xaa in position 17 is Asn or Ser
  Variant (18)..(18): Xaa in position 18 is Phe or Val
  Variant (19)..(19): Xaa in position 19 is Phe or Leu
  Variant (22)..(22): Xaa in position 22 is Leu or Met
  Variant (26)..(26): Xaa in position 26 is Ala or Asp
  Variant (27)..(27): Xaa in position 27 is Ala or Ser
  Variant (28)..(29): Xaa in position 28 to 29 is any amino acid
  Variant (30)..(30): Xaa in position 30 is Ala or Ser
  Variant (31)..(31): Xaa in position 31 is Gly or Gln
  Variant (32)..(32): Xaa in position 32 is any amino acid
  Variant (34)..(34): Xaa in position 34 is any amino acid
  Variant (35)..(35): Xaa in position 35 is Ala or Ser
  Variant (36)..(36): Xaa in position 36 is any amino acid
  Variant (39)..(39): Xaa in position 39 is Asp, Glu or Asn
  Variant (40)..(40): Xaa in position 40 is Pro or Ser
  Variant (41)..(41): Xaa in position 41 is any amino acid
DXXLXGWXTXDXXDPDXXXRPXLSCXXXXXXXNXXXWCXXXFD

SEQ ID NO: 1192 - protein, 43 aa, Artificial sequence
  protein pattern
  Variant (2)..(2): Xaa in position 2 is Asp, Glu, Gln, Ser or Thr
  Variant (4)..(5): Xaa in position 4 to 5 is any or no amino acid
  Variant (7)..(8): Xaa in position 7 to 8 is any or no amino acid
  Variant (10)..(10): Xaa in position 10 is any amino acid
  Variant (11)..(11): Xaa in position 11 is Glu or Thr
  Variant (13)..(13): Xaa in position 13 is any amino acid
  Variant (15)..(15): Xaa in position 15 is any amino acid
  Variant (17)..(17): Xaa in position 17 is Lys or Arg
  Variant (18)..(18): Xaa in position 18 is any amino acid
  Variant (19)..(19): Xaa in position 19 is Asp, Gly or Asn
  Variant (21)..(21): Xaa in position 21 is any amino acid
  Variant (24)..(24): Xaa in position 24 is any amino acid
  Variant (26)..(26): Xaa in position 26 is Ala, Asp, Pro or Ser
  Variant (29)..(29): Xaa in position 29 is Ser or Thr
  Variant (33)..(33): Xaa in position 33 is any amino acid
  Variant (34)..(34): Xaa in position 34 is Leu or Met
  Variant (36)..(36): Xaa in position 36 is Ala or Ser
  Variant (37)..(37): Xaa in position 37 is Asp or Lys
  Variant (40)..(40): Xaa in position 40 is Ile or Val
  Variant (42)..(42): Xaa in position 42 is Ser or Thr
WXVXXNXXGXXYXFXLXXXVXFQXTXWFXPTRXXNXXDVXFXF

SEQ ID NO: 1193 - protein, 60 aa, Artificial sequence
  protein pattern
  Variant (2)..(2): Xaa in position 2 is any amino acid
  Variant (5)..(5): Xaa in position 5 is Ile or Val
  Variant (7)..(7): Xaa in position 7 is Phe or Tyr
  Variant (8)..(8): Xaa in position 8 is Ile or Leu
  Variant (10)..(10): Xaa in position 10 is Phe or Val
  Variant (12)..(12): Xaa in position 12 is Thr or Val
  Variant (13)..(13): Xaa in position 13 is any amino acid
  Variant (14)..(14): Xaa in position 14 is His or Lys
  Variant (16)..(16): Xaa in position 16 is Ala or Pro
  Variant (18)..(18): Xaa in position 18 is Asp, Asn or Ser
  Variant (19)..(21): Xaa in position 19 to 21 is any amino acid
  Variant (24)..(24): Xaa in position 24 is any amino acid
  Variant (26)..(26): Xaa in position 26 is Ile, Leu or Val
  Variant (27)..(27): Xaa in position 27 is Ala or Asn
  Variant (28)..(28): Xaa in position 28 is any amino acid
  Variant (29)..(29): Xaa in position 29 is Ala or Ser
  Variant (32)..(32): Xaa in position 32 is Asn or Arg
  Variant (33)..(33): Xaa in position 33 is Asp or Gln
  Variant (34)..(34): Xaa in position 34 is Asn or Arg
  Variant (35)..(35): Xaa in position 35 is Ile or Leu
  Variant (36)..(36): Xaa in position 36 is Leu or Met
  Variant (37)..(37): Xaa in position 37 is Asp or Gln
  Variant (39)..(39): Xaa in position 39 is Ile or Val
  Variant (44)..(44): Xaa in position 44 is Ala or Gly
  Variant (45)..(45): Xaa in position 45 is Glu or Ser
  Variant (46)..(46): Xaa in position 46 is any amino acid
  Variant (48)..(49): Xaa in position 48 to 49 is any amino acid
  Variant (53)..(53): Xaa in position 53 is any amino acid
  Variant (54)..(54): Xaa in position 54 is Ala or Thr
  Variant (59)..(59): Xaa in position 59 is Asp or Gln
  Variant (60)..(60): Xaa in position 60 is Asn or Gln
PXMNXAXXAXNXXXPXLXXXXVRXAXXXXINXXXXXXSXYYGTXXXAXXILPXXSWAYXX

SEQ ID NO: 1194 - protein, 61 aa, Artificial sequence
  protein pattern
  Variant (5)..(5): Xaa in position 5 is Phe or Tyr
  Variant (6)..(6): Xaa in position 6 is any amino acid
  Variant (8)..(8): Xaa in position 8 is any or no amino acid
  Variant (10)..(15): Xaa in position 10 to 15 is any amino acid
  Variant (16)..(16): Xaa in position 16 is any or no amino acid
  Variant (20)..(20): Xaa in position 20 is any amino acid
  Variant (22)..(24): Xaa in position 22 to 24 is any amino acid
  Variant (25)..(25): Xaa in position 25 is Phe or Tyr
  Variant (27)..(27): Xaa in position 27 is Glu, Lys or Arg
  Variant (28)..(28): Xaa in position 28 is Gly or Ser
  Variant (29)..(29): Xaa in position 29 is any amino acid
  Variant (30)..(30): Xaa in position 30 is Ala or Pro
  Variant (31)..(31): Xaa in position 31 is any amino acid
  Variant (32)..(32): Xaa in position 32 is Ile, Met or Val
  Variant (33)..(33): Xaa in position 33 is any amino acid
  Variant (35)..(35): Xaa in position 35 is Ile or Val
  Variant (37)..(37): Xaa in position 37 is Phe, Ile or Val
  Variant (39)..(39): Xaa in position 39 is Ile, Leu or Val
  Variant (40)..(40): Xaa in position 40 is Gly or Ser
  Variant (41)..(42): Xaa in position 41 to 42 is any amino acid
  Variant (44)..(44): Xaa in position 44 is any amino acid
  Variant (46)..(46): Xaa in position 46 is any amino acid
  Variant (47)..(47): Xaa in position 47 is Leu or Met
  Variant (48)..(48): Xaa in position 48 is Ala or Ser
  Variant (52)..(52): Xaa in position 52 is any amino acid
  Variant (53)..(53): Xaa in position 53 is Gly or Asn
  Variant (59)..(59): Xaa in position 59 is Ala, Asn or Ser
  Variant (60)..(60): Xaa in position 60 is any amino acid
GTGPXXLXEXXXXXXXIRLXRXXXXWXXXXXXXQXVXDXXXXGXGXXXKLLXXECDVLXXP

SEQ ID NO: 1195 - protein, 60 aa, Artificial sequence
  protein pattern
  Variant (2)..(3): Xaa in position 2 to 3 is any or no amino acid
  Variant (5)..(6): Xaa in position 5 to 6 is any or no amino acid
  Variant (8)..(8): Xaa in position 8 is Gly or Ser
  Variant (9)..(9): Xaa in position 9 is any amino acid
  Variant (10)..(10): Xaa in position 10 is Phe or Tyr
  Variant (12)..(12): Xaa in position 12 is Trp or Tyr
  Variant (14)..(14): Xaa in position 14 is Asp or Glu
  Variant (17)..(17): Xaa in position 17 is Gly or Gln
  Variant (18)..(18): Xaa in position 18 is Phe or Leu
  Variant (20)..(20): Xaa in position 20 is Asp or Ser
  Variant (21)..(21): Xaa in position 21 is any amino acid
  Variant (22)..(22): Xaa in position 22 is Ile or Val
  Variant (23)..(23): Xaa in position 23 is any amino acid
  Variant (24)..(24): Xaa in position 24 is Ser or Thr
  Variant (25)..(25): Xaa in position 25 is Ile, Met or Val
  Variant (26)..(26): Xaa in position 26 is Lys or Arg
  Variant (27)..(28): Xaa in position 27 to 28 is any amino acid
  Variant (29)..(29): Xaa in position 29 is Asp, Gly or Asn
  Variant (30)..(30): Xaa in position 30 is Asp, Glu, Asn, Pro or Ser
  Variant (31)..(31): Xaa in position 31 is any amino acid
  Variant (32)..(32): Xaa in position 32 is Ser or Thr
  Variant (33)..(33): Xaa in position 33 is Ile or Val
  Variant (34)..(34): Xaa in position 34 is Glu or Gln
  Variant (35)..(35): Xaa in position 35 is Phe or Ile
  Variant (36)..(39): Xaa in position 36 to 39 is any amino acid
  Variant (41)..(41): Xaa in position 41 is Asp or Glu
  Variant (42)..(42): Xaa in position 42 is Ala or Asn
  Variant (46)..(47): Xaa in position 46 to 47 is any amino acid
  Variant (51)..(51): Xaa in position 51 is any amino acid
  Variant (54)..(54): Xaa in position 54 is any amino acid
  Variant (55)..(55): Xaa in position 55 is Ile or Val
  Variant (56)..(56): Xaa in position 56 is any amino acid
  Variant (58)..(58): Xaa in position 58 is Ala, Asp, Gln or Ser
HXXNXXGXXXPXFXSLXXAXXXXXXXXXXXXXXXXXXXXPXXSFLXXLATXYAXXXSXEY

SEQ ID NO: 1196 - protein, 49 aa, Artificial sequence
  protein pattern
  Variant (2)..(2): Xaa in position 2 is any amino acid
  Variant (4)..(4): Xaa in position 4 is Gly or Val
  Variant (5)..(5): Xaa in position 5 is Asn, Gln or Ser
  Variant (6)..(6): Xaa in position 6 is Asp or Gly
  Variant (7)..(7): Xaa in position 7 is any amino acid
  Variant (8)..(8): Xaa in position 8 is Leu, Pro or Val
  Variant (9)..(9): Xaa in position 9 is Asn, Ser or Thr
  Variant (14)..(14): Xaa in position 14 is Gln or Ser
  Variant (15)..(16): Xaa in position 15 to 16 is any amino acid
  Variant (17)..(17): Xaa in position 17 is Asp, Arg or Ser
  Variant (20)..(20): Xaa in position 20 is Ile, Leu or Val
  Variant (21)..(21): Xaa in position 21 is any amino acid
  Variant (22)..(22): Xaa in position 22 is Ala, Ile or Val
  Variant (23)..(23): Xaa in position 23 is Asp or Glu
  Variant (24)..(24): Xaa in position 24 is Ala or Thr
  Variant (26)..(26): Xaa in position 26 is Ala or Ser
  Variant (27)..(27): Xaa in position 27 is Ala or Pro
  Variant (29)..(29): Xaa in position 29 is Phe or Leu
  Variant (32)..(32): Xaa in position 32 is any amino acid
  Variant (35)..(35): Xaa in position 35 is Asp, Gly or Thr
  Variant (36)..(36): Xaa in position 36 is Leu or Val
  Variant (39)..(39): Xaa in position 39 is any amino acid
  Variant (40)..(40): Xaa in position 40 is Ser or Thr
  Variant (41)..(41): Xaa in position 41 is His or Tyr
  Variant (42)..(42): Xaa in position 42 is Gln or Arg
  Variant (43)..(43): Xaa in position 43 is Leu or Pro
  Variant (44)..(44): Xaa in position 44 is Ile, Met or Val
  Variant (45)..(45): Xaa in position 45 is Ala or Pro
  Variant (46)..(46): Xaa in position 46 is Glu, Asn or Ser
  Variant (47)..(47): Xaa in position 47 is Ile or Leu
  Variant (49)..(49): Xaa in position 49 is Glu or Gln
VXCXXXXXXTFNPXXXXSGXXXXXLXXQXYDXLLXXDPXXXXXXXXXAX

SEQ ID NO: 1197 - protein, 40 aa, Artificial sequence
  protein pattern
  Variant (2)..(2): Xaa in position 2 is any amino acid
  Variant (4)..(5): Xaa in position 4 to 5 is any or no amino acid
  Variant (9)..(10): Xaa in position 9 to 10 is any amino acid
  Variant (11)..(11): Xaa in position 11 is Pro or Ser
  Variant (12)..(12): Xaa in position 12 is Gln or Arg
  Variant (13)..(13): Xaa in position 13 is Ala or Ser
  Variant (14)..(14): Xaa in position 14 is Phe, Trp or Tyr
  Variant (19)..(19): Xaa in position 19 is any amino acid
  Variant (28)..(28): Xaa in position 28 is Asp or Asn
  Variant (29)..(29): Xaa in position 29 is Phe, Leu or Met
  Variant (31)..(31): Xaa in position 31 is Asp or Gln
  Variant (32)..(32): Xaa in position 32 is Ile or Val
  Variant (34)..(34): Xaa in position 34 is Ile or Val
  Variant (35)..(35): Xaa in position 35 is any amino acid
  Variant (36)..(36): Xaa in position 36 is Leu or Val
  Variant (37)..(37): Xaa in position 37 is any amino acid
  Variant (38)..(38): Xaa in position 38 is Ile or Leu
  Variant (39)..(39): Xaa in position 39 is Ile, Leu or Val
  Variant (40)..(40): Xaa in position 40 is Pro or Thr
LXLXXWVPXXXXXXNPSPXKTAELIQAXXAXXGXXXXXXX

SEQ ID NO: 1198 - protein, 60 aa, Artificial sequence
  protein pattern
  Variant (2)..(3): Xaa in position 2 to 3 is any amino acid
  Variant (4)..(5): Xaa in position 4 to 5 is any or no amino acid
  Variant (8)..(8): Xaa in position 8 is any amino acid
  Variant (9)..(10): Xaa in position 9 to 10 is any or no amino acid
  Variant (12)..(14): Xaa in position 12 to 14 is any amino acid
  Variant (16)..(17): Xaa in position 16 to 17 is any amino acid
  Variant (19)..(20): Xaa in position 19 to 20 is any amino acid
  Variant (21)..(21): Xaa in position 21 is Ile or Val
  Variant (23)..(23): Xaa in position 23 is Ala, Asp or Glu
  Variant (24)..(24): Xaa in position 24 is any amino acid
  Variant (25)..(25): Xaa in position 25 is Glu or Gln
  Variant (26)..(26): Xaa in position 26 is Ile or Leu
  Variant (28)..(28): Xaa in position 28 is Ile, Leu or Val
  Variant (29)..(29): Xaa in position 29 is Ile or Leu
  Variant (33)..(33): Xaa in position 33 is any amino acid
  Variant (34)..(34): Xaa in position 34 is Gly or Ser
  Variant (35)..(35): Xaa in position 35 is Leu or Val
  Variant (36)..(36): Xaa in position 36 is His or Arg
  Variant (37)..(37): Xaa in position 37 is Phe, Leu or Met
  Variant (38)..(38): Xaa in position 38 is any amino acid
  Variant (40)..(40): Xaa in position 40 is His or Tyr
  Variant (41)..(41): Xaa in position 41 is Asn or Arg
  Variant (42)..(42): Xaa in position 42 is any amino acid
  Variant (43)..(43): Xaa in position 43 is Asp or Ser
  Variant (44)..(44): Xaa in position 44 is Ile or Leu
  Variant (45)..(45): Xaa in position 45 is any amino acid
  Variant (48)..(48): Xaa in position 48 is any amino acid
  Variant (49)..(49): Xaa in position 49 is Ile or Leu
  Variant (50)..(50): Xaa in position 50 is Asp or Ser
  Variant (54)..(54): Xaa in position 54 is Asn or Ser
  Variant (55)..(55): Xaa in position 55 is any amino acid
  Variant (58)..(58): Xaa in position 58 is Ala or Ser
  Variant (59)..(59): Xaa in position 59 is Gly or Ser
  Variant (60)..(60): Xaa in position 60 is Phe or Val
LXXXXQQXXXRXXXYXXAXXXLXXXXPXXPLAXXXXXXAXXXXXXGLXXXPFGXXSFXXX

SEQ ID NO: 1199 - protein, 14 aa, Artificial sequence
  protein pattern
  Variant (4)..(4): Xaa in position 4 is Ala, Glu, Asn or Gln
  Variant (6)..(6): Xaa in position 6 is Ala or Ser
  Variant (7)..(7): Xaa in position 7 is Lys or Arg
  Variant (8)..(9): Xaa in position 8 to 9 is any amino acid
  Variant (11)..(12): Xaa in position 11 to 12 is any amino acid
  Variant (13)..(13): Xaa in position 13 is Ala or Leu
YNPXKXXXXLXXXG

SEQ ID NO: 1200 - protein, 15 aa, Artificial sequence
  protein pattern
  Variant (2)..(2): Xaa in position 2 is Ala, Glu, Ser or Thr
  Variant (3)..(4): Xaa in position 3 to 4 is any amino acid
  Variant (5)..(5): Xaa in position 5 is Asp or Gly
  Variant (6)..(7): Xaa in position 6 to 7 is any amino acid
  Variant (9)..(9): Xaa in position 9 is any amino acid
  Variant (10)..(10): Xaa in position 10 is Ile or Leu
  Variant (12)..(12): Xaa in position 12 is Gln or Arg
  Variant (13)..(13): Xaa in position 13 is any amino acid
  Variant (15)..(15): Xaa in position 15 is Ile or Val
LXXXXXXEXXDXXPX

SEQ ID NO: 1201 - DNA, 1419 bp, Escherichia coli K12
  CDS (1)..(1419): transl_table=11
atggaaaccaatatcgttgaagtagagaactttgttcagcagtcagaagagaggcggggtagcgcctttacgcaggaagtgaaacgctacctggagcgctacccgaatacgcaatatgttgatgttttacttaccgatttaaatggttgcttccgtggaaagcgtattcctgtttcaagcctgaagaagctcgagaaagggtgttatttcccggcctcggtatttgcaatggatattctgggcaacgtagtagaagaagcaggtctgggtcaggaaatgggcgagccggatcgtacctgtgttcctgttctcggttccttaactccttctgccgccgatccagagtttatcggtcagatgctcctgaccatggtcgatgaagatggcgctccctttgacgttgagccgcggaacgttcttaaccgcctgtggcagcagctgcgccagcgcggattgttcccggtcgtagcggtagagctggagttctatttactggatcgccagcgcgacgctgaagggtatctgcaaccgccctgcgcgcctggcaccgatgaccgcaatacacaaagccaggtttactccgttgataacctcaaccacttcgccgacgtgctcaatgatattgatgaactggcgcagttacagctgattccggcagatggcgcggtcgctgaggcctcgccgggtcagtttgaaatcaacctttaccatactgataacgtgctggaagcctgcgatgatgcgctggcactaaaacgcctggtgcgtctgatggcagaaaagcataagatgcacgccacttttatggcgaagccgtatgaagagcacgcgggcagcggaatgcatatccatatcagtatgcaaaataatcgtggcgagaacgtgctttctgacgcggaaggcgaagattcgccgctgctgaaaaagatgctcgccgggatgattgacctgatgccgtcgtcgatggcgttgctggcaccaaacgtgaactcgtatcgccgcttccagccgggaatgtatgtgccgacgcaggcgtcgtggggccataacaaccgcaccgtcgccctgcgtattccgtgcggcgaccgtcataatcaccgcgtggaatatcgcgtggcgggtgccgatgccaacccatatctggtgatggcagcgatttttgccggtattttgcatggccttgataacgagctgccgttgcaggaagaagtcgaaggcaacgggctggaacaggaaggcttaccctttccgattcgccagagcgatgccctgggtgagtttatcgagaatgatcacctgcgccgctatttaggcgaacgcttctgccatgtctatcacgcctgtaaaaatgatgagctgttgcagtttgagcgcctcatcacagaaacagaaattgagtggatgttgaaaaacgcgtaa

SEQ ID NO: 1202 - protein, 472 aa, Escherichia coli K12
METNIVEVENFVQQSEERRGSAFTQEVKRYLERYPNTQYVDVLLTDLNGCFRGKRIPVSSLKKLEKGCYFPASVFAMDILGNVVEEAGLGQEMGEPDRTCVPVLGSLTPSAADPEFIGQMLLTMVDEDGAPFDVEPRNVLNRLWQQLRQRGLFPVVAVELEFYLLDRQRDAEGYLQPPCAPGTDDRNTQSQVYSVDNLNHFADVLNDIDELAQLQLIPADGAVAEASPGQFEINLYHTDNVLEACDDALALKRLVRLMAEKHKMHATFMAKPYEEHAGSGMHIHISMQNNRGENVLSDAEGEDSPLLKKMLAGMIDLMPSSMALLAPNVNSYRRFQPGMYVPTQASWGHNNRTVALRIPCGDRHNHRVEYRVAGADANPYLVMAAIFAGILHGLDNELPLQEEVEGNGLEQEGLPFPIRQSDALGEFIENDHLRRYLGERFCHVYHACKNDELLQFERLITETEIEWMLKNA

SEQ ID NO: 1203 - DNA, 1476 bp, Pseudomonas aeruginosa
  CDS (1)..(1476)
ccctgtgttgcccggacactcgcgaagaagatgtcgaccgcctgctctccagcctcgacgaggcgctcggcgagctgctcgccatacccggcgcgcgggaggcctgagatgcatttcgccgatccgcgggaagcccgcgagttcctcgccgcacaccccgaggtgcgcagcatcgagctgttcctgatcgacgccaacggcgtgccgcgcggcaagctgctgcatcgcgacgagctgctggcggtctacgaaagcgggcggccgctgccgagcaccatcctcggcctgaccatcaatggcgatgacgtcgaggagaccggcctggtctgggacgtcggcgatgccgattgctggaccttcccgctgcccggcagcctgaccctgcaaccctggcggcagtcaccgaccggccaggtgcaggtaagcatgcatcccgagctcgggctaccggccgcggcgggcgatccccggcatgtgttgcagcgggttatccacagcctgcaggcggagggtttccacccggtgatggcggtggagctggagttctacctgctcgaccgcgaacgcgacagcgacggccggccgttgccggcgttacagatgaatggccagcggccgcgggcgacccaggtctatggcgtctacgagctggagcagttgcagccattcctcgatgacttgtatgccgcctgcgaggcccagggcctgccggcgcgcacggcgatttcggagtacgcgccggggcaggtggaaattaccctgcagcatcgcttcgacacgctccaggcgatcgacgaaggcgtgcgctacaagcgcctggtcaagggcgtggcgaatcgccatgggttgcaggcctgcttcatggccaagccgttcgccgatctttccggcagcggcctgcacctgcacgtcagcctggccgacgccgctggcaacaatctgttcgccagcgaggacccggccgggaccccgctgctgcgccaggccatcggtggaatgaaggcgtgcctgctggagtctttggcgctgttctgtccgaacgccaactcgttccgccgcttccaggcgaacagctacgcgccgctggcgccgacctggggaatcaacaaccgcaccgtgtcgctgcgggttcccggcggcccggcgtccagccggcacatcgagcaccgcatctgcggcgccgacgccaatccctacctggcggcggcggcgttgctcgcggcggtgcgcctgggtattcgcgagcgactcgaccccggtgcgccgatcactggcaacggctacgctcaagccacccaggcgttgccgagcgactggctgaccgcgctgcgcgcgctggagggctcggcctgggcgcgcgaggcgctcggcgaggatttcctgaagatctacctggcgatcaagcaggccgaataccgtgccttcatgggcgaggtcggcgagcaggactggcgctggtatctcaaccaggcctga

SEQ ID NO: 1204 - protein, 491 aa, Pseudomonas aeruginosa
PCVARTLAKKMSTACSPASTRRSASCSPYPARGRPEMHFADPREAREFLAAHPEVRSIELFLIDANGVPRGKLLHRDELLAVYESGRPLPSTILGLTINGDDVEETGLVWDVGDADCWTFPLPGSLTLQPWRQSPTGQVQVSMHPELGLPAAAGDPRHVLQRVIHSLQAEGFHPVMAVELEFYLLDRERDSDGRPLPALQMNGQRPRATQVYGVYELEQLQPFLDDLYAACEAQGLPARTAISEYAPGQVEITLQHRFDTLQAIDEGVRYKRLVKGVANRHGLQACFMAKPFADLSGSGLHLHVSLADAAGNNLFASEDPAGTPLLRQAIGGMKACLLESLALFCPNANSFRRFQANSYAPLAPTWGINNRTVSLRVPGGPASSRHIEHRICGADANPYLAAAALLAAVRLGIRERLDPGAPITGNGYAQATQALPSDWLTALRALEGSAWAREALGEDFLKIYLAIKQAEYRAFMGEVGEQDWRWYLNQA

SEQ ID NO: 1205 - DNA, 1395 bp, Pseudomonas aeruginosa
  CDS (1)..(1395)
caaaaaaggtgttgcatcatgtcggtaccccagcgtgccgttcagctcactgaaccgagcgagttcctcaaggaacatcccgaggtccagttcgtcgacctccttattgcagacatgaatggcgtggttcgcggcaagcggatcgaacgcaacagtctgaacaaagtcttcgaaaaaggtatcaatctccccgcttccctgttcgccctcgatatcaccggctccaccgtagagagtaccggcctgggtctcgacatcggcgacgccgaccggatctgctacccgatccccggcaccctctccatggaaccctggcagaagcgcccgaccgcgcaactgctgatgaccatgcacgaactggaaggcgagccgttcttcgccgacccccgcgaagtcctgcgccaggtggtggccaggttcaccgagatggaactgaccatcgtcgccgccttcgagctggagttctacctgatcgaccaggagaacgtgaacggccggccgcagccgcctcgctcgccgatctccggcaagcgtccgcagtcggtgcaggtgtactccatcgacgacctcgacgaatacgtcgagtgcctccaggacatcatcgacggcgcccgcgcccagggcatcccggccgacgccatcgtcgccgaatccgcaccggcgcagttcgaggtcaacctcaaccacgtcaacgacgccctcaaggcctgcgaccacgcggtgctgctcaagcgcctggtcaagaacatcgcctacgaccacgagatggacaccaccttcatggccaagccctatccgggccaggccgggaacggactgcacgtgcatatctcgctgctcgacaagcatggcaacaacatcttcaccagcgaggatcccgagcagaacgccgcattgcgccatgcgatcggcggtgtgctcgagaccctgccggcctccatggccttcctctgcccgaacgtcaactcctaccgccgcttcggttcgcagttctacgtgccgaacgcgccgagctggggcctggacaaccgcaccgtggccctgcgcgtgcccaccggcagcccggacgcggtacgcctggaacaccgcgtggccggcgccgacgccaacccctacctgctactggcagcggtgctggcaggcgttcatcacgggctgaccaacaaggtcgagccgggcgcgccgatcgaaggcaactcctacgagcagatggagccgagcctgccgaacaacctgcgcgacgccctgcgcgagctggacgaaagcgagatcatggcgaagtacatcgacccgaagtacatcgacatcttcgtcgcctgcaaggaaagcgagctggaggagttcgagcactcgatctccgacctcgagtacaactggtacctgcataccgtctga

SEQ ID NO: 1206 - protein, 464 aa, Pseudomonas aeruginosa
QKRCCIMSVPQRAVQLTEPSEFLKEHPEVQFVDLLIADMNGVVRGKRIERNSLNKVFEKGINLPASLFALDITGSTVESTGLGLDIGDADRICYPIPGTLSMEPWQKRPTAQLLMTMHELEGEPFFADPREVLRQVVARFTEMELTIVAAFELEFYLIDQENVNGRPQPPRSPISGKRPQSVQVYSIDDLDEYVECLQDIIDGARAQGIPADAIVAESAPAQFEVNLNHVNDALKACDHAVLLKRLVKNIAYDHEMDTTFMAKPYPGQAGNGLHVHISLLDKHGNNIFTSEDPEQNAALRHAIGGVLETLPASMAFLCPNVNSYRRFGSQFYVPNAPSWGLDNRTVALRVPTGSPDAVRLEHRVAGADANPYLLLAAVLAGVHHGLTNKVEPGAPIEGNSYEQMEPSLPNNLRDALRELDESEIMAKYIDPKYIDIFVACKESELEEFEHSISDLEYNWYLHTV

SEQ ID NO: 1207 - DNA, 1470 bp, Pseudomonas aeruginosa
  CDS (1)..(1470)
cgaaccccaactatctcgctatcttccaggctttcggtaaggcctgcagcaagagggcggggcaacgttgagtccggctgttggggccggactctcaaccctgaggtctttatgactaccaagttagaccagctgaccagctggctgaaggaacgcaagatcaccgaagtggaatgcctgatttccgatctgacaggcatcgcccgcggcaagatctcgccgaccaacaaattcatcgcggaaaagggcatgcgcctgccggagagcgttctgctgcagaccgtcaccggcgactacgtggaagacgacatttactacgacctgctcgacccggccgacatcgatatggtctgccgcccggacgagaatgccgtgttcctcgtcccctgggccatcgagcccaccgcgatggtgatccacgacaccttcgacaagctcggcaatcccatcgagctgtcgccgcgcaacatcctcaagcgcgtgttgaagatgtatgccgataagggctggcggccgatcgtggcgccagagatggagttctacctgaccaagcgcagcgacgaccccgactatccgttgcaggccccggtgggccgctccggacgccaggaaaccgggcgtcagtcgttctccatcgacgccgccaacgagttcgacccgctgttcgaggacatgtacgactggtgcgaggcccagggccttgacctggatacgctgatccacgaggaaggcaccgcgcagatggagatcaacttccgtcatggcgacgccctcgacctggccgaccagatcctggtgttcaagcgcaccatgcgcgaggccgcgctcaagcacaacgtcgccgcgaccttcatggccaagccgatgaccggcgagccgggcagcgcgatgcacctgcaccagagcatcgtcgacgtgaagaccggcaagaacatcttctccaatgccgacggcaccatgagcgagctgttcctgcaccatatcggcggcctgcagaagttcatcccggaagtgctgccgctgttcgcgcccaacgtgaactcgttccgccgcttcctgcccgatacctcggcgccggtgaacgtcgagtggggcgaagagaaccgtaccgtcggcctgcgcgtgccggactccagcccggagaaccgccgggtcgagaaccgtctcgccggcgccgacgccaacccttacctggcgctggctgccagcctgctgtgcggctacatcggcatggtcgaaggcatcaagccgagcgcccaggtcaaaggtcgcggctatgaacgccgcaacctgcgcctgccgctgacgatcgaagcggcgctggagcgcatggagaactgcaagcccctcgagcagtatctcggcagcaagttcatcagcggctacgtcgcggtgaagcgtgcggagcacgagaatttcaagcgggtaatcagctcctgggagcgggaattcctcctgctttccgtttga

SEQ ID NO: 1208 - protein, 489 aa, Pseudomonas aeruginosa
RTPTISLSSRLSVRPAARGRGNVESGCWGRTLNPEVFMTTKLDQLTSWLKERKITEVECLISDLTGIARGKISPTNKFIAEKGMRLPESVLLQTVTGDYVEDDIYYDLLDPADIDMVCRPDENAVFLVPWAIEPTAMVIHDTFDKLGNPIELSPRNILKRVLKMYADKGWRPIVAPEMEFYLTKRSDDPDYPLQAPVGRSGRQETGRQSFSIDAANEFDPLFEDMYDWCEAQGLDLDTLIHEEGTAQMEINFRHGDALDLADQILVFKRTMREAALKHNVAATFMAKPMTGEPGSAMHLHQSIVDVKTGKNIFSNADGTMSELFLHHIGGLQKFIPEVLPLFAPNVNSFRRFLPDTSAPVNVEWGEENRTVGLRVPDSSPENRRVENRLAGADANPYLALAASLLCGYIGMVEGIKPSAQVKGRGYERRNLRLPLTIEAALERMENCKPLEQYLGSKFISGYVAVKRAEHENFKRVISSWEREFLLLSV

SEQ ID NO: 1209 - protein, 457 aa, Mycobacterium tuberculosis
MTGPGSPPLAWTELERLVAAGDVDTVIVAFTDMQGRLAGKRISGRHFVDDIATRGVECCSYLLAVDVDLNTVPGYAMASWDTGYGDMVMTPDLSTLRLIPWLPGTALVIADLVWADGSEVAVSPRSILRRQLDRLKARGLVADVATELEFIVFDQPYRQAWASGYRGLTPASDYNIDYAILASSRMEPLLRDIRLGMAGAGLRFEAVKGECNMGQQEIGFRYDEALVTCDNHAIYKNGAKEIADQHGKSLTFMAKYDEREGNSCHIHVSLRGTDGSAVFADSNGPHGMSSMFRSFVAGQLATLREFTLCYAPTINSYKRFADSSFAPTALAWGLDNRTCALRVVGHGQNIRVECRVPGGDVNQYLAVAALIAGGLYGIERGLQLPEPCVGNAYQGADVERLPVTLADAAVLFEDSALVREAFGEDVVAHYLNNARVELAAFNAAVTDWERIRGFERL

SEQ ID NO: 1210 - DNA, 1335 bp, Bacillus subtilis
  CDS (1)..(1335)
atggcaaagtacactagagaagatatcgaaaaattagtaaaagaagaaaacgtgaagtatatccgccttcaatttactgacattcttggaacaatcaagaatgttgagattcctgtaagccagcttggaaaagcgcttgataataaagtcatgtttgacggttcttctattgagggattcgttcgtatcgaagagtcagacatgtacctgtatccagatctaaatacatttgttatcttcccatggacagctgaaaaaggtaaagtagcacgtttcatctgtgatatttacaatccggatggcacaccttttgaaggtgacccgcgaaacaacttaaaacggattctgaaagaaatggaagacctcggcttcagtgattttaaccttgggcctgagcctgaattcttcttattcaaattggacgaaaaaggcgagccgacgcttgaactaaacgacaaaggcggatatttcgacttagctccaactgatttaggagaaaactgccgccgcgatatcgtacttgagcttgaagagatgggctttgaaatcgaagcgtctcaccacgaagtagcacctggtcagcacgaaatcgactttaaatatgctggagcagtccgctcttgtgatgacatccaaacatttaaactagttgtcaaaacaattgcccgtaaacacggcctgcatgcgacatttatgccaaaaccattgttcggtgtaaacggttcaggtatgcactgcaatctatcactcttcaaaaatggtgttaacgcattctttgacgaaaacgcagatcttcagttaagtgaaacagcgaagcacttcattgcaggtatcgtgaagcacgcaacaagctttacagcagtaacaaacccgacagtaaactcttacaaacgtcttgttcctggctatgaagcaccttgttatgtagcatggagcgcgcaaaacagaagcccgcttatccgtatcccggcttctcgcggcatcagcacacgtgttgaagtacgcagtgtagacccagctgcaaacccataccttgcacttagcgtattgcttgctgcaggattagacggaatcaaaaacaaactggaagcgccggctccaatcgaccgcaacatctatgtgatgagcaaagaagagcgcatggaaaacggaatcgttgaccttccagcaacacttgcggaagcactagaagaattcaaatcaaacgaagtcatggtcaaagcgctgggcgagcacctattcgaacacttcatcgaagcaaaagaaatcgaatgggatatgttccgcacgcaagtacatccttgggaacgcgaacagtatatgtctcagtattaa

SEQ ID NO: 1211 - protein, 444 aa, Bacillus subtilis
MAKYTREDIEKLVKEENVKYIRLQFTDILGTIKNVEIPVSQLGKALDNKVMFDGSSIEGFVRIEESDMYLYPDLNTFVIFPWTAEKGKVARFICDIYNPDGTPFEGDPRNNLKRILKEMEDLGFSDFNLGPEPEFFLFKLDEKGEPTLELNDKGGYFDLAPTDLGENCRRDIVLELEEMGFEIEASHHEVAPGQHEIDFKYAGAVRSCDDIQTFKLVVKTIARKHGLHATFMPKPLFGVNGSGMHCNLSLFKNGVNAFFDENADLQLSETAKHFIAGIVKHATSFTAVTNPTVNSYKRLVPGYEAPCYVAWSAQNRSPLIRIPASRGISTRVEVRSVDPAANPYLALSVLLAAGLDGIKNKLEAPAPIDRNIYVMSKEERMENGIVDLPATLAEALEEFKSNEVMVKALGEHLFEHFIEAKEIEWDMFRTQVHPWEREQYMSQY

SEQ ID NO: 1212 - DNA, 2352 bp, Bacillus cereus
  CDS (860)..(2194)
atgcatccccgattaattctcacttcactccatatgctaactatatgccggggtatgaagatgatgtaattatggctgcgggaacttttattcaaggtgcaagtattgaattgtcagctgatggtccaattcgtccgccttatgttgcttacgtacaaggtgggctaacttattcgcatgtgaagattgcgatctgttctgcaattgatgcattaattgaaaaagaattattaacaatttcttaaagggaagctgtcgatttcgacagctttttttcgtgtgaaagtaatgatttattgcattagaaaaaagaatgaaaaaacttttaaaaaaatcatgtaagaaaagctaacatctattgacatcaaacataacatggtataaaatgagaagcagttaaggcgaaggaggaactgaaacgatgaaagaagatagacgttctgccccgctgtttcctattggtattgttatggatttaacacaattatctgcacgtcaaattcgctactatgaagagcataatcttgtttctccaacccgtacaaaggggaatcgtagattattttcatttaacgatgtagataagttgttagagattaaagatttattagatcaaggcttgaatatggctggtattaaacaagtgttactaatgaaagaaaatcaaacagaagcagtgaaagtaaaagaagaaacgaaagaaatttcaaaaactgagcttcgcaaaatacttcgagacgaactacaacatacaggtagatttaatcgaacttcattgcgacaaggtgatatttcaaggttttttcactaaagagaactgattctgaaggtgtttagagggactaaggaggaatttataatggctaggtacacaaaagaagatattttccgtttggcgaaagaagagaatgtaaagtatatacgtttacaatttacggaccttttaggagtaattaagaacgtagaaattccagtgagccaattaacaaaagctcttgataacaaaatgatgtttgatggatcttctattgaaggtttcgtacgtattgaagaatctgatatgtacttatatccagacttagatacttgggtgattttcccttggacagctgaaaaaggtaaagtagctcgattgatctgtgatatttacaatgcagatggcactccatttgaaggggatccacgtaacaacttaaaacgtgtattaaaagaaatggaagctttaggattctcagatttcaatcttggaccagagccagaattcttcctattcaaagtagatgaaaaaggaaatccaacattagaattaaacgataacggtggatacttcgaccttgcgccgatggatctaggggaaaactgtcgtcgtgatatcgttcttgaacttgaagaaatgggctttgaaattgaagcgtctcaccatgaggttgctccagggcagcacgaaattgacttcaaatatgcaaatgcaattcgttcatgtgatgacattcaaacattcaaacttgttgtaaaaacaattgctcgtaaacacggtttacacgcaacatttatgccaaaaccattatacggtgtgaacggttcaggtatgcactgtaacttatcactattcaaaaatggtgagaacgtattctatgatcaaaacggtgacttacaattaagtgatgatgctcgtcacttcatcgcaggtattttaaaacacgcaccagcatttacagcggtggcaaacccaactgtaaactcttacaagcgtttagtacctggatacgaagctccttgttacgtagcatggtctgcacaaaaccgtagtccattagtacgtatccctgcatctcgtggtattagtacacgcgtagaagtacgtagtgttgacccagctgcaaacccatatttagtaatggctacattattagcagcaggtcttgatggaattaaaaacaaattaactccaccagctgcagtagatcgtaacatctacgtaatgacaaaagaagagcgcgaagaagcaggtatcgttgacttaccagcaacattagcgcaagctttagttacattacaatctaacgaagtaattagtaacgcattaggagatcacttacttgagcacttcatcgaagcgaaagaatttgagtgggatatcttccgtacgcaagttcaccaatgggaacgcgatcaatatatgtctctttactaagaggtgaggtgaggagccctgatactacggtatcagggcttttttatttgttggcaatataggtgttagttgaaatgaattgaatagatgtctgaaaaaattatgacggtatttaaatttctattccatatctttaatgtaacgtggtgaaattcgaa

SEQ ID NO: 1213 - protein, 444 aa, Bacillus cereus
MARYTKEDIFRLAKEENVKYIRLQFTDLLGVIKNVEIPVSQLTKALDNKMMFDGSSIEGFVRIEESDMYLYPDLDTWVIFPWTAEKGKVARLICDIYNADGTPFEGDPRNNLKRVLKEMEALGFSDFNLGPEPEFFLFKVDEKGNPTLELNDNGGYFDLAPMDLGENCRRDIVLELEEMGFEIEASHHEVAPGQHEIDFKYANAIRSCDDIQTFKLVVKTIARKHGLHATFMPKPLYGVNGSGMHCNLSLFKNGENVFYDQNGDLQLSDDARHFIAGILKHAPAFTAVANPTVNSYKRLVPGYEAPCYVAWSAQNRSPLVRIPASRGISTRVEVRSVDPAANPYLVMATLLAAGLDGIKNKLTPPAAVDRNIYVMTKEEREEAGIVDLPATLAQALVTLQSNEVISNALGDHLLEHFIEAKEFEWDIFRTQVHQWERDQYMSLY

SEQ ID NO: 1214 - DNA, 1401 bp, Mesorhizobium loti MAFF303099
  CDS (1)..(1401): transl_table=11
atggacaatgccatcgtgacctccccttcggggtcctcgcccgccgaggcgcaagcctttctcgacgcccatcccgagatcgaagccttcgatatcgtgctgaccgacgccaatggcgtgggccgcggcaagatcgtacgccggcatgagctgaagagcattttcgagggtggccggcatatgccgatctcgatcctcggcctcgacattaccggcgaggacgtgcacgagaccggactgatctggacgacaggcgacggcgacctccgggcatggccaatccccggcacgctggtgccgctctacggcaccaatccaccgcgtggccaggtgctgatggcgatgtatcatctcgacggccagcccatgtcgtcggacccgcgcctcgcgctcgcccggcaggtcgacatcctcgcggccaaggggctttacccggcgggcgccttcgaactggaattcttcctgctggccaacgagcgcgacgccgacggcaaggtgcagccggcgcgcgcggtgctcgatggccgcgtttcgggcaagacggaggtctattcagtcgaccatctgcacggcatggagccgctgttctccgacatttacgccgccgccaaggcgcaaggcattccggccgagacggtgatatcggaatatgcgcccggccagtacgagctgacgctgaactaccgcaaggatgtgatgcgggccgccgacgacctcgtcatgctgaagcggctggtgcgggcgcaggcgcgccgccatggcgtcaccgcctgcttcatggccaagccgatcgagaaatatgccggctcgggcatgcatttccacgtctcgctgcaggacaaagccggccgcaacgtctttgccgaagccggcggcgagagctggtcgctacccttgctgcaggggctcggcgggctgatccagacgatggcggaatcaatgctggtgtttgcgccgcacgccaattcctggcggcgattcgtctcgcaatcctatgcgccggtggcgccaacctggggcgtcaacaatcgctcggtggcgctgcgcgtgccggcgggcgacgccaagaaccggcgcatcgagcaccggccgtcgggcgtcgacgccaatccctacctgatcgccgcgacggtgctggccggcatcgtcaaaggcctcgacgaagggctcgatcctggtccagaaacgaccggcaatggctatgaggcggccgtcacccgcacgacgatgccggcggactggcgcgcggcgatcgaagcggccaaggcctccagcttcctcaaaggcgcgctgggcgaggatttgcaccgcaccttcgtggcgatcaaacagtccgaatatctgcgtgtggcgcgcaccgtcagcgaactggattatcatctctatttgcacgaggtgtga

SEQ ID NO: 1215 - protein, 466 aa, Mesorhizobium loti MAFF303099
MDNAIVTSPSGSSPAEAQAFLDAHPEIEAFDIVLTDANGVGRGKIVRRHELKSIFEGGRHMPISILGLDITGEDVHETGLIWTTGDGDLRAWPIPGTLVPLYGTNPPRGQVLMAMYHLDGQPMSSDPRLALARQVDILAAKGLYPAGAFELEFFLLANERDADGKVQPARAVLDGRVSGKTEVYSVDHLHGMEPLFSDIYAAAKAQGIPAETVISEYAPGQYELTLNYRKDVMRAADDLVMLKRLVRAQARRHGVTACFMAKPIEKYAGSGMHFHVSLQDKAGRNVFAEAGGESWSLPLLQGLGGLIQTMAESMLVFAPHANSWRRFVSQSYAPVAPTWGVNNRSVALRVPAGDAKNRRIEHRPSGVDANPYLIAATVLAGIVKGLDEGLDPGPETTGNGYEAAVTRTTMPADWRAAIEAAKASSFLKGALGEDLHRTFVAIKQSEYLRVARTVSELDYHLYLHEV

SEQ ID NO: 1216 - DNA, 1356 bp, Mesorhizobium loti MAFF303099
  CDS (1)..(1356): transl_table=11
ttgagcgatgcaattgcggacgttctgagctggcttgaaagcagaagcgacatacagagtctgagggcggcggtgtgcgacctcaacggcgtcatgcggggaaaacgcatacccgtggagcaggcccgcaaggcgctggaaggcaagctgcgcatgccctattcgctgatcgggctcgacatctggggcgaggacatcgaaggcaacagcctggttttctcgaccggcgatgccgatgggctctgccaatggacgggacgcggcatcctgccggtggactggacggcgcatccgacggcactcgttccgctctggctcgccgacgaaagcggcgcgccctatctcggcgacccccggcgggcgctggcccgcatcctcgaccgctacaaggcgctcggcctgaccccggtcgcggcgacggaactcgaattctatctggtcgatccgcaatcgcagcggccggtcgggccggtgtcaccggtcaccgggcggcgtctcgattccgacgcggcgctgtcgatcgacgagatcgacgatttcgaggccttcatccacgacgtctatgaagcctgtcgggcgcaaggcattcccgtcgacacggcgattgccgaaaacggcgtcggccagttcgagatcaatctgaaccatgtcgccgacgccctgcgggcggccgacgacgcggtgctgttcaagcgcacggtgaagggcattgcccgcaagcacggctttgccgcctgcttcatggccaaaccctatggcgaccgggccggcaacggttttcacgtccatttcagtctggtcgacgccgaaggccgcaacgtgttcgacgatggtaccgatcagggctcgcaaaccatgcgccacgcggtcggcgggctgctggcggcgatggccgagagcacgctggtgtttgcgccgcacttcaattcctaccgcaggcttcgcccgcgctcctatgcgccgaccgcggtcgcctggggctacgagaaccgcatggtggcgatccgcattcccggcggtccggccggggcgcgccggatcgagcatcgcgtgtcgggcgctgacgccaatccctatctggtgcttgccgccattttgggcgccgcgctgatcggcatcgaaaggcagatgtcgccgggcgagccgaccgggagcgacgggcaaggtgcagtaccagccaagctgccgccggactgggcatccgcgatcgccaccttcgaaagcggcacgcatgtggcggagattttcccagcgatcctgcgcgactccttcgtcgcctgcaaacgccaggagttgaacaccttcgcgctcaatgtcagcgatttcgagatcgagacctatctcgaaagcgtctga

SEQ ID NO: 1217 - protein, 451 aa, Mesorhizobium loti MAFF303099
MSDAIADVLSWLESRSDIQSLRAAVCDLNGVMRGKRIPVEQARKALEGKLRMPYSLIGLDIWGEDIEGNSLVFSTGDADGLCQWTGRGILPVDWTAHPTALVPLWLADESGAPYLGDPRRALARILDRYKALGLTPVAATELEFYLVDPQSQRPVGPVSPVTGRRLDSDAALSIDEIDDFEAFIHDVYEACRAQGIPVDTAIAENGVGQFEINLNHVADALRAADDAVLFKRTVKGIARKHGFAACFMAKPYGDRAGNGFHVHFSLVDAEGRNVFDDGTDQGSQTMRHAVGGLLAAMAESTLVFAPHFNSYRRLRPRSYAPTAVAWGYENRMVAIRIPGGPAGARRIEHRVSGADANPYLVLAAILGAALIGIERQMSPGEPTGSDGQGAVPAKLPPDWASAIATFESGTHVAEIFPAILRDSFVACKRQELNTFALNVSDFEIETYLESV

SEQ ID NO: 1218 - DNA, 1377 bp, Pseudomonas aeruginosa PAO1
  CDS (1)..(1377): transl_table=11
atgtcggtaccccagcgtgccgttcagctcactgaaccgagcgagttcctcaaggaacatcccgaggtccagttcgtcgacctccttattgcagacatgaatggcgtggttcgcggcaagcggatcgaacgcaacagtctgaacaaagtcttcgaaaaaggtatcaaccttcccgcttccctgttcgccctcgatatcaccggctccaccgtagagagtaccggcctgggtctcgacatcggcgacgccgaccggatctgctacccgatccccggcaccctctccatggaaccctggcagaagcgcccgaccgcgcaactgctgatgaccatgcacgaactggaaggcgagccgttcttcgccgacccccgcgaagtcctgcgccaggtggtggccaggttcaccgagatggaactgaccatcgtcgccgccttcgagctggagttctacctgatcgaccaggagaacgtgaacggccggccgcaaccgccgcgctcgccgatctccggcaaacgtccgcagtcggtgcaggtgtactccatcgacgacctcgacgaatacgtcgagtgcctccaggacatcatcgacggcgcccgcgcccagggcatcccggccgacgccatcgtcgccgaatccgcaccggcgcagttcgaggtcaacctcaaccacgtcaacgacgccctcaaggcctgcgaccacgcggtgctgctcaagcgcctggtcaagaacatcgcctacgaccacgagatggacaccaccttcatggccaagccctatccgggccaggccgggaacggactgcacgtgcatatctcgctgctcgacaagcatggcaacaacatcttcaccagcgaggatcccgagcagaacgccgcattgcgccatgcgatcggcggtgtgctcgagaccctgccggcctccatggccttcctctgcccgaacgtcaactcctaccgccgcttcggttcgcagttctacgtgccgaacgcgccgagctggggcctggacaaccgcaccgtggccctgcgcgtgcccaccggcagcccggacgcggtacgcctggaacaccgcgtggccggcgccgacgccaacccctacctgctactggcagcggtgctggcaggcgttcatcacgggctgaccaacaaggtcgagccgggcgcgccgatcgaaggcaactcctacgagcagatggagccgagcctgccgaacaacctgcgcgacgccctgcgcgagctggacgaaagcgagatcatggcgaagtacatcgacccgaagtacatcgacatcttcgtcgcctgcaaggaaagcgagctggaggagttcgagcactcgatctccgacctcgagtacaactggtacctgcataccgtctga

SEQ ID NO: 1219 - protein, 458 aa, Pseudomonas aeruginosa PAO1
MSVPQRAVQLTEPSEFLKEHPEVQFVDLLIADMNGVVRGKRIERNSLNKVFEKGINLPASLFALDITGSTVESTGLGLDIGDADRICYPIPGTLSMEPWQKRPTAQLLMTMHELEGEPFFADPREVLRQVVARFTEMELTIVAAFELEFYLIDQENVNGRPQPPRSPISGKRPQSVQVYSIDDLDEYVECLQDIIDGARAQGIPADAIVAESAPAQFEVNLNHVNDALKACDHAVLLKRLVKNIAYDHEMDTTFMAKPYPGQAGNGLHVHISLLDKHGNNIFTSEDPEQNAALRHAIGGVLETLPASMAFLCPNVNSYRRFGSQFYVPNAPSWGLDNRTVALRVPTGSPDAVRLEHRVAGADANPYLLLAAVLAGVHHGLTNKVEPGAPIEGNSYEQMEPSLPNNLRDALRELDESEIMAKYIDPKYIDIFVACKESELEEFEHSISDLEYNWYLHTV

SEQ ID NO: 1220 - DNA, 1365 bp, Pseudomonas aeruginosa PAO1
  CDS (1)..(1365): transl_table=11
atgaacttcgcctgcgaacaagaagcccaggatttcctggccgccaaccccgacatcgaactcttcgaactgttcattctcgacgccaacggcgtgccgcgcggcaagctgctgcaccgcgacgagctgctggccgtctaccgcagcggccggccgctgccgagcaccatcctcgggctgacgatgaacggcgaggacgtcgaggactccggcctggtctgggacgtcggcgacatcgactgccgcgcctaccccctgtccggcagcctggtgcgcctgccctggcgacagatcccgacggcggcggtgcaggtcagcatgcacccgagcgagggcctgcccgccagcgtcgccgatccgcggcacctcctggtgcgaaccatcgacgcgctgaagagcgagggctatcacccggtgatggccgccgagctggagttttacctgctcgaccgtgagcgcgacgccaacggccgcccgcaaccggcccgcgacgccgatggcggccgcccacgggcgacccaggtctacggcctgcgcgaactggagcagatcgagccgttcctcgccgacctctatgccgcctgcaaggcgcagggcctgccggcacgcacggcgatctcggaatatgccccgggccaggtggaaatcaccctcgaccacggcgacgccctcgccgccatggaccaggcgatccgctacaagcgcctggtcaagggcatcgcgcacaagcacgggatgctcgcctgcttcatggccaagccgttcgacgacctggccggcactggcatgcacctgcacgtcagcctggccgacgaacaaggccacaacctgttcgccagcgacgaccccgccggcacgccgttgctgcgccaggcggtcggcggcatgctcgccagcctgctcgactcgctcctgctgttctgtcccaacgccaactcctaccggcgcttccaggccaacagctacgcgccgctggcgcagacctggggcgtcgacaaccgcaccgtgagcctgcgcgtgccgggcggcccggcctccagtcggcatatcgagcaccgcatctgcggcgccgacgccaacccctacctggccgccgcggcgctcctcgccggggtccaccgcggcatccgcgaaggcatcgatccgggtgcgccggtggagggcaacggctacgcccaggccggcaagcgcctgcccaccgactggctgaccgccctcgataccctgcaaggctccgagtgggcgcgggaagccttcggcgagccgttcctcggcgtctacctggcggtgaagcgcgcggaataccggcaattcatgggcgaggtcggcgagcaggactggcgctggtacctgacccaggcctga

SEQ ID NO: 1221 - protein, 454 aa, Pseudomonas aeruginosa PAO1
MNFACEQEAQDFLAANPDIELFELFILDANGVPRGKLLHRDELLAVYRSGRPLPSTILGLTMNGEDVEDSGLVWDVGDIDCRAYPLSGSLVRLPWRQIPTAAVQVSMHPSEGLPASVADPRHLLVRTIDALKSEGYHPVMAAELEFYLLDRERDANGRPQPARDADGGRPRATQVYGLRELEQIEPFLADLYAACKAQGLPARTAISEYAPGQVEITLDHGDALAAMDQAIRYKRLVKGIAHKHGMLACFMAKPFDDLAGTGMHLHVSLADEQGHNLFASDDPAGTPLLRQAVGGMLASLLDSLLLFCPNANSYRRFQANSYAPLAQTWGVDNRTVSLRVPGGPASSRHIEHRICGADANPYLAAAALLAGVHRGIREGIDPGAPVEGNGYAQAGKRLPTDWLTALDTLQGSEWAREAFGEPFLGVYLAVKRAEYRQFMGEVGEQDWRWYLTQA

SEQ ID NO: 1222 - DNA, 1377 bp, Pseudomonas aeruginosa PAO1
  CDS (1)..(1377): transl_table=11
atgtcggtacccctgcgtgccgttcagctcactgagccgagcctgttccttcaggaacatcccgaggtccagttcgtcgaccttctgatttcagacatgaatggcgtggttcgcggcaagcgaatcgaacgcaacagtctgcccaaagtcttcgaaaaaggtatcaaccttcccgcttccctgttcgccctcgatatcaccggctccaccgtagagagtaccggcctgggtctcgacatcggcgacgccgaccggatctgctacccgatccccggcaccctctccatggaaccctggcagaagcgcccgaccgcgcaactgctgatgaccatgcacgaactggaaggcgagccgttcttcgccgacccccgcgaagtcctgcgccaggtggtggccaggttcaccgagatggaactgaccatcgtcgccgccttcgagctggagttctacctgatcgaccaggagaacgtgaacggccggccgcagccgccgcgctcgccgatctccggcaagcgtccgcagtcggtgcaggtgtactccatcgacgacctcgacgaatacgtcgagtgcctccaggacatcatcgacggcgcccgcgcccagggcatcccggccgacgccatcgtcgccgaatccgcaccggcgcagttcgaggtcaacctgcatcacgtcgccgacccgatgaaggcctgcgactatgcggtgctgctcaagcgcctgatcaagaacatcgcctacgaccatgagatggacaccaccttcatggccaagccctatccgggccaggccgggaacggactgcacgtgcatatctcgctgctcgacaagcacggcaacaacatcttcaccagcgaggatcccgagcagaacgccgcattgcgccatgcgatcggcggcgtgctcgagaccctgccggcctccatggccttcctctgcccgaacgtcaactcctaccgccgcttcggttcgcagttctacgtgccgaacgcgccgagctggggcctggacaaccgcaccgtggccctgcgcgtgcccaccggcagcccggacgcggtacgcctggaacatcgcgtcgccggcgccgacgccaacccctacctgctgctggcctcggtgcttgccggggtgcaccacgggctgaccaacaaggtcgagccgggcgcgccgatcgaaggcaactcctacgagcagttggagccgagcctgccgaacaacctgcgcgacgccctgcgcgaactggacgacagcgagatcctggcgaagtacatcgatccgaagtacatcgacatcttcgtcgcctgcaaggaaagcgagctggaggagttcgagtactcgatctccgacctcgagtacaactggtacctgcacaccgtgtga

SEQ ID NO: 1223 - protein, 458 aa, Pseudomonas aeruginosa PAO1
MSVPLRAVQLTEPSLFLQEHPEVQFVDLLISDMNGVVRGKRIERNSLPKVFEKGINLPASLFALDITGSTVESTGLGLDIGDADRICYPIPGTLSMEPWQKRPTAQLLMTMHELEGEPFFADPREVLRQVVARFTEMELTIVAAFELEFYLIDQENVNGRPQPPRSPISGKRPQSVQVYSIDDLDEYVECLQDIIDGARAQGIPADAIVAESAPAQFEVNLHHVADPMKACDYAVLLKRLIKNIAYDHEMDTTFMAKPYPGQAGNGLHVHISLLDKHGNNIFTSEDPEQNAALRHAIGGVLETLPASMAFLCPNVNSYRRFGSQFYVPNAPSWGLDNRTVALRVPTGSPDAVRLEHRVAGADANPYLLLASVLAGVHHGLTNKVEPGAPIEGNSYEQLEPSLPNNLRDALRELDDSEILAKYIDPKYIDIFVACKESELEEFEYSISDLEYNWYLHTV

SEQ ID NO: 1224 - DNA, 1368 bp, Pseudomonas aeruginosa PAO1
  CDS (1)..(1368): transl_table=11
atgcatttcgccgatccgcgggaagcccgcgagttcctcgccgcacaccccgaggtgcgcagcatcgagctgttcctgatcgacgccaacggcgtgccgcgcggcaagctgctgcatcgcgacgagctgctggcggtctacgaaagcgggcggccgctgccgagcaccatcctcggcctgaccatcaatggcgatgacgtcgaggagaccggcctggtctgggacgtcggcgatgccgattgctggaccttcccgctgcccggcagcctgaccctgcaaccctggcggcagtcaccgaccggccaggtgcaggtaagcatgcatcccgagctcgggctaccggccgcggcgggcgatccccggcatgtgttgcagcgggttatccacagcctgcaggcggagggtttccacccggtgatggcggtggagctggagttctacctgctcgaccgcgaacgcgacagcgacggccggccgttgccggcgttacagatgaatggccagcggccgcgggcgacccaggtctatggcgtctacgagctggagcagttgcagccattcctcgatgacttgtatgccgcctgcgaggcccagggcctgccggcgcgcacggcgatttcggagtacgcgccggggcaggtggaaattaccctgcagcatcgcttcgacacgctccaggcgatcgacgaaggcgtgcgctacaagcgcctggtcaagggcgtggcgaatcgccatgggttgcaggcctgcttcatggccaagccgttcgccgatctttccggcagcggcctgcacctgcacgtcagcctggccgacgccgctggcaacaatctgttcgccagcgaggacccggccgggaccccgctgctgcgccaggccatcggtggaatgaaggcgtgcctgctggagtctttggcgctgttctgtccgaacgccaactcgttccgccgcttccaggcgaacagctacgcgccgctggcgccgacctggggaatcaacaaccgcaccgtgtcgctgcgggttcccggcggcccggcgtccagccggcacatcgagcaccgcatctgcggcgccgacgccaatccctacctggcggcggcggcgttgctcgcggcggtgcgcctgggtattcgcgagcgactcgaccccggtgcgccgatcactggcaacggctacgctcaagccacccaggcgttgccgagcgactggctgaccgcgctgcgcgcgctggagggctcggcctgggcgcgcgaggcgctcggcgaggatttcctgaagatctacctggcgatcaagcaggccgaataccgtgccttcatgggcgaggtcggcgagcaggactggcgctggtatctcaaccaggcctga

SEQ ID NO: 1225 - protein, 455 aa, Pseudomonas aeruginosa PAO1
MHFADPREAREFLAAHPEVRSIELFLIDANGVPRGKLLHRDELLAVYESGRPLPSTILGLTINGDDVEETGLVWDVGDADCWTFPLPGSLTLQPWRQSPTGQVQVSMHPELGLPAAAGDPRHVLQRVIHSLQAEGFHPVMAVELEFYLLDRERDSDGRPLPALQMNGQRPRATQVYGVYELEQLQPFLDDLYAACEAQGLPARTAISEYAPGQVEITLQHRFDTLQAIDEGVRYKRLVKGVANRHGLQACFMAKPFADLSGSGLHLHVSLADAAGNNLFASEDPAGTPLLRQAIGGMKACLLESLALFCPNANSFRRFQANSYAPLAPTWGINNRTVSLRVPGGPASSRHIEHRICGADANPYLAAAALLAAVRLGIRERLDPGAPITGNGYAQATQALPSDWLTALRALEGSAWAREALGEDFLKIYLAIKQAEYRAFMGEVGEQDWRWYLNQA

SEQ ID NO: 1226 - DNA, 1497 bp, Escherichia coli O157:H7 EDL933
  CDS (1)..(1497): transl_table=11
ttgcatacagattcgaatggtggtcattatattttacgctttgataacgagcggaaaacaaaccaaaggcgaagaatcatggaaaccaatatcgttgaagtagagaactttgttcagcagtcagaagagaggcggggtagcgcctttacgcaggaagtgaaacgctacctggagcgctacccgaatacgcaatatgttgatgttttacttaccgatttgaatggttgcttccgtggaaaacgtattcctgtttcaagcctgaagaagctcgagaaagggtgttatttcccggcctcggtatttgcaatggatattctgggcaacgtagtagaagaagcaggtctgggtcaggaaatgggcgagccggatcgtacctgtgttcctgttctcggttccttaaccccttctgccgccgatccagagtttatcggtcagatgctcctgaccatggtcgatgaagatggcgctccctttgacgttgagccgcggaacgttcttaaccgcctgtggcagcagctgcgccagcgcggattgttcccggtcgtagcggtagagctggagttctatttactggatcgccagcgcgacgctgaagggtatctgcaaccgccctgcgcgcccggcactgatgaccgcaatacacaaagccaggtttactccgttgataacctcaaccacttcgccgacgtgctcaatgatattgatgaactggcgcagttacagctgattccggcagatggcgcggtcgctgaggcctcgccgggtcagtttgaaatcaacctttaccatactgataacgtgctggaagcctgcgatgatgcgctggcactaaaacgcctggtgcgtctgatggcagaaaagcataagatgcacgccacttttatggcgaagccgtatgaagagcacgcgggcagcggaatgcatatccatatcagtatgcaaaataatcgtggcgagaacgtgctttctgacacagaaggcgaagattcgccgctgctgaaaaagatgctcgccgggatgattgacctgatgccgtcatcaatggcgttgctggcaccaaacgtgaactcgtatcgccgcttccagccggggatgtatgtaccgacgcaggcgtcgtggggccataataaccgtaccgtcgccctgcgtattccatgcggcgatcgtcataatcaccgcgtggaatatcgcgtggcgggtgccgatgccaacccatatctggtgatggcagcgatttttgccggtattttgcatggccttgataacgagctgccgttgcaggaagaagtcgaaggtaacgggctggaacaggaaggcttacccttcccgattcgccagagcgatgccctgggtgagtttatcgagaatgatcacctgcgccgctatttaggcgaacggttttgccatgtgtatcacgcctgtaaaaatgatgagctgttgcagtttgagcgcctcatcacagaaacagaaattgagtggatgttgaaaaacgcatag

SEQ ID NO: 1227 - protein, 498 aa, Escherichia coli O157:H7 EDL933
MHTDSNGGHYILRFDNERKTNQRRRIMETNIVEVENFVQQSEERRGSAFTQEVKRYLERYPNTQYVDVLLTDLNGCFRGKRIPVSSLKKLEKGCYFPASVFAMDILGNVVEEAGLGQEMGEPDRTCVPVLGSLTPSAADPEFIGQMLLTMVDEDGAPFDVEPRNVLNRLWQQLRQRGLFPVVAVELEFYLLDRQRDAEGYLQPPCAPGTDDRNTQSQVYSVDNLNHFADVLNDIDELAQLQLIPADGAVAEASPGQFEINLYHTDNVLEACDDALALKRLVRLMAEKHKMHATFMAKPYEEHAGSGMHIHISMQNNRGENVLSDTEGEDSPLLKKMLAGMIDLMPSSMALLAPNVNSYRRFQPGMYVPTQASWGHNNRTVALRIPCGDRHNHRVEYRVAGADANPYLVMAAIFAGILHGLDNELPLQEEVEGNGLEQEGLPFPIRQSDALGEFIENDHLRRYLGERFCHVYHACKNDELLQFERLITETEIEWMLKNA

SEQ ID NO: 1228 - DNA, 1359 bp, Agrobacterium tumefaciens str. C58
  CDS (1)..(1359): transl_table=11
atgtatgatattgaaaacgcaaagaaatttttcgctgataatcccgatatcgaaattctcgaagctttcgtcatagatgcgaacggcgttccgcgcggtaaatggattccgcgtgagagagcaattgacgtgcttgaaaagggaatggcgatcccgcgatccgtttatgcgctggatatctggggccgggatgtgcacgccgcaggtctcgccgaaggcacgggtgatcctgatggtttttgtttccccgttcccggtacgctgtcacgggtaacatggcttggccggccgacggcgcaggttctgctggcgatgaaaaacgcggatgggaccggattttatggtgatccgcgccatgttctgtcgcaggttctgaacgcctataaaaaggctggcctcacgccggtcgtggcgaccgaactggaattctacctcatcgatcccgtccgctcggcgcttgacccggtgcgcccgccgcacagccgcgaaggtcgctggcacaccggccagacgcaggttctatcgatttccgaattgcaggatttcgaggatgtcttccatgatatcgcgacagcctgccgcgcccagggtgtgcttgcagatacgacgctgcgggaaaatggccccgggcaatatgagatcaacctcaaccacgtgccggatgccctgcaggccgccgattttgccgtcttcctgaaacgcatcgtcaaaggtgtggcgcgacggcacgaactcgacgccaccttcatggccaagccctatgggctgcaggccggcaacggcatgcatgtgcatttttccgttctcgacagggacggcaggaatatctacgccggggaaaacggtccgtcggatgcgctgatgcactcggtcggcggcctgttggaaaacatgggggagagcatggcgatcttcgctccccatgccaattcctatcgccgcctcaccccaagcgaacacgcgccgacctacgcttcgtggggtatcgacaaccgctcggcggcggtccgcgtcatcgtggccagcaaggcggcaacccgcatcgaacaccgcgtcgccggcgccgacaccaatccctacctggtcctcgcgatgatcctcagcgccgctatcgccggcatgaaggagaagcgccagcccggcggcgcgattgccggtgacagccacgcgatcaatcacgaaccgcttcccaccaactgggactatgcattgcagcgcttcacgcgttcgagctttgcctatgcgacgctcggccagaagtaccgcacgctgttttccgcctgcaagcagcaggagctttccgaattttccctgcgtgtaaccgacgtcgaatatgacgcctatatcaggacggtgtga

SEQ ID NO: 1229 - protein, 452 aa, Agrobacterium tumefaciens str. C58
MYDIENAKKFFADNPDIEILEAFVIDANGVPRGKWIPRERAIDVLEKGMAIPRSVYALDIWGRDVHAAGLAEGTGDPDGFCFPVPGTLSRVTWLGRPTAQVLLAMKNADGTGFYGDPRHVLSQVLNAYKKAGLTPVVATELEFYLIDPVRSALDPVRPPHSREGRWHTGQTQVLSISELQDFEDVFHDIATACRAQGVLADTTLRENGPGQYEINLNHVPDALQAADFAVFLKRIVKGVARRHELDATFMAKPYGLQAGNGMHVHFSVLDRDGRNIYAGENGPSDALMHSVGGLLENMGESMAIFAPHANSYRRLTPSEHAPTYASWGIDNRSAAVRVIVASKAATRIEHRVAGADTNPYLVLAMILSAAIAGMKEKRQPGGAIAGDSHAINHEPLPTNWDYALQRFTRSSFAYATLGQKYRTLFSACKQQELSEFSLRVTDVEYDAYIRTV

SEQ ID NO: 1230 - DNA, 1368 bp, Sinorhizobium meliloti 1021
  CDS (1)..(1368): transl_table=11
atgtcaatcgatgcggacgaccccgaagtgttccagtcctggcttgagcagaacggcccgatagaaagtatccaggcggtgatctgcgacctgaacggcatcatgcgcggcaagcgggtgccggtggaacaggccaggaaggtgctcggcggcggcatccgcatgccgctctcgatcgtcggcgtcgacgtctggggtgaggacatcatcggcagcgcgcaggtctttgcgaccggcgatcgcgacggcatctgcggcgtcacgggacgaggggccctgccggtcaactggacgtcgcggccgagcgcgctggttccgctctggctgttcgtcgagaacggcagaccgtttcttgccgatccgcgccaggcgctagcggcgatcatgcgcgaatatcgcgaactggggctgcgcccggtggtggcgacggagctggaattctatctcatcgatcccgagccggacagcgccgtcccgccgatctcgccctataccggcaagcggctcgattccgacgcgatcctttcgatcgacgagctcgacgatttcggcgaattcttctccgacgtctacagggagtgcgcgcggcagaacgtgccggccgatgcggcgatcgccgaaaacggcatcggccagttcgagatcaatctgctgcacagcgacgatccgctgaaggcggcggacgacgcgatcttcttcaagcgcatcgtcaagggggtcgcccgcaagcacgggctcgcggcgacattcatggccaaaccctacggcacccgttccggcaacggcatgcacgtccatttcagcctgctcgacgaggaaggcaacaacgtcttcgacgacggcagcgacgagggatcggccgtgctcaagcatgcggtggccggcctcctgcgcggcatggccgagacgacgctgatgttcgccccgcacttcaattcctaccggcggctgcggcccgacacgcatgcgccgacctcgatttcctggggttacgagaaccgcacctcggcaatccgcatcccgggcggcaatccggcggcgcggcggatcgagcaccgcgttgcgggcgccgacgccaatccctatctcgtcatcgccgcgatcctcggcgccgcgctcgtcggcatccgcaacaagtggaagccgccggtgcctgtcgagggacgagcctatgcggcggagaaactgcccaaaatacctgccgattgggggcaggcggtcgacgccttcgaggccggaccgatcgccgccgagatcttcgatcccgtgcttcgctccatgctgatcgcctgcaagcgccaggagatagccggcttcgccgagcaggtcacggattacgaattcagcgcctacctggaaatcgtatga

SEQ ID NO: 1231 - protein, 455 aa, Sinorhizobium meliloti 1021
MSIDADDPEVFQSWLEQNGPIESIQAVICDLNGIMRGKRVPVEQARKVLGGGIRMPLSIVGVDVWGEDIIGSAQVFATGDRDGICGVTGRGALPVNWTSRPSALVPLWLFVENGRPFLADPRQALAAIMREYRELGLRPVVATELEFYLIDPEPDSAVPPISPYTGKRLDSDAILSIDELDDFGEFFSDVYRECARQNVPADAAIAENGIGQFEINLLHSDDPLKAADDAIFFKRIVKGVARKHGLAATFMAKPYGTRSGNGMHVHFSLLDEEGNNVFDDGSDEGSAVLKHAVAGLLRGMAETTLMFAPHFNSYRRLRPDTHAPTSISWGYENRTSAIRIPGGNPAARRIEHRVAGADANPYLVIAAILGAALVGIRNKWKPPVPVEGRAYAAEKLPKIPADWGQAVDAFEAGPIAAEIFDPVLRSMLIACKRQEIAGFAEQVTDYEFSAYLEIV

SEQ ID NO: 1232 - DNA, 1383 bp, Caulobacter crescentus CB15
  CDS (1)..(1383): transl_table=11
atgatgagcgctgtagccgacatccaggagtgccgcgacttcctcgccgcccatccgcaggtcaagttcgtcgaggtgttcttcaccagcatgaccggcgtgccgcgcggcaagcggttgcgagtgcatgagttggaggccatctacgagtacggccggttcctgcccgggtcggtgctggtggtcgacaccaacggcgccgactgtgaagacacgggcctggtctgggaagacggcgacgccgatcgccgcgcgcgacctgtgccgggaaccctgaccctggcgccgtggctgggccccgacgtcgcccaggtcatgctgtcgctgtacgagctggacgggacgcccaatgatttggatccccgccatgtgctgcagcgggttctggaccgctacgccgccgatggcctgacgccggtcgcggcctgcgagctggagtactatctcgttgacttgcagcgcgggccgaacggcgagctgctgcccgccaagtcgctgcagaccggtctgcggccgaccggcatccaggtctatggcctgccggaactggaggcccacgccccgttcctgcgcgagctgtgggacgtggccgacacgctgggcgtgccgctggaaggcgcgatctcggagttcgccccggcccaggtggagctgaccctcaagcacaagcccgacgccctgcgcgccgccgacgacgcggtgctctacaagcgcgcggccaagggcgtggccctgcgtcacgggatggaggccacgttcatggccaagccgtggagcgaccgggccggcaacggcttccacgtccatctcagcgtcaatgacgcggcgggaaacaacctctgcgccagcgaggacatcgagggctcggacctgctgaagcacgctatcggcggcatgaaggtgctgttgggcgagggcatggcgatcctggcgccgaacgccaacagctatcgccgcttcaaggccaattcttacgccccggtggcgccgacctggggcgtcaacaatcgcaccgtatccttacgcgtgccggcggggccgcccaagacccgtcacgtcgagcatcgcgtggccggcgcggacggcaatccgtatctcgtcttggccgtgctgctggccagcgcccaccacgggatcaccaacaagatcgatccaggtcccgcggtgattggcgacggctacgccgcggccgccaaggagaacatccggctacccaacaactggttcgccgccgtggacctgttcgagcagtcgagcgtgctgcgcgactacctcggcgaccgtttcgtggacatgttcgtgtcggtgaagcgcacggaacaggcgcgtttcttcgaggtggtcaccgaactggatttcgactggtacctgcgcaacgcctga

SEQ ID NO: 1233 - protein, 460 aa, Caulobacter crescentus CB15
MMSAVADIQECRDFLAAHPQVKFVEVFFTSMTGVPRGKRLRVHELEAIYEYGRFLPGSVLVVDTNGADCEDTGLVWEDGDADRRARPVPGTLTLAPWLGPDVAQVMLSLYELDGTPNDLDPRHVLQRVLDRYAADGLTPVAACELEYYLVDLQRGPNGELLPAKSLQTGLRPTGIQVYGLPELEAHAPFLRELWDVADTLGVPLEGAISEFAPAQVELTLKHKPDALRAADDAVLYKRAAKGVALRHGMEATFMAKPWSDRAGNGFHVHLSVNDAAGNNLCASEDIEGSDLLKHAIGGMKVLLGEGMAILAPNANSYRRFKANSYAPVAPTWGVNNRTVSLRVPAGPPKTRHVEHRVAGADGNPYLVLAVLLASAHHGITNKIDPGPAVIGDGYAAAAKENIRLPNNWFAAVDLFEQSSVLRDYLGDRFVDMFVSVKRTEQARFFEVVTELDFDWYLRNA

SEQ ID NO: 1234 - DNA, 1383 bp, Agrobacterium tumefaciens str. C58
  CDS (1)..(1383): transl_table=11
atggaaacggcttgctggtgcataatgtatgatattgaaaacgcaaagaaatttttcgctgataatcccgatatcgaaattctcgaagctttcgtcatagatgcgaacggcgttccgcgcggtaaatggattccgcgtgagagagcaattgacgtgcttgaaaagggaatggcgatcccgcgatccgtttatgcgctggatatctggggccgggatgtgcacgccgcaggtctcgccgaaggcacgggtgatcctgatggtttttgtttccccgttcccggtacgctgtcacgggtaacatggcttggccggccgacggcgcaggttctgctggcgatgaaaaacgcggatgggaccggattttatggtgatccgcgccatgttctgtcgcaggttctgaacgcctataaaaaggctggcctcacgccggtcgtggcgaccgaactggaattctacctcatcgatcccgtccgctcggcgcttgacccggtgcgcccgccgcacagccgcgaaggtcgctggcacaccggccagacgcaggttctatcgatttccgaattgcaggatttcgaggatgtcttccatgatatcgcgacagcctgccgcgcccagggtgtgcttgcagatacgacgctgcgggaaaatggccccgggcaatatgagatcaacctcaaccacgtgccggatgccctgcaggccgccgattttgccgtcttcctgaaacgcatcgtcaaaggtgtggcgcgacggcacgaactcgacgccaccttcatggccaagccctatgggctgcaggccggcaacggcatgcatgtgcatttttccgttctcgacagggacggcaggaatatctacgccggggaaaacggtccgtcggatgcgctgatgcactcggtcggcggcctgttggaaaacatgggggagagcatggcgatcttcgctccccatgccaattcctatcgccgcctcaccccaagcgaacacgcgccgacctacgcttcgtggggtatcgacaaccgctcggcggcggtccgcgtcatcgtggccagcaaggcggcaacccgcatcgaacaccgcgtcgccggcgccgacaccaatccctacctggtcctcgcgatgatcctcagcgccgctatcgccggcatgaaggagaagcgccagcccggcggcgcgattgccggtgacagccacgcgatcaatcacgaaccgcttcccaccaactgggactatgcattgcagcgcttcacgcgttcgagctttgcctatgcgacgctcggccagaagtaccgcacgctgttttccgcctgcaagcagcaggagctttccgaattttccctgcgtgtaaccgacgtcgaatatgacgcctatatcaggacggtgtga

SEQ ID NO: 1235 - protein, 460 aa, Agrobacterium tumefaciens str. C58
METACWCIMYDIENAKKFFADNPDIEILEAFVIDANGVPRGKWIPRERAIDVLEKGMAIPRSVYALDIWGRDVHAAGLAEGTGDPDGFCFPVPGTLSRVTWLGRPTAQVLLAMKNADGTGFYGDPRHVLSQVLNAYKKAGLTPVVATELEFYLIDPVRSALDPVRPPHSREGRWHTGQTQVLSISELQDFEDVFHDIATACRAQGVLADTTLRENGPGQYEINLNHVPDALQAADFAVFLKRIVKGVARRHELDATFMAKPYGLQAGNGMHVHFSVLDRDGRNIYAGENGPSDALMHSVGGLLENMGESMAIFAPHANSYRRLTPSEHAPTYASWGIDNRSAAVRVIVASKAATRIEHRVAGADTNPYLVLAMILSAAIAGMKEKRQPGGAIAGDSHAINHEPLPTNWDYALQRFTRSSFAYATLGQKYRTLFSACKQQELSEFSLRVTDVEYDAYIRTV

SEQ ID NO: 1236 - DNA, 1380 bp, Xanthomonas campestris pv. campestris str. ATCC 33913
  CDS (1)..(1380): transl_table=11
atggcaaccgaaacccgtgtcgcgtccctgcccagcatcgatgccgccgccctggccgcgatcgagggctgtgcgctggtggacctgctgctgcccgataccaacggcgtgttgcgcggcaagcgtgtcacccgagaggcgctcgacaaggtctaccgcgacggcgtgtgcctgccgatgtcgctgatcgccaccgacatcaccggcaatacggtggaagaaaccggcctgggctacgccattggcgatgccgatcgcatctgccgcccgatcgccggctcgctccgcccggtgccatgggcgccgcaaccgatggcgcagctgttgctggcaatgcacacccccaacggtgccttgttcgaggtcgcgccgcgcgcggtgctgcagcgcgtggtgcaaggattcgccgcgctgggcctgacgccggtgatcgccgtggagctggagttctacctgttcgacgccatggccgatgcccagggccgtccgcagacgccgcgcgatgcacacaccggcgagcgcaacaccagcacccaggtgtatgcattgcaggatctggacgaccaccgcagcttcaccgatgccgtcactgcggcgtgccggcagcaaggcattccggccgataccgcggtggccgaatacgcgcccgggcagttcgagatcaacctgcagcaccgcgccgatgcggtggccgcatgcgacgaggcgctgctgctcaagcgcaccatcaaggcgatcgcgcagcagcaacacctgttggccagtttcatggccaagccattcgccggccaggccggcagcgggctgcacgtgcacgtcagcctgctcgatgccgccggccacaacgtgctgcacggcacagcagatgcgccggccgccgccctgcgccatgccattgccgggttgcaacggcatgcggacgcatcgctgctgctgttcgcgccgcatgccaacagttaccgccgtttcgtgccgaatgcgttcgtgccgctggacgccagctggggcttcaacaaccgcaccgtggccttgcgcatcccgcacagcgatgcgcacaacacccgtatcgaacaccgcatcgccggcgccgatgccaacccctacctggtggcggcggccgtgttggccgcgatgctggacggcttgcagcaccccggcgaccccaccgccccggtgcagggcaacgcctacgcgcaggcgaccttcaccccgcgcacctggcagggtgcggtggatgcgttcctgcgcagcgacttcatcgccacccaattgggcacgcagttccagcatgtgttcggccagcagaagcagcgcgagctgctcgactatcaggcgctggtgccggacctggactacgcccggtatctgcggacggtctga

SEQ ID NO: 1237 - protein, 459 aa, Xanthomonas campestris pv. campestris str. ATCC 33913
MATETRVASLPSIDAAALAAIEGCALVDLLLPDTNGVLRGKRVTREALDKVYRDGVCLPMSLIATDITGNTVEETGLGYAIGDADRICRPIAGSLRPVPWAPQPMAQLLLAMHTPNGALFEVAPRAVLQRVVQGFAALGLTPVIAVELEFYLFDAMADAQGRPQTPRDAHTGERNTSTQVYALQDLDDHRSFTDAVTAACRQQGIPADTAVAEYAPGQFEINLQHRADAVAACDEALLLKRTIKAIAQQQHLLASFMAKPFAGQAGSGLHVHVSLLDAAGHNVLHGTADAPAAALRHAIAGLQRHADASLLLFAPHANSYRRFVPNAFVPLDASWGFNNRTVALRIPHSDAHNTRIEHRIAGADANPYLVAAAVLAAMLDGLQHPGDPTAPVQGNAYAQATFTPRTWQGAVDAFLRSDFIATQLGTQFQHVFGQQKQRELLDYQALVPDLDYARYLRTV

SEQ ID NO: 1238 - DNA, 1380 bp, Xanthomonas axonopodis pv. citri str. 306
  CDS (1)..(1380): transl_table=11
atggcttccgagacttccgtcgcgtccctgcccgctgccgatgcccacaccctctctcgcatcgccgggtgcgagtctgtcgatctgttattgcccgacaccaatggcgtgctgcgcggcaagcgcgtaaccgccgatgcgctgagcaaggtgtatcgcgacggcgtgtgcctgccgatgtcgctgatcgccaccgacatcaccggcaacaccgtggaagaaaccggtcttggctacgcgatcggcgacgccgaccgcatctgccggccgatcgaaggctcgctacgactggtgccctgggcgccacggccgatggcgcagctgttgctggcgatgcacacacccgaaggcgggctgttcgaagtcgccccgcgggcggtgttgcagcgcgtgctgcaggggtttggcgcactcggcctgaccccggtcatcgccgtagagcttgagttctatctgttcgatgcggtggccgatgcgcaggggcgcccgcaaaccccgcgcgacccgatcaccggcgaacgcagcgacagcacgcaggtatattcgctgcaggatctggacgaccagcgtggcttcaccgatgcggtcaccgtcgcttgcagacagcaaggcattccggccgacaccgccgtggccgagtacgcacccggccagttcgaaatcaatctgcaacaccgtgccgatgcggtggccgcctgcgacgaggcggttctgctcaagcgcaccatcaaggccattgcgcagcaacggggcaagctagccagtttcatggccaagcctttccccggccaggccggcagcggtttgcatgtgcatgtgagcctgctcgatgccgccgggcacaacgtgctggccagcgccgccgacgcgcctgcgcagtcgctacgccacgccatcgccgggctacagcggcatgcagatgcctcgctcttgatgttcgccccgcatgccaacagctatcgccgcttcgtcagcaatgcgttcgtgccgctggatgcgagctggggcttcaacaaccgtaccgtggcactgcgcatcccgcacagcgatgcgcacaacacccgcatcgaacaccgcattgccggcgccgatgccaacccatatctggccgctgcagccgtgctggccgcgatgctggacggcctgcggcagccggccgaacccaccgcgccggtcaccggcaatgcgtacgcacagtcggtgttcgccccacgcagctggcaaggcgcggtggatgcgttcctcggcagcgacttcatcggcgagcagttcggcacgcagttccagcacgtattcggccagcagaaacaacgcgagctgctcgactaccaggcgcaggtaccggacctggattacgcgcggtacctgcgcaccgtgtga

SEQ ID NO: 1239 - protein, 459 aa, Xanthomonas axonopodis pv. citri str. 306
MASETSVASLPAADAHTLSRIAGCESVDLLLPDTNGVLRGKRVTADALSKVYRDGVCLPMSLIATDITGNTVEETGLGYAIGDADRICRPIEGSLRLVPWAPRPMAQLLLAMHTPEGGLFEVAPRAVLQRVLQGFGALGLTPVIAVELEFYLFDAVADAQGRPQTPRDPITGERSDSTQVYSLQDLDDQRGFTDAVTVACRQQGIPADTAVAEYAPGQFEINLQHRADAVAACDEAVLLKRTIKAIAQQRGKLASFMAKPFPGQAGSGLHVHVSLLDAAGHNVLASAADAPAQSLRHAIAGLQRHADASLLMFAPHANSYRRFVSNAFVPLDASWGFNNRTVALRIPHSDAHNTRIEHRIAGADANPYLAAAAVLAAMLDGLRQPAEPTAPVTGNAYAQSVFAPRSWQGAVDAFLGSDFIGEQFGTQFQHVFGQQKQRELLDYQAQVPDLDYARYLRTV

SEQ ID NO: 1240 - DNA, 1419 bp, Shigella flexneri 2a str. 301
  CDS (1)..(1419): transl_table=11
atggaaaccaatatcgttgaagtagagaactttgttcagcagtcagaagagaggcggggtagcgcctttacgcaggaagtgaaacgctacctggagcgctacccgaatacgcaatatgttgatgttttacttactgatttgaatggttgcttccgtggaaaatgtaagcctgtttcaagcctgtacaagctcgacacacgccgttatttggtggcctcgatatttgcactgaatattttgggcaacgtagtagaagaagcaggtctgggtcaggaaatgggcgagccggatcgtacctgtgttcctgttctcggttccttaactccttctgccgccgatccagagtttatcggtcagatgctcctgaccatggtcgatgaagatggcgctccctttgacgttgagccgcggaacgttcttaaccgcctgtggcagcagctgcgccagcgcggattgttcccggttgtagcggtagagctggagttctatttactggatcgccagcgcgacgctgaaggggatctgcaaccgccctgcgcgcctggcaccgatgaccgcaatacacaaagccaggtttactccgttgataacctcaaccacttcgccgacgtgctcaatgatattgatgaactggcgcagttgcagctgattccggcagatggcgcggtcgctgaggcctcgccgggtcagtttgaaatcaacctttaccatactgataacgtgctggaagcctgcgatgatgcgctggcactaaaacgcctagtgcgtctgatggcagaaaagcataagatgcacgccacttttatggcgaagccgtatgaagagcacgcgggcagcgggatgcatatccatatcagtatgcaaaataatcgtggcgagaatgtgctttctgacacagaaggcgaagattcgccgctgctgaaaaagatgctcgccgggatgattgacctgatgccgtcgtcgatggcgttgctggcaccaaacgtgaactcgtatcgccgcttccagccgggaatgtatgtgccgacgcaggcgtcgtggggccataacaaccgcaccgtcgccctgcgtattccgtgcggtgaccgtcataatcaccgcgtggaatatcacgtggcgggtgccgatgccaacccatatctggtgatggcagcgatttttgccggtattttgcatggccttgataacgagctgccgttgcaggaagaagtcgaaggcaacgggctggaacaggaaggcttacccttcccgattcgccagagcgatgccctgggtgagtttatcgagaatgatcacctgcgccgctatttaggcgaacggttttgccatgtgtatcacgcctgtaaaaatgatgagctgttgcagtttgagcgcctcatcacagaaacagaaattgagtggatgttgaaaaacgcgtaa

SEQ ID NO: 1241 - protein, 472 aa, Shigella flexneri 2a str. 301
METNIVEVENFVQQSEERRGSAFTQEVKRYLERYPNTQYVDVLLTDLNGCFRGKCKPVSSLYKLDTRRYLVASIFALNILGNVVEEAGLGQEMGEPDRTCVPVLGSLTPSAADPEFIGQMLLTMVDEDGAPFDVEPRNVLNRLWQQLRQRGLFPVVAVELEFYLLDRQRDAEGDLQPPCAPGTDDRNTQSQVYSVDNLNHFADVLNDIDELAQLQLIPADGAVAEASPGQFEINLYHTDNVLEACDDALALKRLVRLMAEKHKMHATFMAKPYEEHAGSGMHIHISMQNNRGENVLSDTEGEDSPLLKKMLAGMIDLMPSSMALLAPNVNSYRRFQPGMYVPTQASWGHNNRTVALRIPCGDRHNHRVEYHVAGADANPYLVMAAIFAGILHGLDNELPLQEEVEGNGLEQEGLPFPIRQSDALGEFIENDHLRRYLGERFCHVYHACKNDELLQFERLITETEIEWMLKNA

SEQ ID NO: 1242 - DNA, 1347 bp, Pseudomonas putida KT2440
  CDS (1)..(1347): transl_table=11
atgagtgtcatctttccggatctgctggctgaagtgcgctcgttccgagcagagcacccggcaattcgctatgtcgacctgattgcgctggacatccccgggcacttctacggcaagcgctaccccatggacatgctggaaaaagtcgcagccggtgcgcctctgaagctgccgcagaactgcgtgctgctgggtacccagggcggcctttacccgattggtgactattgcttcgccgacggcgacccggatgctgcccggcgcctggtgccgggtacgctgaagccggtgcgctgggaaaaggaagtgatcgcccagatgctgatcacgtccgacggcactgcaaagccgatcgaattcgagcctcgtgaagtgctggcgcgtgttcttcagcgtctggccaagcgtggcattcgcccggtggtggcgtttgaactggagttctacctgttcgaccgcaagcttgataacggcctgccccagtatccacgtgacacggcgaccgaggatgaagacgatcagccgaacatgcacatcgagcggttgtcgcgcttttcgtcggtcctgcacgagatggtcgatggcgccaacgagcagggcgtgccggcgaacgtcatcaccgcagagctgggcccaggccagttcgagatcaacttctcgcacagcgacgatgccctcagtgcggcggactggtcggcactgttctgccgcagtacccgcggtatcgcgatgaagcacggctaccgtgccagcttcatgagcaaaccctacctggacgcgccaggcagcggcatgcatgtgcacgtcagcctgtacgacgccgccggcaataacatcctggcgggaagcgaacagcgcaagctgcgccatgcggtggcaggctgcctggaactgctgccgcactgcatgccgatctttgcccccaaccacaatgcctaccgacgttatggcgccatggtcaacgcggcgagcaaggccagctggggtttcgaagaccgtgacgcgtgcatccgcatccccgagtccgacccgcgcaacctgcgcatcgagcaccgcctcgctggcgccgacgccaacccgtatctggtactggcggccattttgaccgggatggagcatggcctggatcgcggcgtggagcccatcgccccgctgaacgaaaaccgccagagcggcatcgacttccccaaggatgccctcagcgccttggccgccatgcgtcatcacccggtggtcaaccaaggcctgggcagcgagttcgtgatggtctattgcgaaaacaaataccaggagcaactggacttcatgcaccacatcgatgcccgcgaataccgctggttcctgtag

SEQ ID NO: 1243 - protein, 448 aa, Pseudomonas putida KT2440
MSVIFPDLLAEVRSFRAEHPAIRYVDLIALDIPGHFYGKRYPMDMLEKVAAGAPLKLPQNCVLLGTQGGLYPIGDYCFADGDPDAARRLVPGTLKPVRWEKEVIAQMLITSDGTAKPIEFEPREVLARVLQRLAKRGIRPVVAFELEFYLFDRKLDNGLPQYPRDTATEDEDDQPNMHIERLSRFSSVLHEMVDGANEQGVPANVITAELGPGQFEINFSHSDDALSAADWSALFCRSTRGIAMKHGYRASFMSKPYLDAPGSGMHVHVSLYDAAGNNILAGSEQRKLRHAVAGCLELLPHCMPIFAPNHNAYRRYGAMVNAASKASWGFEDRDACIRIPESDPRNLRIEHRLAGADANPYLVLAAILTGMEHGLDRGVEPIAPLNENRQSGIDFPKDALSALAAMRHHPVVNQGLGSEFVMVYCENKYQEQLDFMHHIDAREYRWFL

SEQ ID NO: 1244 - DNA, 1365 bp, Pseudomonas putida KT2440
  CDS (1)..(1365): transl_table=11
atgcactttgcccctgtagagcaggctacccgttttctggccgacaaccccgatatcgagctgttcgaactgttcatcctcgacgccaacggtgtgccacgcggcaagctgttgcaccgcgaggaactgctggccgtgtaccagacaggccggccactgcccagcaccatccttggcctgaccctcaacggcgacgacgtggaaaactccggcctggtgtgggacgtcggcgacatcgactgccgtgcctacccgcttgacggcagcctggtgcgcctgccctggcgccgggtgcccaccgccgcagtgcaggtgagcatgcaccccagcgagggtctgccggccagcatcgcggacccacgccatgtgctgctgcgcaccatcgaagcgttgaaggccgatggttatcacccggtgatggcctgcgagctggagttctacctgctcgaccagcagcgtgatgcccagggccgcccacaaccggcactggacaacgatggcggccgcccccgcagcacccaggtctatggcctgcgcgaactggagcagatcgaaccgttcctcgccgacctgtacgctgcctgcaaggcccaaggcatcccggcgcgcacggccatttccgagtacgccccgggccaggtggaaatcaccctggagcatggcgatgcgctgcaggcgatggaccaggcggtgcgctacaagcgcttggtaaaaggtgtggcccatgcccacggcatgcaggcctgcttcatggccaagccattcgcccaactggccggcaccggcatgcacatgcacctgagcctggccgacagcgccggcaacaacctgttcgccagcgaagacaaggccggcaccccgctgctgcgccaggccgtggccggcatgctgcgccacctgcgcgactcgctgctgctgttctgccccaacgccaactccttccgccgcttccaggccaacagctatgcgcccctggcgccaacctggggcgtggacaaccgcaccgtgagcctgcgtgtgccaggaggccctgccaacagccgccatgtggagcaccgcatctgtggcgcggatgccaacccttacctggcagcagcggcgatccttgctgccagccactggggcatccgcgaacagcttgacccaggcgcgcccgttgaaggcaacggctatgcccaggccaccgaacacctgcccactgactggctgaccgcactcgacgccctgcaacattccgattgggcccgtgaagcattgggcgaagacttccttggcgtgtacctgaaggtcaagcgcgccgagtaccgccagttcatggccgaagtcagcgaacaggactggcgctggtacctgcaccaggcctga

SEQ ID NO: 1245 - protein, 454 aa, Pseudomonas putida KT2440
MHFAPVEQATRFLADNPDIELFELFILDANGVPRGKLLHREELLAVYQTGRPLPSTILGLTLNGDDVENSGLVWDVGDIDCRAYPLDGSLVRLPWRRVPTAAVQVSMHPSEGLPASIADPRHVLLRTIEALKADGYHPVMACELEFYLLDQQRDAQGRPQPALDNDGGRPRSTQVYGLRELEQIEPFLADLYAACKAQGIPARTAISEYAPGQVEITLEHGDALQAMDQAVRYKRLVKGVAHAHGMQACFMAKPFAQLAGTGMHMHLSLADSAGNNLFASEDKAGTPLLRQAVAGMLRHLRDSLLLFCPNANSFRRFQANSYAPLAPTWGVDNRTVSLRVPGGPANSRHVEHRICGADANPYLAAAAILAASHWGIREQLDPGAPVEGNGYAQATEHLPTDWLTALDALQHSDWAREALGEDFLGVYLKVKRAEYRQFMAEVSEQDWRWYLHQA

SEQ ID NO: 1246 - DNA, 1377 bp, Pseudomonas putida KT2440
  CDS (1)..(1377): transl_table=11
atgtcggtacccccgcgtgccgttcagcttaacgaagcgaacgcgttccttaaggaacatcctgaggttctctacgttgaccttctgattgcagatatgaatggtgtggtgcgtggcaagcgcatagagcgcaccagcctccacaaggtttacgagaaaggcatcaatctgccggcctccctctttgccctggacatcaacggttccaccgtcgaaagcaccgggctgggcctggacatcggcgatgctgaccgcatctgctatccaatccccgacacgctctgtaacgagccatggcaaaagcgccccaccgcccagctgctgatgaccatgcacgagctggaaggcgagccgttcttcgccgacccgcgcgaagtgctgcgtcaggtggtgaccaagttcgacgaactgggcctgactatctgcgccgcattcgagctggagttctacctgatcgaccaggagaacgtgaacggccgcccgcagccaccacgctcgccaatttcgggcaaacgcccgcagtcgacccaggtgtacctgatcgacgacctcgacgaatatgccgactgcctgcaggacatcctcgaaggcgcgaaagaacaaggcatcccggccgacgccatcgtcaaggaaagcgccccggcgcagttcgaagtcaacctgcaccacgtggccgacccgctcaaggcctgcgactacgcggtactgctcaagcggttgatcaagaacatcgcctacgaccatgaaatggacaccaccttcatggccaagccctatccgggccaggcaggcaacggcctgcacgtgcacatttccgtgctggacaaagatggcaacaacatcttcaccagcgaggatcccgagcagaacgccgcgctacgtcacgctgtcggcggtgtgctcgagaccctgcccgcgtccatggccttcctttgcccgaacgtcaactcgtaccgccgctttggcgcgcagttctacgtgccgaacgcgccaagctggggcctggacaaccgcaccgtagcgctacgcgtaccgaccggctcggccgatgccgtgcgcatcgagcaccgcgtcgccggtgccgacgccaacccgtacctgatgatggctgccgtactggctggcgtgcaccatggcctgaccaacaagatcgagccaggcgcgccgatcgaaggcaactcgtacgagcagctggagcagagcctgccgaacaacctgcgcgatgccctgcgcgagctggacgacagcgagatcctgaacaagtacatcgatccgaagtacatcgacatcttcgtcgcgtgcaaggaaagcgagctggaagagttcgagcactcgatctccgacctcgagtacaactggtacctgcataccgtgtaa

SEQ ID NO: 1247 - protein, 458 aa, Pseudomonas putida KT2440
MSVPPRAVQLNEANAFLKEHPEVLYVDLLIADMNGVVRGKRIERTSLHKVYEKGINLPASLFALDINGSTVESTGLGLDIGDADRICYPIPDTLCNEPWQKRPTAQLLMTMHELEGEPFFADPREVLRQVVTKFDELGLTICAAFELEFYLIDQENVNGRPQPPRSPISGKRPQSTQVYLIDDLDEYADCLQDILEGAKEQGIPADAIVKESAPAQFEVNLHHVADPLKACDYAVLLKRLIKNIAYDHEMDTTFMAKPYPGQAGNGLHVHISVLDKDGNNIFTSEDPEQNAALRHAVGGVLETLPASMAFLCPNVNSYRRFGAQFYVPNAPSWGLDNRTVALRVPTGSADAVRIEHRVAGADANPYLMMAAVLAGVHHGLTNKIEPGAPIEGNSYEQLEQSLPNNLRDALRELDDSEILNKYIDPKYIDIFVACKESELEEFEHSISDLEYNWYLHTV

SEQ ID NO: 1248 - DNA, 1383 bp, Pseudomonas putida KT2440
  CDS (1)..(1383): transl_table=11
atgacgtcggtaaccccgtgcgccagttcttccagcgagatgaatgacttcctccaggcccatccggacacgcagtacgtagacctgctgatctccgacatgaatggcgtggtacgtggcaagcgcatcgagcgggccagcctgcacaaggtgtacgagaagggcatcaacctgcccgcatcgctgttcgcccttgatatcaacggttccactgtcgaaagcaccggccttggcctggacatcggcgacgccgaccgcatctgtttcccgatccccggcacgctgtcggacgagccgtggcaaaagcgccccaccgcccagctgctgatgaccatgcacgagctggatggccagccgttcttcgccgacccgcgtgaagtgctgcgccaggtggtgagcaagttcgacgacctgggcctgactatctgcgccgcgttcgagctggagttctacctgatcgaccaggacaacctcaacggccgcccgcagccgccgcgctcgccgatctccggcaagcgcccgcagtcgacccaggtgtacctgatcgacgacctcgacgagtacgccgactgcttgcaggacatgctcgaagcagccaaggaacagggcctgcctgccgacgccatcgtcaaggaaagcgccccggcgcagttcgaggtcaacttgcaccacgtggcggatccgctgaaggcctgcgactatgcgatcctgctcaagcgcctgatcaagaacgtcgcctacgaccatgaaatggacaccaccttcatggccaagccctacccgggccaggcaggcaacggtctgcatgtgcacatttcattgctggacaagaaaaccggcaagaacatcttcgccagtgacgatccgctgcaaagcgatacgctgcgccacgccattggtggcgtgctggaaaccatgccggcgtcgatggccttcctgtgccccaacatcaactcctaccgccgcttcggtgcgcagttctacgttcccaatgcgccgagctggggcctggacaaccgcaccgtggccgtacgcgtgcccaccgacagcagcgaaaacgtgcgccttgagcaccgtgtagccggcgccgatgccaacccgtacctgatgctcgcggcgatccttgccggcgttcaccatggcctgaccaacaaggtcgagcccgaggcgccgatcgaaggcaactcctacgagcagctggagcaaagcctgccgaacaacctgcgcgatgccctgcgcgcgctggatgacagcgaagtcctcaaccaatacatcagcccggactacatcgatatcttcgtggcctgcaaggaaagcgaactggccgagttcgaagtgtcgatttccgatcttgagtacaactggtacctgcacacggtgtaa

SEQ ID NO: 1249 - protein, 460 aa, Pseudomonas putida KT2440
MTSVTPCASSSSEMNDFLQAHPDTQYVDLLISDMNGVVRGKRIERASLHKVYEKGINLPASLFALDINGSTVESTGLGLDIGDADRICFPIPGTLSDEPWQKRPTAQLLMTMHELDGQPFFADPREVLRQVVSKFDDLGLTICAAFELEFYLIDQDNLNGRPQPPRSPISGKRPQSTQVYLIDDLDEYADCLQDMLEAAKEQGLPADAIVKESAPAQFEVNLHHVADPLKACDYAILLKRLIKNVAYDHEMDTTFMAKPYPGQAGNGLHVHISLLDKKTGKNIFASDDPLQSDTLRHAIGGVLETMPASMAFLCPNINSYRRFGAQFYVPNAPSWGLDNRTVAVRVPTDSSENVRLEHRVAGADANPYLMLAAILAGVHHGLTNKVEPEAPIEGNSYEQLEQSLPNNLRDALRALDDSEVLNQYISPDYIDIFVACKESELAEFEVSISDLEYNWYLHTV

SEQ ID NO: 1250 - DNA, 1377 bp, Pseudomonas syringae pv. tomato str. DC3000
  CDS (1)..(1377): transl_table=11
atgtcggtacccccgcgtgccgttcagcttaacgaagcgaacgcgttccttaaggaacatcctgaggttctgtacgttgaccttctgattgcagatatgaatggtgtggtgcgtggcaaacgcatcgagcgcaccagcctccataaggtttacgagaaaggcatcaacctgccggcctctttatttgccctggatatcaacggctccacggtggaaagcaccggtctgggcctggatatcggtgatgctgaccgaatctgttatcccatccctgacaccctgtgcaacgagccttggcaaaagcgccctaccgcgcaactgctgatgaccatgcacgaaatcgaaggtgacccgtttttcgccgacccgcgcgaagtcttgcgccaggtagtcgccaagttcgatgaaatgggcctgaccatctgcgccgccttcgagctggagttctacctgatcgatcaggagaacgttaacggccgtccgcaaccgccccgctcccctatctccggcaagcgcccgcactcgacacaggtctacctgatcgatgacctcgacgaatacgtcgattgcctgcaggacattctggaaggtgcgaaggagcaaggcattcctgccgacgccatcgtcaaggaaagtgcccctgcgcagttcgaagtgaacctgcaccacgtcgcagacgctatcaaagcgtgcgactacgctgtgctgctcaagcgcctgatcaagaacatcgcctacgatcacgaaatggacacgaccttcatggccaagccctatccgggtcaggcgggtaatggtctgcacgtccacatctcgattctggatcgcgatggcaagaacatcttcaccagcgaggatcccgagcagaacgccgcattgcgtcacgcgatcggcggtgtgctcgagaccctgcctgcgcagatggcgttcctgtgcccgaacgtcaactcgtaccgtcgctttggtgctcagttttacgtaccaaactcgcccacctggggcctggacaaccgcacggtcgcggtccgcgtgccaaccggttcggccgatgccgtgcgtatcgaacaccgcgtagccggtgccgatgccaacccgtatctggtcatggcttcggtgctggcaggcgtgcatcacggtctggtcaacaagatcgagcctggcgctccggtggaaggcaactcgtacgaacagcacgaacaaagcctgccgaacaacctgcgcgacgcactgcgcgagctggacgacaacccggtcatggccaagtacatcgatccgaaatacatcgacatctttgtcgcctgtaaagagagcgagctggaagagttcgaacactcgatctccgaccttgagtacaactggtacctgcatacggtctga

SEQ ID NO: 1251 - protein, 458 aa, Pseudomonas syringae pv. tomato str. DC3000
MSVPPRAVQLNEANAFLKEHPEVLYVDLLIADMNGVVRGKRIERTSLHKVYEKGINLPASLFALDINGSTVESTGLGLDIGDADRICYPIPDTLCNEPWQKRPTAQLLMTMHEIEGDPFFADPREVLRQVVAKFDEMGLTICAAFELEFYLIDQENVNGRPQPPRSPISGKRPHSTQVYLIDDLDEYVDCLQDILEGAKEQGIPADAIVKESAPAQFEVNLHHVADAIKACDYAVLLKRLIKNIAYDHEMDTTFMAKPYPGQAGNGLHVHISILDRDGKNIFTSEDPEQNAALRHAIGGVLETLPAQMAFLCPNVNSYRRFGAQFYVPNSPTWGLDNRTVAVRVPTGSADAVRIEHRVAGADANPYLVMASVLAGVHHGLVNKIEPGAPVEGNSYEQHEQSLPNNLRDALRELDDNPVMAKYIDPKYIDIFVACKESELEEFEHSISDLEYNWYLHTV

SEQ ID NO: 1252 - DNA, 1389 bp, Vibrio parahaemolyticus RIMD 2210633
  CDS (1)..(1389): transl_table=11
ttggttatttctaatttctactcgtcaggctatttggagaagaaaatggaatcgtatctacaggaagtacaaaattttaaacagaaatggcccgatatagagtttatcgaccttatctttaccgatatcaatgccactccaagaggaaagcgcatcccgatagacgcactagagaagcttgataaaggggtagcactccccctctcgaccatcaccctcgatactaaaggtaacgtcgttgaaactgcggggttgggcgaagatctcggagagccagatcacctctgttacccaatcagtggtactttgatgccaacggcaaaggaacaagttggccaactactgcttagtatgatggatgaaaccgggcaacaccctaacccactgttcatccgcaacattctcgcgtctatgttgcaaacgctgcatgccaaagatcagtacccatgtgtcgcgctagaactagaattctatttaatcgacaaaactcgtggggaaaatggcgaaccattaacggcaattaatccaacgaagaaaacacgagaaaaagacaccgaggtttacgaccttgatggattagatgactacgcggatttcttgaccgatcttaatcgaatcgcattagaacaagggttgaatacgtccggcgctctttctgagtctgcaccgggacagtttgaaatcaacttcaaccattccaaagatgtactgcgagcgtgtgatgaaatcatcattgcaaaacgtttgattcgccaagtggctcaccagcacgggtttgatgcgacatttatggcgaagccatttggtgaacaagcgggtaatggcatgcacattcacctcagcttggttgataaagatggtaacaaccactttagtcaaaccgatggtcaacctagccccttcttctatcaaaccatggcagccatgttgtcacaaacctccgatgccatgggtttgatttgtccgaacgttaactccttccgccgctttttaccgggtgcatatgtgccaacaaaagctgactggggagaaaaccaccgaggcgtggcgctgcgtgtgccgattagcgacagtaaaaaccgtcgtattgagcatcgtatcgctggcgctgacgttaacccttacattctcgctgcagtagtactttccgcagtattagcgagtgataactacaccaaagaccaatgtccgccaaccttaagtgacgatgctgttgaactgccgctgcgtatgtcagaagcgctagagcgactggagcacagcgagttagctcaatacatctcacaagactttattgacttgtatctagcttgcaagcggagtgaactcgcagaatttgagcgagcgattactccattggaaatcgactggatgttgcactcggcataa

SEQ ID NO: 1253 - protein, 462 aa, Vibrio parahaemolyticus RIMD 2210633
MVISNFYSSGYLEKKMESYLQEVQNFKQKWPDIEFIDLIFTDINATPRGKRIPIDALEKLDKGVALPLSTITLDTKGNVVETAGLGEDLGEPDHLCYPISGTLMPTAKEQVGQLLLSMMDETGQHPNPLFIRNILASMLQTLHAKDQYPCVALELEFYLIDKTRGENGEPLTAINPTKKTREKDTEVYDLDGLDDYADFLTDLNRIALEQGLNTSGALSESAPGQFEINFNHSKDVLRACDEIIIAKRLIRQVAHQHGFDATFMAKPFGEQAGNGMHIHLSLVDKDGNNHFSQTDGQPSPFFYQTMAAMLSQTSDAMGLICPNVNSFRRFLPGAYVPTKADWGENHRGVALRVPISDSKNRRIEHRIAGADVNPYILAAVVLSAVLASDNYTKDQCPPTLSDDAVELPLRMSEALERLEHSELAQYISQDFIDLYLACKRSELAEFERAITPLEIDWMLHSA

SEQ ID NO: 1254 - DNA, 1419 bp, Shigella flexneri 2a str. 2457T
  CDS (1)..(1419): transl_table=11
atggaaaccaatatcgttgaagtagagaactttgttcagcagtcagaagagaggcggggtagcgcctttacgcaggaagtgaaacgctacctggagcgctacccgaatacgcaatatgttgatgttttacttactgatttgaatggttgcttccgtggaaaacgtatccctgtttcaagcctgaagaagctcgagaaagggtgttatttcccggcctcggtatttgcaatggatattctgggcaacgtagtagaagaagcaggtctgggtcaggaaatgggcgagccggatcgtacctgtgttcctgttctcggttccttaactccttctgccgccgatccagagtttatcggtcagatgctcctgaccatggtcgatgaagatggcgctccctttgacgttgagccgcggaacgttcttaaccgcctgtggcagcagctgcgccagcgcggattgttcccggttgtagcggtagagctggagttctatttactggatcgccagcgcgacgctgaaggggatctgcaaccgccctgcgcgcctggcaccgatgaccgcaatacacaaagccaggtttactccgttgataacctcaaccacttcgccgacgtgctcaatgatattgatgaactggcgcagttgcagctgattccggcagatggcgcggtcgctgaggcctcgccgggtcagtttgaaatcaacctttaccatactgataacgtgctggaagcctgcgatgatgcgctggcactaaaacgcctagtgcgtctgatggcagaaaagcataagatgcacgccacttttatggcgaagccgtatgaagagcacgcgggcagcgggatgcatatccatatcagtatgcaaaataatcgtggcgagaatgtgctttctgacacagaaggcgaagattcgccgctgctgaaaaagatgctcgccgggatgattgacctgatgccgtcgtcgatggcgttgctggcaccaaacgtgaactcgtatcgccgcttccagccgggaatgtatgtgccgacgcaggcgtcgtggggccataacaaccgcaccgtcgccctgcgtattccgtgcggtgaccgtcataatcaccgcgtggaatatcacgtggcgggtgccgatgccaacccatatctggtgatggcagcgatttttgccggtattttgcatggccttgataacgagctgccgttgcaggaagaagtcgaaggcaacgggctggaacaggaaggcttacccttcccgattcgccagagcgatgccctgggtgagtttatcgagaatgatcacctgcgccgctatttaggcgaacggttttgccatgtgtatcacgcctgtaaaaatgatgagctgttgcagtttgagcgcctcatcacagaaacagaaattgagtggatgttgaaaaacgcgtaa

SEQ ID NO: 1255 - protein, 472 aa, Shigella flexneri 2a str. 2457T
METNIVEVENFVQQSEERRGSAFTQEVKRYLERYPNTQYVDVLLTDLNGCFRGKRIPVSSLKKLEKGCYFPASVFAMDILGNVVEEAGLGQEMGEPDRTCVPVLGSLTPSAADPEFIGQMLLTMVDEDGAPFDVEPRNVLNRLWQQLRQRGLFPVVAVELEFYLLDRQRDAEGDLQPPCAPGTDDRNTQSQVYSVDNLNHFADVLNDIDELAQLQLIPADGAVAEASPGQFEINLYHTDNVLEACDDALALKRLVRLMAEKHKMHATFMAKPYEEHAGSGMHIHISMQNNRGENVLSDTEGEDSPLLKKMLAGMIDLMPSSMALLAPNVNSYRRFQPGMYVPTQASWGHNNRTVALRIPCGDRHNHRVEYHVAGADANPYLVMAAIFAGILHGLDNELPLQEEVEGNGLEQEGLPFPIRQSDALGEFIENDHLRRYLGERFCHVYHACKNDELLQFERLITETEIEWMLKNA

SEQ ID NO: 1256 - DNA, 1377 bp, Pseudomonas syringae pv. syringae B728a
  CDS (1)..(1377): transl_table=11
atgtcggtacccccgcgtgccgttcagcttaacgaagcgaacgcgttccttaaggaacatcctgaggttctgtacgttgaccttctgattgcagatatgaatggtgtggtgcgtggcaaacgcatcgaacgcaccagcctccataaggtttacgagaagggcatcaacctgcctgcctctttatttgctctggatatcaatggctccacggtggagagcaccggtctgggcctggacatcggtgatgctgaccgaatctgttatcccatccccgacaccctgtgcaacgagccatggcaaaagcgccctaccgcgcaattgctgatgaccatgcacgaactcgaaggcgatccgtttttcgccgacccgcgtgaagtattgcgccaggtcgtcgccaaattcgacgaaatgggcctgaccatctgcgccgcgttcgagctggagttctacctgatcgatcaggagaacgtgaacggtcgcccacaaccgccccgctcgccgatctccggcaaacgcccgcattcgacacaggtctacctgatcgacgacctcgacgaatacgtcgactgccttcaggacatcctcgaaggtgcgaaggaacaaggcattcctgccgacgccatcgtcaaggaaagcgccccggcccagttcgaagtcaacctgcatcacgtcgccgacgcgatcaaggcgtgcgattacgcggtattgctcaagcgcctgatcaagaacatcgcctacgatcacgagatggacacgaccttcatggccaagccctatccgggtcaggcgggtaatggtctgcacgttcatatttcgattctggatcgcgacggcaagaacatcttcaccagcgaggatcccgagcagaacgccgcattgcgtcacgcaatcggcggtgtgctcgagaccctgccggcacaaatggccttcctgtgcccgaacgtcaactcgtaccgccggttcggtgcgcagttctatgtgcccaactcaccgacctggggcctggataaccgtacggtcgccgttcgcgtaccgaccggcaccgccgatgcggtacgtatcgaacaccgcgttgccggcgccgacgccaacccgtatctggtgatggcttcggtcctggcgggcgtgcaccacggcctggtcaacaaggtcgagcctggcgctccggtcgaaggcaactcctacgagcaacacgaacaaagcctgccgaacaacctgcgcgacgcattgcgcgagctggacgacaacccggtgatggccaagtacatcgacccgaaatacatcgacatttttgtcgcctgtaaagagagcgagctggaagagttcgaacactccatctccgacctcgagtacaactggtacctgcatacggtctga

SEQ ID NO: 1257 - protein, 458 aa, Pseudomonas syringae pv. syringae B728a
MSVPPRAVQLNEANAFLKEHPEVLYVDLLIADMNGVVRGKRIERTSLHKVYEKGINLPASLFALDINGSTVESTGLGLDIGDADRICYPIPDTLCNEPWQKRPTAQLLMTMHELEGDPFFADPREVLRQVVAKFDEMGLTICAAFELEFYLIDQENVNGRPQPPRSPISGKRPHSTQVYLIDDLDEYVDCLQDILEGAKEQGIPADAIVKESAPAQFEVNLHHVADAIKACDYAVLLKRLIKNIAYDHEMDTTFMAKPYPGQAGNGLHVHISILDRDGKNIFTSEDPEQNAALRHAIGGVLETLPAQMAFLCPNVNSYRRFGAQFYVPNSPTWGLDNRTVAVRVPTGTADAVRIEHRVAGADANPYLVMASVLAGVHHGLVNKVEPGAPVEGNSYEQHEQSLPNNLRDALRELDDNPVMAKYIDPKYIDIFVACKESELEEFEHSISDLEYNWYLHTV

SEQ ID NO: 1258 - DNA, 1377 bp, Pseudomonas fluorescens Pf-5
  CDS (1)..(1377): transl_table=11
atgtcggtccccccgcgtgccattcaactcaatgaagccaatgccttcctgaaaaaacaccccgaggttctctacgtcgatctgctgattgcagacatgaacggtgtggtgcgcggcaagcgcatcgagcgcaccgcgctgcacaaggtctatgagaagggcatcaacctgcccgcctcgctgtttgccctggatatcaacggttccacggtggaaagcaccggcctgggcctggacatcggcgatgccgaccgcatctgctacccgatccccggcaccctgagcgtcgagccctggcagaagcgccccaccgcgcaactgctgatgaccatgcacgagatcgaaggccagccattcttcgccgacccccgcgaagtgctgcgccaggtggtgagcaagttcgatgagatgggcctgaccatctgcgcggcctttgaactggagttctacctgatcgaccaggacaacgtgaacggccgtccgcagtcgccccgttcgccgatctccggcaaacgtccgcattccacccaggtctacctgatcgacgacctcgacgagtacgtcgactgcctgcaagacatcctcgaaggcgcgaaagagcagggcattccggccgacgccatcgtcaaggaaagcgccccggcgcagttcgaagtcaacctgcaccacgtcagcgaccctatcaaagcctgcgactacgcagtactgctcaagcgcctggtgaagaacatcgcctacgaccatgaaatggacaccaccttcatggccaagccctacccgggccaggcgggtaacggcctgcacgtgcacatctcgatcctcgacaagcagggcaacaacatcttcgccagcgaagacccagagaccaacgaagccctgcgccacgccatcggcggcgtgctggacaccctgccgcagcagatggctttcctgtgccccaacgtcaactcgtaccgccgcttcggtgcgcagttctacgtgccgaactcgccgacctggggcatcgacaaccgcaccgtggccgtgcgcgtacccaccggttctgccgatgcggtgcgcatcgagcaccgggtggccggcgccgacgccaacccttacctgctgatggcttcggtgctggcgggcattcaccacggcctgaccaacaagatcgacccgggcgcgccggttgaaggcaactcctacgagcagaacgaacaaagcctgcccaccaacctgcgggacgccctgcgcgtactggacgacagcgaagtgatggccaagtacatcgacccgatgtacatcgacgtgttcgtggcctgtaaggaaagcgagttggcggagttcgaaaactccatctccgacctggaatacaactggtacctgcacacggtctga

SEQ ID NO: 1259 - protein, 458 aa, Pseudomonas fluorescens Pf-5
MSVPPRAIQLNEANAFLKKHPEVLYVDLLIADMNGVVRGKRIERTALHKVYEKGINLPASLFALDINGSTVESTGLGLDIGDADRICYPIPGTLSVEPWQKRPTAQLLMTMHEIEGQPFFADPREVLRQVVSKFDEMGLTICAAFELEFYLIDQDNVNGRPQSPRSPISGKRPHSTQVYLIDDLDEYVDCLQDILEGAKEQGIPADAIVKESAPAQFEVNLHHVSDPIKACDYAVLLKRLVKNIAYDHEMDTTFMAKPYPGQAGNGLHVHISILDKQGNNIFASEDPETNEALRHAIGGVLDTLPQQMAFLCPNVNSYRRFGAQFYVPNSPTWGIDNRTVAVRVPTGSADAVRIEHRVAGADANPYLLMASVLAGIHHGLTNKIDPGAPVEGNSYEQNEQSLPTNLRDALRVLDDSEVMAKYIDPMYIDVFVACKESELAEFENSISDLEYNWYLHTV

SEQ ID NO: 1260 - DNA, 1365 bp, Pseudomonas fluorescens Pf-5
  CDS (1)..(1365): transl_table=11
atgaattttgcagccctagacgaagcccggagtttcctcgccgccaaccccgatatcgacatgatcgagctgttcattctcgacgccaacggcgtgccccggggcaagctgttgcaccgcgaagaactgctggcggtgtacgaaagcggccggcccctgcccagcaccatccttggcctgaccctcaacggcgatgacgtggagaactccggcctggtctgggatgtgggcgatatcgactgccgtgcctaccccctggccggcagcctggtacgcctgccctggcggcagatccctaccgccgcggtgcaggtcagcatgcacccccaggagggcctgcccgccagcatcgccgacccgcgccacctgctgatcaaggtgatcgacgggctcaaggccgagggttaccacccggtgatggcctgcgagctggagttctacctgctggacgccaagcgcgacggcaatggccggccgcaaccggcgctggacgccgatggcggtcgcccgcgcagcccccaggtctacggcctgcgcgagctggagcagatcgaaccgttcctcgccgacctctacgccgcctgcaagctgcaaggcattccggcgcgcacggcgatctccgaatacgcccccgggcaagtggagatcaccctggaacacggcgacgccctggaagccatggaccaggccgtgcgctacaagcgcctggtcaaggccgtggcccacaagcacgggatgcaggccaccttcatggccaagcctttcgatcacctggccggcaccggcatgcacatgcacgtgagcatcgccgacgccgcgggccgcaacctgttcgccagccaagacccggccggcaccccgctgttgcgccaggcggtgggtggcatgctcgcgtccctactggagtcgctgctgctgttctgccccaacgccaactcctaccggcgtttccagagcaacagctacgcgcccctggcccccacctggggcgtcgacaaccgcaccgtgagcctgcgggtgcccggcggcccggccaatagccggcacatcgagcaccgcatctgcggtgccgacgccaacccctacctggcagcggcggcgattctcgccggcatccatcgcggcctgcgggaaaacctcgaccccggcgagccggtacagggcaatggctacgcccaggccaccgaactgctgcccaccgactggctgacctcgctggtggccctggagcaatcggcctgggcacgggatgccctgggctccgaattcctcggtgtgtacctggcggtcaagcgtgccgagtaccgccagttcatggccgaagtcggcgagcaggactggcgctggtacctgacccaggcctga

SEQ ID NO: 1261 - protein, 454 aa, Pseudomonas fluorescens Pf-5
MNFAALDEARSFLAANPDIDMIELFILDANGVPRGKLLHREELLAVYESGRPLPSTILGLTLNGDDVENSGLVWDVGDIDCRAYPLAGSLVRLPWRQIPTAAVQVSMHPQEGLPASIADPRHLLIKVIDGLKAEGYHPVMACELEFYLLDAKRDGNGRPQPALDADGGRPRSPQVYGLRELEQIEPFLADLYAACKLQGIPARTAISEYAPGQVEITLEHGDALEAMDQAVRYKRLVKAVAHKHGMQATFMAKPFDHLAGTGMHMHVSIADAAGRNLFASQDPAGTPLLRQAVGGMLASLLESLLLFCPNANSYRRFQSNSYAPLAPTWGVDNRTVSLRVPGGPANSRHIEHRICGADANPYLAAAAILAGIHRGLRENLDPGEPVQGNGYAQATELLPTDWLTSLVALEQSAWARDALGSEFLGVYLAVKRAEYRQFMAEVGEQDWRWYLTQA

SEQ ID NO: 1262 - DNA, 1377 bp, Pseudomonas fluorescens Pf-5
  CDS (1)..(1377): transl_table=11
atgtcggtacccccgcgtgccgttcagctcaacgaagcgaacgcgttccttaaggaacatcctgaggttctgtacgttgaccttctgattgcggatatgaatggtgtggtgcgcggcaagcgcatcgaacgcaccagcctccacaaggtttacgagaaaggcatcaacctgccggcctccctgtttgccctggatatcaatggctctacggtggaaagcaccggcctgggtctggacatcggcgacgccgaccggatctgctatccaatccccgataccctgtgcaacgagccctggcagaagcgccctaccgcgcaattgctgatgaccatgcacgaactcgaaggcgaccccttctttgccgatccacgggaagtcctgcgccaggtggtgaccaagttcgacgaactgggcctgaccatctgcgccgctttcgagctggagttctacctgatcgaccaggagaacgtgaacggccggccacagccaccacgctcgccgatttccggcaagcgcccgcactccacccaggtctacctgatcgacgacctcgacgaatacgtcgactgcctccaggacatcctggaaggtgccaaggaacaaggcatcccggccgacgccatcgtcaaggaaagtgccccggcacaattcgaagtcaacctgcaccacgtggccgacccgatcaaggcctgcgactacgcggtcctgctcaagcgcctgatcaagaacatcgcctacgaccatgagatggacaccaccttcatggccaagccttacccgggccaggcgggcaatggtctgcacgttcacatttcggttctggacaaagatggcaagaacatcttcgccagcgaggatcccgagcagaacgccgcactgcgtcacgcgatcggcggtgtgctcgagaccctaccggcgcagatggccttcctctgcccgaacgtcaactcctatcgccgtttcggcgcgcagttctatgtgccgaactcgccgagctggggcctggacaaccgtaccgtggccattcgcgtccccaccggctcggccgatgcagtgcgcatcgaacaccgggtcgccggcgccgacgccaacccctacctgctgatggcttcggtcctggcgggcgtgcaccacggcctgaccaacaagatcgagccgggggcgcctaccgaaggcaactcctacgagcagaacgagcagagcctgccgaacaacctgcgtgatgccctgcgcgagttggacgacagcgaagtcatggccaagtacatcgatccgaaatacatcgatatcttcgtcgcctgcaaggaaagtgagctggaggagtttgaacactccatctccgacctcgagtacaactggtacctgcacaccgtgtaa

SEQ ID NO: 1263 - protein, 458 aa, Pseudomonas fluorescens Pf-5
MSVPPRAVQLNEANAFLKEHPEVLYVDLLIADMNGVVRGKRIERTSLHKVYEKGINLPASLFALDINGSTVESTGLGLDIGDADRICYPIPDTLCNEPWQKRPTAQLLMTMHELEGDPFFADPREVLRQVVTKFDELGLTICAAFELEFYLIDQENVNGRPQPPRSPISGKRPHSTQVYLIDDLDEYVDCLQDILEGAKEQGIPADAIVKESAPAQFEVNLHHVADPIKACDYAVLLKRLIKNIAYDHEMDTTFMAKPYPGQAGNGLHVHISVLDKDGKNIFASEDPEQNAALRHAIGGVLETLPAQMAFLCPNVNSYRRFGAQFYVPNSPSWGLDNRTVAIRVPTGSADAVRIEHRVAGADANPYLLMASVLAGVHHGLTNKIEPGAPTEGNSYEQNEQSLPNNLRDALRELDDSEVMAKYIDPKYIDIFVACKESELEEFEHSISDLEYNWYLHTV

SEQ ID NO: 1264 - DNA, 1371 bp, Colwellia psychrerythraea 34H
  CDS (1)..(1371): transl_table=11
atgataaaagttggacagacaacagaggtagaaaattttctctccaatcacccagaagttgaggctatagatgtcctcatttctgatttagtcggctttgctcgaggaaagcgcattgaaaaaagtagtttagaaaaaatttatagcagtggcttaaatatgcccgctacgatattttccatgaatgtacttggagaaactattgaagagtgtgggctcgggcaagacattggcgagccggatatggtctgtaaacctattgcgaacacccttcatatggcctcttggcatgatcgcccaatcgcgcaagtattaatgagcatgttcaaccacgatggaacgcctttttttgccgacccacgtaatatcttaagtaacgttgttagacaattagcagaaataaatttataccctgttgttgccgttgaattagaattttatctattagataaaaataaagataacaaaggaaatttacaagctcctatctcacctaaaacaggtaaaagagatgaacatactcaagtttactccgtcgatactctgaatgattacagtgcattattagacgatattaatagagtatgtattgagcaaaatgtacctgcagataccgcagtagctgagtgtgcgcctggacaatttgaaataaatttaaaacatgaagccgatccagtcgctgcttgtgataatgcaattttgttaaagcgtattatcaaaacagtggctgataagcataattttgatgcgacctttatggctaagccttattcaaatgaagccggtagtggtatgcatgtccacgccagtcttttagatgagtgcggtaacaatgtctttgctgatgagcataatgattataatgaaacattagaacatgccatcggtggcatgcttgaactaatgccagcttccatgccgttgttatgtcctaacgtgaattcttatcgtcgatttatgccagggtactatgttgcaatggcaaaaaattggggagtagacaacagaacagttgcacttcgccttcctcgaggacataaaaatgcaacgcgtatagaacatcgagtttctggcgctgatgctaacccctatttagtgatggctgtgattttagcctctattcatcatggtataaccaataaaatcaaacctataaatcctacggtaggaaacgcgtttgatgacgactgtgaagcactgccattaaaattggatagagcacttgcagaattagaaaaagatcaaatacttacaagctatttaggcgaagaatttactaaaaactatcacactgttaaacaaaaagagttagagcaatttgatatgcatattagtgagctagaagttaaatggtacttatctaatagctaa

SEQ ID NO: 1265 - protein, 456 aa, Colwellia psychrerythraea 34H
MIKVGQTTEVENFLSNHPEVEAIDVLISDLVGFARGKRIEKSSLEKIYSSGLNMPATIFSMNVLGETIEECGLGQDIGEPDMVCKPIANTLHMASWHDRPIAQVLMSMFNHDGTPFFADPRNILSNVVRQLAEINLYPVVAVELEFYLLDKNKDNKGNLQAPISPKTGKRDEHTQVYSVDTLNDYSALLDDINRVCIEQNVPADTAVAECAPGQFEINLKHEADPVAACDNAILLKRIIKTVADKHNFDATFMAKPYSNEAGSGMHVHASLLDECGNNVFADEHNDYNETLEHAIGGMLELMPASMPLLCPNVNSYRRFMPGYYVAMAKNWGVDNRTVALRLPRGHKNATRIEHRVSGADANPYLVMAVILASIHHGITNKIKPINPTVGNAFDDDCEALPLKLDRALAELEKDQILTSYLGEEFTKNYHTVKQKELEQFDMHISELEVKWYLSNS

SEQ ID NO: 1266 - DNA, 1377 bp, Pseudomonas fluorescens PfO-1
  CDS (1)..(1377): transl_table=11
atgtcggtccctctgcgtgccgttcaactcaacgaagcaaacgcattccttaagaaacatcctgaggttttgtacgtcgaccttctgattgcagacatgaacggtgtggtgcgcggcaagcgcatcgagcgcaccagtcttcacaaggtttacgagaaaggcatcaacctgccggcctcgctctttgccctcgacatcaacggctccacggtggaaagcaccggcctgggcctggacatcggcgacgccgaccgtatctgctacccgatccctggcaccctgagcatcgagccctggcagaagcgcccgaccgcacaactgctgatgaccatgcacgaactggaaggcgagccgttctttgccgacccgcgtgaagtgctggccaacgtggtgcgcaagttcgacgcattgggcctgaccatttgcgccgcgttcgaactcgagttctacctgattgaccaggacaacgtgaacggccgtccgcaatcgccgcgttcgccggtttcgggcaagcgtccggtgtcgacccaggtctatctgatcgacgacctcgacgagtatgtcgactgcctgcaagacatcctcgaaggcgcgaaagagcagggcattcctgccgacgccatcgtcaaggaaagcgccccggcgcaattcgaagtcaacctgcatcacgtgtctgacccgatcaaggcgtgcgactacgccgtcctgctcaagcgtctggtgaagaacatcgcctacgaccacgagatggacaccaccttcatggccaagccgtatccgggccaggcgggcaacggtctgcacgtgcacatttcgattctggacaaagaaggcaataacatcttcgccagcgaggatcccgagcagaacgccgcgctacgccacgcgatcggcggtgtgctggagaccctacctgcgcaaatggccttcctgtgcccgaacgtcaactcgtaccgccgcttcggcgcgcagttttatgtgccgaactcgccgagctggggtatcgacaaccgcaccgtggccgtccgcgttccgaccggttcgccggatgccgtgcgcatcgaacaccgtgtcgccggtgccgacgccaacccatacctgctgatggcttccgtgctggccggtatccaccacggcctgaccaacgaaatcgaaccgggcgccccggtcgaaggcaacagctacgagcagaacgaacagagcctgccgaacaacctgcgcgacgccctgcgtgagctggacgacagcgaagtcatggcccgctacatcgacccgatgtacatcgacgtatttgtcgcgtgcaaggaaagcgagctggccgagttcgaaaactcgatctctgaccttgagtacaactggtatctgcatacggtgtga

SEQ ID NO: 1267 - protein, 458 aa, Pseudomonas fluorescens PfO-1
MSVPLRAVQLNEANAFLKKHPEVLYVDLLIADMNGVVRGKRIERTSLHKVYEKGINLPASLFALDINGSTVESTGLGLDIGDADRICYPIPGTLSIEPWQKRPTAQLLMTMHELEGEPFFADPREVLANVVRKFDALGLTICAAFELEFYLIDQDNVNGRPQSPRSPVSGKRPVSTQVYLIDDLDEYVDCLQDILEGAKEQGIPADAIVKESAPAQFEVNLHHVSDPIKACDYAVLLKRLVKNIAYDHEMDTTFMAKPYPGQAGNGLHVHISILDKEGNNIFASEDPEQNAALRHAIGGVLETLPAQMAFLCPNVNSYRRFGAQFYVPNSPSWGIDNRTVAVRVPTGSPDAVRIEHRVAGADANPYLLMASVLAGIHHGLTNEIEPGAPVEGNSYEQNEQSLPNNLRDALRELDDSEVMARYIDPMYIDVFVACKESELAEFENSISDLEYNWYLHTV

SEQ ID NO: 1268 - DNA, 1365 bp, Pseudomonas fluorescens PfO-1
  CDS (1)..(1365): transl_table=11
atgaaattcgcagccattgaagacgcccgcagctttctcgagcacaaccccgacatcgacatgatcgagctgttcatcctcgacgccaacggcgtgccccgcggcaagctgttgcaccgcgaagaactgctcgccgtatacgaaagtggccgcccgctgccaagcaccatcctcggcctgacggtgcacggcgaagacgtggagaactccggtctggtgtgggacgtcggcgacatcgactgccgcgcctacccgctggaaggcagtctggtacgcctgccgtggcggcagattccgactgctgcggtgcaggtcagcatgcatccggaacaaggcatgccggcgagcattgccgacccgcgtcacctgttgatcaagatcatcgaccgcttgaaagccgagggttaccacccggtaatggcctgcgagctggagttctatctgctcgacgccaaacgcgatcacaacggtcgcccgcaaccggcgctggatgccgacggtggtcgaccgagacacacgcaggtctacggtttgcgtgagctggaacagatcgaaccgttcctcgccgatctctacagcgcctgcaaactgcacggcattccggcgcgcacggcgatctcggaatacgcgccgggccaggtggaaattaccctcgaacacggcgatgcactggaggcgatggaccaggccgtgcgctacaaacgactggtcaaagccgtggcgcacaagcacgggatgcaggcgacgttcatggccaagccgttcgatcacctggctggcaccggcatgcacatgcacgtcagcctcgccgatgccgagggacgcaatctgtttgcctccgaggacccggccggcaccccgctgttgcgcacggcgattggcgggatgctcgcttccctgctcgattcgctgctgctgttctgcccgaacgccaactcctaccgtcgcttccaggccaacagttacgcgccactggcgccgacctggggcgtcgacaaccgtaccgtcagcctgcgcgtgcccggcggcccggccaacacccggcacatcgaacaccgcatctgcggcgccgatgccaacccgtatctggcagcggcggcgatcctggcgggcattcatcgcgggataaaagaagacatcgatccgggtgaaccggtggaaggcaacggttacgcgcaggcgaaagaattgctgccgaccgactggctgacctcgcttacggcgctggagaattcggtgtgggcgcgggatgcgctggggcaggagtttctcggggtgtatctggcggtgaaacgcgcggaataccggcagttcatggctgaagtgggtgagcaggactggcgctggtatctgaccgaagcctga

SEQ ID NO: 1269 - protein, 454 aa, Pseudomonas fluorescens PfO-1
MKFAAIEDARSFLEHNPDIDMIELFILDANGVPRGKLLHREELLAVYESGRPLPSTILGLTVHGEDVENSGLVWDVGDIDCRAYPLEGSLVRLPWRQIPTAAVQVSMHPEQGMPASIADPRHLLIKIIDRLKAEGYHPVMACELEFYLLDAKRDHNGRPQPALDADGGRPRHTQVYGLRELEQIEPFLADLYSACKLHGIPARTAISEYAPGQVEITLEHGDALEAMDQAVRYKRLVKAVAHKHGMQATFMAKPFDHLAGTGMHMHVSLADAEGRNLFASEDPAGTPLLRTAIGGMLASLLDSLLLFCPNANSYRRFQANSYAPLAPTWGVDNRTVSLRVPGGPANTRHIEHRICGADANPYLAAAAILAGIHRGIKEDIDPGEPVEGNGYAQAKELLPTDWLTSLTALENSVWARDALGQEFLGVYLAVKRAEYRQFMAEVGEQDWRWYLTEA

SEQ ID NO: 1270 - DNA, 1377 bp, Pseudomonas fluorescens PfO-1
  CDS (1)..(1377): transl_table=11
atgtcggtacccccgcgtgccgttcagcttaacgaagcgaacgcgttccttaaggaacatcctgaggttctgtacgttgaccttctgattgcggatatgaatggtgtggtgcgcggcaagcgcatcgaacgcaccagcctccacaaggtttacgagaaaggcatcaacctgccggcctctctatttgctctggatatcaatggttcgacggtggaaagcaccggcctgggcctggacatcggcgacgccgaccgtatctgctatccaatccccgataccctgtgcaacgagccatggcagaagcgcccgaccgcgcaactgttgatgaccatgcacgaactcgaaggtgaccctttcttcgccgacccgcgcgaagtgctccgtcaagttgttgcaaagtttgacgagcttggcttgaccatctgcgccgcgttcgaactcgagttttacctgatcgaccaggaaaacgtgaacggccgccctcagccgccacgctcgccgatctccggcaaacgcccgcattcgactcaggtttacctgatcgacgacctcgacgaatacgtcgactgcctccaggacattctggaaggcgccaaagagcaaggtattccggccgacgccatcgtcaaggaaagtgccccggcgcagttcgaagtgaacctgcaccacgtcgccgacccgatcaaggcatgcgactacgcggtcctgctcaagcgtctgatcaagaacatcgcctacgaccatgaaatggacaccactttcatggccaagccgtacccgggccaggcaggcaacggtctgcacgtccacatttcggttctcgacaaagaaggcaaaaacatttttgccagcgaggatcccgagcagaacgccgcgctgcgtcacgcgatcggcggtgtgctcgagaccctgcccgcgcagatggctttcctctgcccgaacgtcaactcctaccgtcgtttcggcgcacagttctacgtgccgaactcgccgagctggggcctggacaaccgcaccgtggccctgcgcgtaccgaccggctccgccgacgcggtccgtctggaacaccgcgttgccggcgccgacgccaacccgtacctgctgatggcttcggtgctggcgggcgtgcaccacggtctgaccaacaagatcgagccaccggctccgaccgaaggcaacagctacgagcagaacgagcagagcctgccgaacaacttgcgcgatgccctgcgcgagctggacgacagcgaggtgatggccaagtacatcgatccgaaatacatcgatatcttcgtcgcctgcaaagagagcgaactggaggagttcgaacactccatctccgacctcgagtacaactggtacctgcacaccgtttaa

SEQ ID NO: 1271 - protein, 458 aa, Pseudomonas fluorescens PfO-1
MSVPPRAVQLNEANAFLKEHPEVLYVDLLIADMNGVVRGKRIERTSLHKVYEKGINLPASLFALDINGSTVESTGLGLDIGDADRICYPIPDTLCNEPWQKRPTAQLLMTMHELEGDPFFADPREVLRQVVAKFDELGLTICAAFELEFYLIDQENVNGRPQPPRSPISGKRPHSTQVYLIDDLDEYVDCLQDILEGAKEQGIPADAIVKESAPAQFEVNLHHVADPIKACDYAVLLKRLIKNIAYDHEMDTTFMAKPYPGQAGNGLHVHISVLDKEGKNIFASEDPEQNAALRHAIGGVLETLPAQMAFLCPNVNSYRRFGAQFYVPNSPSWGLDNRTVALRVPTGSADAVRLEHRVAGADANPYLLMASVLAGVHHGLTNKIEPPAPTEGNSYEQNEQSLPNNLRDALRELDDSEVMAKYIDPKYIDIFVACKESELEEFEHSISDLEYNWYLHTV

SEQ ID NO: 1272 - DNA, 1407 bp, Rhodobacter sphaeroides 2.4.1
  CDS (1)..(1407): transl_table=11
gtgaccgcaacgatgaccgaccagcccagcccctccggttcgaccctcagcgaggccgaaaccttcctcgccgcccatcccgagatcgaggccttcgacatcgtcctgcacgatgccaacggcatcggccgaggcaagatcatccggcgccacgaacttttgtccttctacaagggcgggcggcacctgccgatctcgatcctcgggctcgacatctgcggcgaggatgtccacgagaccggcctgatctgggatcagggcgacggcgacctgcgggcctggccgatccccggcacgctggtgccccttcatggcaccacgccgccgcggggcgaggtcttcatgtgcatgtacgacctcgacggccggccgatgagctcggacccgcgccatgcgctcgcacggcaggtggaggcgctggcggagctgggccttcacccgtcggcggccttcgagctcgaattcttccttctggccaacgagcgcggccccgacgggcgcgtgcagccggcagccgacgtgctggacggccggcgcagcgccaagaccgaggtctattccgtcgatcacctgcacgggatgatgccgctcttctccgacatctatgcgggggccgagacggcggggatcaaggccgagaccatgatctcggaatatgcgccgggccagtacgagctcacgctccattaccgcaccgatgtgctgcaggcggcggacgacctgatgcggctcaagcggatcgtgcgggcgcaggcgcgccgccatggcgtcaccgcctgtttcatggccaagcccgtggaaagctacgccggttcggggatgcatctgcatgtctcgctctgcgatgccgaggggcgcaacatcttcgtcgaggagaccgagggccagtggtcgcgcccgatcctgcacgcgctcggcggcctgcgcgagacgatgggggaatcgatgctggtcttcgcgccgcatgcgaactcctggcggcgcttcgcgagccagagctacgctccggtctcgcccagctggggggtgaacaaccgctcggtcgcgctgcgcatcccggcgggcgacatccgcgcccggcggatcgagcatcgcccggccggggtcgacgccaacccctatctcgtggccgccaccgtgctggccggcatccgccgcgggctcgagcagcagatcgaccccggccccgagaccaccggcaacggctacgaggatccgggcgacacgcagccgatcccgacctgctggcgcagcgccatcgcggcggcggaacattcggccttcctgcgcgaggcgctggggccggacatgcaccgcaccttcaccgccatcaaggccgcggaatatgcccgcgtggcgcggacgatcccggacgtcgactacgatctgtacctccacacggtctga

SEQ ID NO: 1273 - protein, 468 aa, Rhodobacter sphaeroides 2.4.1
MTATMTDQPSPSGSTLSEAETFLAAHPEIEAFDIVLHDANGIGRGKIIRRHELLSFYKGGRHLPISILGLDICGEDVHETGLIWDQGDGDLRAWPIPGTLVPLHGTTPPRGEVFMCMYDLDGRPMSSDPRHALARQVEALAELGLHPSAAFELEFFLLANERGPDGRVQPAADVLDGRRSAKTEVYSVDHLHGMMPLFSDIYAGAETAGIKAETMISEYAPGQYELTLHYRTDVLQAADDLMRLKRIVRAQARRHGVTACFMAKPVESYAGSGMHLHVSLCDAEGRNIFVEETEGQWSRPILHALGGLRETMGESMLVFAPHANSWRRFASQSYAPVSPSWGVNNRSVALRIPAGDIRARRIEHRPAGVDANPYLVAATVLAGIRRGLEQQIDPGPETTGNGYEDPGDTQPIPTCWRSAIAAAEHSAFLREALGPDMHRTFTAIKAAEYARVARTIPDVDYDLYLHTV

SEQ ID NO: 1274 - DNA, 1347 bp, Burkholderia sp. 383
  CDS (1)..(1347): transl_table=11
atggctgacgtcgttcccgcgctggtcgatgaagtccgcgcattccggcaggcgcaccccgagatccgttatgtcgacctgatctgcctcgacctgcccggacatttctacggcaagcgctacccgatcgatgcgctcgaaaaggtggcggccggctcgctgctgaagctgccgcagaactgcatcctgctcggcacgcagggcgggctctacaagatcggcgactactgtttcaacgacggcgacccggacgccgtgcgccggctgatccccggcacgctgaagccggtgacctgggagaagcagccgctcggccagatgctgatcacgacggacggcaccgacgcgccggtcgagttcgagccgcgcgaggtgctcgcgcgcgtgctgaagcggctcgcgcggcgcggcatccggccggtcgtcgcgttcgagctcgagttctacctgttcgccgcgcagctcgaagacgggatgccgaagtatccgcgcgaccgcctgtccgatgatcgcgacgatcagccgaacatgcatatcgagcggctgtcgcgcttctccgacgtgctgcacgaaatggtcgacgtcgcgtgcgtgcagggaatcgacgcgaccgtgatcaccgccgagctcgggccggggcagttcgaaatcaacttcggccattgcgacgacggactgcgcgcggccgactggtcggcgatgttctgccgcagcacgcgcggcgtcgcgttgcagcacggctatcgcgcgagcttcatgggcaagccgtacctgcatgcgccgggcagcgggatgcacgtgcacgtgagcctctacgacgatgcggggcgcaacctgctcgcggcggacgggcagcggccgctgcggcacgcggtggccggatgcctcgccctgctgccgcattgcatgccggtgttcgcgccgaatcacaacgcgttccggcgttacggttcgatggtgaacgcggcgagccgtgcgagctggggcttcgaggatcgcgatgcgtgcatccggattcctgaatcggatgcacgcaacctgcggatcgagcaccggctcgcgagtgcggacgcgaacccgtatctcgtgctcgcggcgattctcagcgggatggagcacgggctcgacgcgaagctcgagccgatcgcaccgctcaacgaggatcgcggcagcgggatcgatttcccgaaggagatgctgtcggcggtcgccgagatgcaggatcatgcggccgtgcgcgaagggctcggcagcgagttcgtgatggtgtattgcgagaacaagcggcaggaagagctggatttccgcaatgaaatcggggcgcgggagtatcggtggttcttgtga

SEQ ID NO: 1275 - protein, 448 aa, Burkholderia sp. 383
MADVVPALVDEVRAFRQAHPEIRYVDLICLDLPGHFYGKRYPIDALEKVAAGSLLKLPQNCILLGTQGGLYKIGDYCFNDGDPDAVRRLIPGTLKPVTWEKQPLGQMLITTDGTDAPVEFEPREVLARVLKRLARRGIRPVVAFELEFYLFAAQLEDGMPKYPRDRLSDDRDDQPNMHIERLSRFSDVLHEMVDVACVQGIDATVITAELGPGQFEINFGHCDDGLRAADWSAMFCRSTRGVALQHGYRASFMGKPYLHAPGSGMHVHVSLYDDAGRNLLAADGQRPLRHAVAGCLALLPHCMPVFAPNHNAFRRYGSMVNAASRASWGFEDRDACIRIPESDARNLRIEHRLASADANPYLVLAAILSGMEHGLDAKLEPIAPLNEDRGSGIDFPKEMLSAVAEMQDHAAVREGLGSEFVMVYCENKRQEELDFRNEIGAREYRWFL

SEQ ID NO: 1276 - DNA, 1365 bp, Rhodospirillum rubrum ATCC 11170
  CDS (1)..(1365): transl_table=11
atgacggttcttccccccgccgatggcggcgccttgttgcgcgaagaggtgcggcgtttccgcgaggcccatcccgatatcgcctatgtcgatctgctgtcgctggatctgcccgggcatttctatggcaagcgcctgccgatcgccatgctcgacgatatcgccgccggcgcgccgctcaagctgccgcaaaacgccattatcctcggtgccaccggcggcgtctatccgatcggccgctatgccttggaagacggcgatcccgatgcgccgcgccgtctggtcgccggcaccctggcccccgtgccctgggaaagccggccgaccgcccagatgctggtgacctccagcggcaccgatcacccggtgtgcttcgagccgcgcgaggttctgaacggcgtcgtcgaacggctgcgcgccaagggtctgttccccaccgtcgccttcgagctggaattctatctgctgtcccaagaccgccccgacggcctgatcgccccgccgcgcgacccgctgtcgggccgggccgatctgcatccggccatgcatatcgagcggctaagccgcttttcggacgtgctgcacgccatcatcgacgccgcccaggcccagggcatcgagacgacggcgatgagcgcggaagtcggcctggggcaatacgagatcaatttcgcccattgcgccgatccgctgcgcgccgccgactggtcggcgctgttttgccgagcaacgcgcggcgtggcgatgcgccatggctatcaggcgaccttcctgtccaagccctatctgcagagcgcgggcagcggcatgcatctgcatgtcagcctgtgcgacgagcgcggcgccaatctgctcgccccggagaacgcgctcggcctgaagcgcgccgtcgccggctgtctggccctgatgccggccagcgtcgccctgttctcggccaatcacaacgccttccgccgctcggccagcggcgcggtcaatacggcggccggtggctgctggggctgggacgatcgctcggcgggcatccgcatcccgccctcgggtccggcggctttgcgcctggaacaccgggtggccggggccgacgccaatccctatctggcgctggccgccatccttgccgggatggactacggccttgagtgcgcccttgatccccgccccacccgcgaggaggccccaagcgccagcgtcgccctgcccggcgatatgctcgaggccctgcgcacgatggacgccagcgccgaactccgcgcccgcctgggcgatgagttcgtcaccgtctacaccaccatgaagcgccaggatcatctggctttcctggggatgatcagtcctcgggaatacgactggtatttgtga

SEQ ID NO: 1277 - protein, 454 aa, Rhodospirillum rubrum ATCC 11170
MTVLPPADGGALLREEVRRFREAHPDIAYVDLLSLDLPGHFYGKRLPIAMLDDIAAGAPLKLPQNAIILGATGGVYPIGRYALEDGDPDAPRRLVAGTLAPVPWESRPTAQMLVTSSGTDHPVCFEPREVLNGVVERLRAKGLFPTVAFELEFYLLSQDRPDGLIAPPRDPLSGRADLHPAMHIERLSRFSDVLHAIIDAAQAQGIETTAMSAEVGLGQYEINFAHCADPLRAADWSALFCRATRGVAMRHGYQATFLSKPYLQSAGSGMHLHVSLCDERGANLLAPENALGLKRAVAGCLALMPASVALFSANHNAFRRSASGAVNTAAGGCWGWDDRSAGIRIPPSGPAALRLEHRVAGADANPYLALAAILAGMDYGLECALDPRPTREEAPSASVALPGDMLEALRTMDASAELRARLGDEFVTVYTTMKRQDHLAFLGMISPREYDWYL

SEQ ID NO: 1278 - DNA, 1365 bp, Pseudomonas aeruginosa UCBPP-PA14
  CDS (1)..(1365)
atgaacttcgcctgcgaacaagaagcccaggatttcctggccgccaatcccgatatcgaactcttcgaactgttcatcctcgacgccaatggcgtgccacgcggcaaactgctgcaccgcgacgaactgctggccgtctaccgcagcggccggccgctgccgagcaccatcctggggctgacaatgaacggcgaggatgtcgaggactccggcctggtctgggacgtcggcgacatcgactgccgcgcctaccccctgtccggcagcctggtgcgcctgccctggcggcagatcccgacggcggcggtgcaggtcagcatgcacccgagcgagggcctgcccgccagcgtcgccgatccgcgccacctcctggtgcgcaccatcgacgcgctgaagagcgagggctatcacccggtgatggccgccgagctggagttctacctgctcgaccgtcagcgcgacgccaacggccgcccgcaaccggctcgcgacgccgatggcggccgcccgcgggcgacccaggtctacggcctgcgcgaactggagcagatcgagccgttcctcgccgacctctatgccgcatgcaaggcgcagggcctgccggcacgcacggcgatctcggaatacgccccgggccaggtggaaatcaccctcgaccacggcgacgccctagtcgccatggaccaggcgatccgctacaagcgcctggtcaagggcgtcgcgcacaagcacggaatgctcgcctgcttcatggccaagccgttcgacgacctggccggcaccggcatgcacctgcacgtcagcctggccgacgaacaaggccacaacctgttcgccagcgacgaccccgccggcacgccgttgctgcgccaggcggtcggcggcatgctcgccagcctgctcgactcgctcctgctgttctgtcccaacgccaactcctaccggcgcttccaggccaacagctacgcgccgctggcgcagacctggggcgtcgacaaccgcaccgtgagcctgcgcgtgccgggcggcccggcctccagtcggcatatcgagcaccgcatctgcggcgccgacgccaacccctacctggccgccgcggcgcttctcgccggggtccaccgcggcatccgcgaaggcatcgatccgggcgcgccggtggagggcaatggctacgcccaggccggcaagcgcctgcccaccgactggctgaccgccctcgacgccctgcaaggctccgagtgggcgcgggaagccttcggcgagccgttcctcggcgtctacctggcggtgaagcgcgcggaataccggcaattcatgggcgaggtcggcgagcaggactggcgctggtacctgacccaggcctga

SEQ ID NO: 1279 - protein, 454 aa, Pseudomonas aeruginosa UCBPP-PA14
MNFACEQEAQDFLAANPDIELFELFILDANGVPRGKLLHRDELLAVYRSGRPLPSTILGLTMNGEDVEDSGLVWDVGDIDCRAYPLSGSLVRLPWRQIPTAAVQVSMHPSEGLPASVADPRHLLVRTIDALKSEGYHPVMAAELEFYLLDRQRDANGRPQPARDADGGRPRATQVYGLRELEQIEPFLADLYAACKAQGLPARTAISEYAPGQVEITLDHGDALVAMDQAIRYKRLVKGVAHKHGMLACFMAKPFDDLAGTGMHLHVSLADEQGHNLFASDDPAGTPLLRQAVGGMLASLLDSLLLFCPNANSYRRFQANSYAPLAQTWGVDNRTVSLRVPGGPASSRHIEHRICGADANPYLAAAALLAGVHRGIREGIDPGAPVEGNGYAQAGKRLPTDWLTALDALQGSEWAREAFGEPFLGVYLAVKRAEYRQFMGEVGEQDWRWYLTQA

SEQ ID NO: 1280 - DNA, 1377 bp, Pseudomonas aeruginosa UCBPP-PA14
  CDS (1)..(1377)
atgtcggtacccctgcgtgccgttcagctcactgagccgagcctgttccttcaggaacatcccgaggtccagttcgtcgaccttctgatttcagacatgaatggcgtggttcgcggcaagcgaatcgaacgcaacagtctgcccaaagtcttcgaaaaaggtatcaaccttcccgcttccctgttcgccctcgatatcaccggctccaccgtagagagtaccggcctgggtctcgacatcggcgacgccgaccggatctgctacccgatccccggcaccctctccatggaaccctggcagaagcggccaaccgcgcaactgctgatgaccatgcatgagctggaaggtgatcccttcttcgccgacccccgcgaagtcctgcgccaggtggtggccaggttcaccgagatggaactgaccatcgtcgccgccttcgagctggagttctacctgatcgaccaggagaacgtgaacggccggccgcagccgccgcgctcgccgatctccggcaaacgtccgcagtcggtgcaggtgtattccatcgacgacctcgacgaatacgtcgagtgcctccaggacatcatcgacggcgcccgcgcccagggcatcccggccgacgccatcgtcgccgaatccgcaccggcgcagttcgaggtcaacctgcatcacgtcgccgacccgatgaaggcctgcgactatgcggtgctgctcaagcgcctgatcaagaacatcgcctacgaccacgagatggacaccaccttcatggccaagccctatccgggccaggctgggaacggactgcacgtgcacatctcgctgctcgacaagcacggcaacaacatcttcaccggcgaggatcccgagcagaacgccgcattgcgccatgcgatcggcggcgtgctcgagaccctgccggcctccatggccttcctctgcccgaacgtcaactcctaccgccgcttcggttcgcagttctacgtgccgaacgcgccgagctggggcctggacaaccgcaccgtggccctgcgcgtgcccaccggcagcccggacgcggtacgcctggaacatcgcgtcgccggcgccgacgccaacccctacctgctgctggcctcggtgctggccggggtacaccacggcctgaccaaccaggtcgagccgggcgcgccgatcgaaggcaactcctacgagcagttggagccgagcctgccgaacaacctgcgcgacgccctgcgtgaactggacgacagcgagatcctggcgaagtacatcgatccgaagtacatcgacatcttcgtcgcctgcaaggaaagcgagctggaggagttcgagtactcgatctccgacctcgagtacaactggtacctgcacaccgtgtga

SEQ ID NO: 1281 - protein, 458 aa, Pseudomonas aeruginosa UCBPP-PA14
MSVPLRAVQLTEPSLFLQEHPEVQFVDLLISDMNGVVRGKRIERNSLPKVFEKGINLPASLFALDITGSTVESTGLGLDIGDADRICYPIPGTLSMEPWQKRPTAQLLMTMHELEGDPFFADPREVLRQVVARFTEMELTIVAAFELEFYLIDQENVNGRPQPPRSPISGKRPQSVQVYSIDDLDEYVECLQDIIDGARAQGIPADAIVAESAPAQFEVNLHHVADPMKACDYAVLLKRLIKNIAYDHEMDTTFMAKPYPGQAGNGLHVHISLLDKHGNNIFTGEDPEQNAALRHAIGGVLETLPASMAFLCPNVNSYRRFGSQFYVPNAPSWGLDNRTVALRVPTGSPDAVRLEHRVAGADANPYLLLASVLAGVHHGLTNQVEPGAPIEGNSYEQLEPSLPNNLRDALRELDDSEILAKYIDPKYIDIFVACKESELEEFEYSISDLEYNWYLHTV

SEQ ID NO: 1282 - DNA, 1368 bp, Pseudomonas aeruginosa UCBPP-PA14
  CDS (1)..(1368)
atgcatttcgccgatccgcgggaagcccgcgagttcctcgccgcacaccccgaggtgcgcagcatcgagctgttcctgatcgacgccaacggcgtgccgcgcggcaagctgctgcatcgcgacgagctgctggcggtctacgaaagcgggcggccgctgccgagcaccatcctcggcctgaccatcaatggcgatgacgtcgaggagaccggcctggtctgggacgtcggcgatgccgattgctggaccttcccgctgcccggcagcctgaccctgcaaccctggcggcagtcaccgaccggacaggtgcaggtcagcatgcatcccgagttcgggctaccggccgcggcgggcgatccccggcatgtgctgcagcgggttatccacagcctgcaggcggagggtttccacccggtgatggcggtggaactggagttctacctgctcgaccgcgaacgcgacagcgacggccggccgttgccggcgttgcagatgaatggccagcggccgcgggcgacccaggtctatggcgtctacgagctggagcagttgcagccattcctcgatgacttgtatgccgcctgcgaggcccagggcctgccggcgcgcacggcgatctcggagtacgcgccggggcaggtggagattaccctgcagcaccgcttcgacgcgctccaggcgatcgacgaaggcgtgcgctacaagcgcctggtcaagggtgtggcgaatcgccatgggttgcaggcctgcttcatggccaagccgttcgccgatctatccggcaacggcctgcacctgcacgtcagcctggccgacgccgctggcaacaatctgttcgccagcaaggacccggccgggaccccgctgctgcgccaggccatcggtggaatgaaggcgtgcctgctggagtctttggcgctgttctgtccgaacgccaactcgttccgccgcttccaggcgaacagctacgcgccgctggcgccgacctggggaatcaacaaccgcaccgtgtcgctgcgggttcccggcggcccgccgtccagccggcacatcgagcaccgcatctgcggcgccgacgccaatccctacctggcggcggcggcgttgctcgcggcggtgcgcctgggtattcgcgagcgactcgaccccggtgcgccgatcactggcaacggctacgctcaagccacccaggcgttgccgagcgactggctgaccgcgctgcgcgcgctggagggctcggcctgggcgcgcgaggcgctcggcgaggatttcctgaagatctacctggcgatcaagcaggccgaataccgtgccttcatgggcgaggtcggcgagcaggactggcgctggtatctcaaccaggcctga

SEQ ID NO: 1283 - protein, 455 aa, Pseudomonas aeruginosa UCBPP-PA14
MHFADPREAREFLAAHPEVRSIELFLIDANGVPRGKLLHRDELLAVYESGRPLPSTILGLTINGDDVEETGLVWDVGDADCWTFPLPGSLTLQPWRQSPTGQVQVSMHPEFGLPAAAGDPRHVLQRVIHSLQAEGFHPVMAVELEFYLLDRERDSDGRPLPALQMNGQRPRATQVYGVYELEQLQPFLDDLYAACEAQGLPARTAISEYAPGQVEITLQHRFDALQAIDEGVRYKRLVKGVANRHGLQACFMAKPFADLSGNGLHLHVSLADAAGNNLFASKDPAGTPLLRQAIGGMKACLLESLALFCPNANSFRRFQANSYAPLAPTWGINNRTVSLRVPGGPPSSRHIEHRICGADANPYLAAAALLAAVRLGIRERLDPGAPITGNGYAQATQALPSDWLTALRALEGSAWAREALGEDFLKIYLAIKQAEYRAFMGEVGEQDWRWYLNQA

SEQ ID NO: 1284 - DNA, 1347 bp, Burkholderia vietnamiensis G4
  CDS (1)..(1347): transl_table=11
atggctgacgtcgttcccgcgctggtcgatgaagtgcgcgcatttcggcacgcgtatcccgagatccgttatgtcgacctgatctgcctcgacctgccgggccatttctacggcaagcgctatccgatcgatgcgctcgagaaggtcgcgaccggctcgctgctgaagctgccgcagaactgcgtgctgctcggcacgcagggcgggctctacaagatcggcgactactgcttcaacgacggcgacccggacgcgccgcgccggctgattcccggcacgctgaagccggtgcgctgggagcggcagccgctcgcgcagatgctgatcagctcggacggcaccgacgcgccgatcgagttcgagccgcgcgaggtgctcgcgcgcgtgctgcgacgattcgcggcgcgcggcatccggccggtcgtcgcgttcgagctggagttctacctgttcgccgcacagctcgccgacggcatgccgcagtatccgcgcgaccgcctgagcgacgacgccgacgatcagccgaacatgcacatcgagcgtctgtcgcgtttctccgacgtgctgcacgagatggtggaagcggcgcgcgagcagggcgtcgacgcgaccgtgatcaccgcggagctcgggcccggccagttcgagatcaatttcggccacagcgacgacgcgctgcgtgcggccgactggtcggcgctgttctgtcgcagcacgcgcggcgtcgcgttgcggcacggctatcgcgcgagcttcatgggcaagccgtacctgcatgcgcccggcagcgggatgcacgtgcacgtgagcctctacgacgaagctggccgcaacgtgctcgcggccgacgatcagcggccgctgcggcacgcggtggccggctgtctcgcgctgctgccgcattgcatgccggtgttcgcaccgaatcacaacgcgtttcgccgctacgggtcgatggtgaacgcggcgagccgcgcgagctggggcttcgaggatcgcgacgcgtgcctgcggattccggagtccgatgcgcgcaatctgcgcatcgagcatcggctcgcgagtgcggacgcgaatccgtatctggtgctcgcggcgattcttaccggcatcgagcatgggctcgacgcgcggctcgaaccgatcgcgccgctcaacgacgatcgcggcagcggcatcgacttcccgaaggagatgctgtcggcagtcgccgcgatgcaggatcatgcggccgtgcgcgatgggctcggcagcgaattcgtgatggtgtactgcgagaacaagcggcaggaagagctggattttcgcaacgagatcggcgcgcgcgagtatcgctggtttctgtga

SEQ ID NO: 1285 - protein, 448 aa, Burkholderia vietnamiensis G4
MADVVPALVDEVRAFRHAYPEIRYVDLICLDLPGHFYGKRYPIDALEKVATGSLLKLPQNCVLLGTQGGLYKIGDYCFNDGDPDAPRRLIPGTLKPVRWERQPLAQMLISSDGTDAPIEFEPREVLARVLRRFAARGIRPVVAFELEFYLFAAQLADGMPQYPRDRLSDDADDQPNMHIERLSRFSDVLHEMVEAAREQGVDATVITAELGPGQFEINFGHSDDALRAADWSALFCRSTRGVALRHGYRASFMGKPYLHAPGSGMHVHVSLYDEAGRNVLAADDQRPLRHAVAGCLALLPHCMPVFAPNHNAFRRYGSMVNAASRASWGFEDRDACLRIPESDARNLRIEHRLASADANPYLVLAAILTGIEHGLDARLEPIAPLNDDRGSGIDFPKEMLSAVAAMQDHAAVRDGLGSEFVMVYCENKRQEELDFRNEIGAREYRWFL

SEQ ID NO: 1286 - DNA, 1338 bp, Oceanospirillum sp. MED92
  CDS (1)..(1338): transl_table=11
atgtcttctaataacgataaagaatttgatctgtttattaccgaccttaacggtaatcttcgcggcaaacgtatgcctgcgaatgctttaagcaaagtgatggaagagggggtaaaactacctcgctctgttatcggctttgatttctggggtgatgatgtactggacaacggtctggtatttgagactggcgacagtgatggcatctgcatgccagtacatgacgaagcggtacctgtaccttgggctgactccccacgtaaccagattctggcaactatgttcaaccccgatggtacgccttttagtgctgatcctcgtcaggcgctgaacgcggttgttgatcgttttaagaaactgggcctgacgccggttgttgcaaccgagcttgagttctacctgatggacggtaagtccgaagaaactcagcgcccacagccacctattctagtagaaggtcacggtcgccgtctggcggaaactgactgctactcgatcgatgagatggacggtctgtcttcattctttgctgaagtacgtgaagtgtgcgaacagcagggtgtgcctgctgacaccattatctctgagcttggccctggccagtttgagatcaaccttaaccatgtacctaacccgatgctggctggtgatcaggcgatcatgttcaagcgtctcgtacgcggtattgcacgcaagcacggatactccgcaacctttatggcgaagccttatgccaacaagagcggtaacggtttccacgtgcacttcagcttgctgaatgaagcaggtatcaatgtcttcgataatggtggagacgaaggtaccgatgtactgaagcatgcggttgcaggcctgatgaatactatggcggacagcatgctggcgttcgcgccgcatatgaactcttaccgccgctttatggtgggtgcgcacgcgccgacttgtgcaagctggggctatgaaaaccgcactgtagctattcgaattccagacagcccgccggttgcccgtcgtatcgaacatcgtgtagcgggggccgatgcgaacccttatctggtgttggcaacgattctggcgggtgctttatatggtatcgagaacaaactgatgccgcctgcgccgatcgctggtgatgcttataccgaagcaaaccaggatctgatcctgccaaataagtgggatgatgcgacagatatctttaatcgcagtgatgtgatgcgcgaatatctgggtgaagagtttgtacgggtctttaccgcagcgaaacgtcaggagctgcgtaaattacacgcgcagatctccgatatagaatacgaatcctacctcggatttttataa

SEQ ID NO: 1287 - protein, 445 aa, Oceanospirillum sp. MED92
MSSNNDKEFDLFITDLNGNLRGKRMPANALSKVMEEGVKLPRSVIGFDFWGDDVLDNGLVFETGDSDGICMPVHDEAVPVPWADSPRNQILATMFNPDGTPFSADPRQALNAVVDRFKKLGLTPVVATELEFYLMDGKSEETQRPQPPILVEGHGRRLAETDCYSIDEMDGLSSFFAEVREVCEQQGVPADTIISELGPGQFEINLNHVPNPMLAGDQAIMFKRLVRGIARKHGYSATFMAKPYANKSGNGFHVHFSLLNEAGINVFDNGGDEGTDVLKHAVAGLMNTMADSMLAFAPHMNSYRRFMVGAHAPTCASWGYENRTVAIRIPDSPPVARRIEHRVAGADANPYLVLATILAGALYGIENKLMPPAPIAGDAYTEANQDLILPNKWDDATDIFNRSDVMREYLGEEFVRVFTAAKRQELRKLHAQISDIEYESYLGFL

SEQ ID NO: 1288 - DNA, 1401 bp, Xanthobacter autotrophicus Py2
  CDS (1)..(1401): transl_table=11
atgcaggcccaggttccaggccgccgacccgaccctgccgcggccctcggggtcacggacgaggcggcggattatgtgacagccttcggcgtgccggaggtggtggaggttcttctgcccgacacctccgcggtgctgcggggcaagtggattcccggccattccctgggcaagatctggaaggacggcgtggccatcccgctctccatcttcggcctcgatgtctggggctgcgaggtggacgccaccgagatccacatggagaccggcgacaaggacggcctgtgctggccggtgccggggacgctgaagccggtgccctgggcgtcgcgccacaccgcgcaggtgctcatcaccatgcacgagcccgacggctcggcccgcggcaggccgtggaagctcgatccgcgccagcaactcgccgccgtggtggagcgcttcgccgcgcgcgggctcaccccctgcgtcgccttcgaactggaattctacctgctgaagccgtcggacgtgccgggcgcgccgcccgagccggtgttccaggccaccgggcaggcgcggcagaacatgtacgccatgtccgacctcgacgcctacgccgaggtcctgcacgacatgcgcgccgcgtgcgtcacgcagggcctgcccgccgataccgtgatcgcggaggcggcgcccggccagttcgaggtcaatctctaccacaaggtggatgcgctcggcgccgccgacgacgcggtgctgctgcgccggctgatcgacggcgtggcacgccgccatgggctgaaggccaccttcatggccaagccgctggcggatttcgccggcaacgggatgcatgtccatgccagcctgatggagcatggcggcggcaacctgttcgcccgcgaggacggggtgggcgacaccgccctgcgccatgccgcgggcggcatgctggccagcatggccgacgccacgctcattttcgtgccgagcttcaacggctatcgccggctagtgccgggcagctacgcgccgacctcggcgagctggggcttcgacaaccggctggtggcggtgcgcgtgcccaacggcccgcgccacgcccgccggctggagcaccgcatcgccggggcggaggctcacccccacctcgtgctcgcggccatcctcgccggcatgctggacgggctggagcggggcatcgagccgccgccgccgctggaaggcaacgcctacgagcagatcggcgagcccctgtcgccagatatggaggtggcggtggaccgcttcgccgcctccgacttcatcgcccgcaccttcggggaggactaccggcgcatctatgaggccatgaagcgggaggaattggctgcattccgcagggtcatccttccattggagtacgaaacgtatttgtga

SEQ ID NO: 1289 - protein, 466 aa, Xanthobacter autotrophicus Py2
MQAQVPGRRPDPAAALGVTDEAADYVTAFGVPEVVEVLLPDTSAVLRGKWIPGHSLGKIWKDGVAIPLSIFGLDVWGCEVDATEIHMETGDKDGLCWPVPGTLKPVPWASRHTAQVLITMHEPDGSARGRPWKLDPRQQLAAVVERFAARGLTPCVAFELEFYLLKPSDVPGAPPEPVFQATGQARQNMYAMSDLDAYAEVLHDMRAACVTQGLPADTVIAEAAPGQFEVNLYHKVDALGAADDAVLLRRLIDGVARRHGLKATFMAKPLADFAGNGMHVHASLMEHGGGNLFAREDGVGDTALRHAAGGMLASMADATLIFVPSFNGYRRLVPGSYAPTSASWGFDNRLVAVRVPNGPRHARRLEHRIAGAEAHPHLVLAAILAGMLDGLERGIEPPPPLEGNAYEQIGEPLSPDMEVAVDRFAASDFIARTFGEDYRRIYEAMKREELAAFRRVILPLEYETYL

SEQ ID NO: 1290 - DNA, 1380 bp, Xanthobacter autotrophicus Py2
  CDS (1)..(1380): transl_table=11
atgggcacgccttctcccagcggctcggatctcgatgaagccaaggccttccttgcgcgccatccggatctgcaagccatcgacatcatcctgaccgattaccacggcatcggccgcggcaagaccatccggcgccatgagctggaggcgctctacagcaccggccggggcatgcccgcctccttgttcgggcaggatgtggccggcgacgacgtggaggagagcggcctcatcctcaccgacggcggcggcgatcaggtctgctggccgatccccggcaccctcgggctcctgcccgccaccgggcggggccaagtgctggtgagcatgtaccacggcgacggcacgccgcttggcgtcgagccgcgccacgcgctgggccggcaggtggcccgggcccgcgccgccggtttcgagcccatgggggcgctggagctggaattctatctggtggaccgggagcgcgatgcgagcgggcggtaccagccggcgcgctatgccctcaccgggcggcgctcgcttgccaccaacaccatgtcggtggacgagctggacgagatgtctcccctgttcgacgccatctacgcgggcgcggcggagctgggtgtgccgctggagtcactcatctccgagtacgcgccggggcagtatgagctgaccatccgctatcgcgacctggcgcgggcaaccgacgatgtgatcatcgccaagcggctgatccgcgccaccgcgcgccgcttcggcatggaagcctgcttcatggccaagccgttcggcgatcgctccggctcgggcatgcacctgcatctgtcgctggccggggcgggcggcgccaatttgttcgcggacctgccctcgggcgagctgagccccctcatgctccacgccatcggcggcatccgcgcgaccatcgccgacaccatgctggtgctggcgccgttcctcaattcctggcggcgctttgcctctgtggtctattccccggtctcggacacctggggcgtggagaaccggacggtggcagtccgcgtgccttcgggcagcgccaagggccgccatttcgagcaccgggtggcgggggtggatgccaacccctatctggtggcggcggtgacgctggccggcgcgctcgacggcatcgcgcagcgccgcgatcccggcccgccggcggagggcaattcctatgcgggcgcgcgggcggtccatctgccgcgcagctggctggacgccatcgactgcttcgcgcaatcggacttcgcaaagcaggcgctgggggcggagctacaccacagcttcgccgccatcaagcgcgcggaatggctgcgcctcgcgctggaagtgtccgatgccgagtgggcgctttacggcttcacggtctga

SEQ ID NO: 1291 - protein, 459 aa, Xanthobacter autotrophicus Py2
MGTPSPSGSDLDEAKAFLARHPDLQAIDIILTDYHGIGRGKTIRRHELEALYSTGRGMPASLFGQDVAGDDVEESGLILTDGGGDQVCWPIPGTLGLLPATGRGQVLVSMYHGDGTPLGVEPRHALGRQVARARAAGFEPMGALELEFYLVDRERDASGRYQPARYALTGRRSLATNTMSVDELDEMSPLFDAIYAGAAELGVPLESLISEYAPGQYELTIRYRDLARATDDVIIAKRLIRATARRFGMEACFMAKPFGDRSGSGMHLHLSLAGAGGANLFADLPSGELSPLMLHAIGGIRATIADTMLVLAPFLNSWRRFASVVYSPVSDTWGVENRTVAVRVPSGSAKGRHFEHRVAGVDANPYLVAAVTLAGALDGIAQRRDPGPPAEGNSYAGARAVHLPRSWLDAIDCFAQSDFAKQALGAELHHSFAAIKRAEWLRLALEVSDAEWALYGFTV

SEQ ID NO: 1292 - DNA, 1395 bp, marine gamma proteobacterium HTCC2207
  CDS (1)..(1395): transl_table=11
ttgattaacacaaccgccggaaaaatagagctcaatatgaaatccatcgatgcgctaacgcagtttttacagacccatcccgatgtcgagactttcgaggttattcttcacgatctaaacggtatccaccgtggcaaatggctgcctcgggagcagattgataagctctttgagggcggctataaaatgccgcagagtacatgctcactggactgctggggccgcgatctcgaacagttggtagcggcaaccggcgatacagacggcatatgcacgcctcacccagaaactctggcagtggtgccctgggctagtagacccacagcgcagattattgtctctatgcttagtcccgatggtcagtcagactatcccgccgatcccagagtcgtcctacaacaggttttagcgcgctatacaaagctcggcttaaccccagtggtggccagcgagatggaattccatctgctggaaatcgaccgcgaccaatttggccgtccccagcatactcagcgcgccctcgacggatcgccagcactgggaggggctacctatggtatcgaggctatgcgcaaaatagccccgttgatggatgccattaacagtaccgcagggcaacagaatttaccggtagatactttaattagtgagtttggcgcctctcagtgcgagattaatttacattatcaggactgcgctctgcgcgcttgtgatcaggccagtatgttacgcagagcgattcgcgctgtggctcatcagcagggtaagcaggccagctttatggccaagccctttgctgatgatgtgggcaatggcatgcatatccactttagtttgatcgacaacaaccgcaacaatgtctttgataatggcacccctgagggcagtgacctcttgcaccatgcagttgccggctgtctcgataatatggccgactctatggcgatctttgcaccgaatattaattcctgcagacgattggtgcccggctgttatgcgcccacagcgcccacctggggttatgaaaatcgcactacagcgctgcgtattcctgctgggaaaggtcatgctatgcgcatcgagcaccgggttgcaggtgctgatgccaatgtctatttaacggtggcggcaatgttggctgccgcgctccatggcattgagaaaaaactactgccgccagcggccatcgtaggtgatgctggagaattggccataaaagcagagcaacagctgccgcgcttctggggcgatgcattgcagcgttttgaacagtctgagtttgtagagggttatttgggcgaggcgtttcagacggtttatgcgcagagcaagcgcagtgaaaaagccgagtttgatagccgcgtgacgctgctggagtacgatgcctacctctga

SEQ ID NO: 1293 - protein, 464 aa, marine gamma proteobacterium HTCC2207
MINTTAGKIELNMKSIDALTQFLQTHPDVETFEVILHDLNGIHRGKWLPREQIDKLFEGGYKMPQSTCSLDCWGRDLEQLVAATGDTDGICTPHPETLAVVPWASRPTAQIIVSMLSPDGQSDYPADPRVVLQQVLARYTKLGLTPVVASEMEFHLLEIDRDQFGRPQHTQRALDGSPALGGATYGIEAMRKIAPLMDAINSTAGQQNLPVDTLISEFGASQCEINLHYQDCALRACDQASMLRRAIRAVAHQQGKQASFMAKPFADDVGNGMHIHFSLIDNNRNNVFDNGTPEGSDLLHHAVAGCLDNMADSMAIFAPNINSCRRLVPGCYAPTAPTWGYENRTTALRIPAGKGHAMRIEHRVAGADANVYLTVAAMLAAALHGIEKKLLPPAAIVGDAGELAIKAEQQLPRFWGDALQRFEQSEFVEGYLGEAFQTVYAQSKRSEKAEFDSRVTLLEYDAYL

SEQ ID NO: 1294 - DNA, 1365 bp, Oceanobacter sp. RED65
  CDS (1)..(1365): transl_table=11
atgaaatcacgttcagtattggataggtttttaaagcaacatcctgatgttgaaactattgaattacttgtcgcagatacatctggggtgttacgtggtaagcgagtggaaaaaagcttactgactaaagtgtttgagcaaggcttttatttacctggatcaatcatgtctttggatgcaactggcgccactgttgaagaagcgggactgggcgcaaaagttggcgataaagatcgtttgtgtaaaccaatacctgaaactttgagtattgtgccttggcatgatgccagggatcgagctcaggtcttatgcaccatgcatgaagatgatggttctgcgttttttgccgacccacgccaagtactaaagcgcgcagtagataaatttgaaaccctgggctacacaccaggtatcgcattggaattagaattttatttgatcgatcctgagcgtgacattaatggtcaaatccagccgcctttaattcccgggactaaccgtcgaatgacctcttgccaagtctatagtatcgacgaactggacgattatgacttttttattcgagatgttatagaagctgctgcgcaacaagggattcctgccgataccgttatcgcggaatatgcaccaggccagtttgaagtgaatctaaactacggcaacgatattttagcggctgccgataatgccattttattgaagcgcgtgattcatagtgtggcgaaaaaacatggcatgatggcatcattcatggcaaagccttacatccaagagagcggtaacgggctgcacattcatttgtccctgatggatgagcaaggtaacaatattttcgctgatgatgatcccacgcaaaatccctttatgcgccatgcggtggcgggtttattggacatggcagatgctactcaggctttcttatttcctaacatcaatagttatcgtcgattggatcccggcgcctatgcaccgaccagtaaaacatggggtaatgacaatcgtacggtagccattcgaattccttctggtggtaaagatgcgacgcgtttagagcatcgtattagtggagctgatgccaatccgtatttggctgttacgtctatattagccggtgttgtggagggtattaccaatgaactgacacccccagaggctgtagtaggagatgcttacgagcaagaccacgaacatattagtgacaacgcacgggatgcgctgcgcaatatggaaggggatgcgcgcatccaagagtggttcggaaaggattttgttcaggtttatagcatttgcaaatggcaagaaattcgattgtttgaacatcagataactgccaaggaatatgatttacttctgccgtacctttag

SEQ ID NO: 1295 - protein, 454 aa, Oceanobacter sp. RED65
MKSRSVLDRFLKQHPDVETIELLVADTSGVLRGKRVEKSLLTKVFEQGFYLPGSIMSLDATGATVEEAGLGAKVGDKDRLCKPIPETLSIVPWHDARDRAQVLCTMHEDDGSAFFADPRQVLKRAVDKFETLGYTPGIALELEFYLIDPERDINGQIQPPLIPGTNRRMTSCQVYSIDELDDYDFFIRDVIEAAAQQGIPADTVIAEYAPGQFEVNLNYGNDILAAADNAILLKRVIHSVAKKHGMMASFMAKPYIQESGNGLHIHLSLMDEQGNNIFADDDPTQNPFMRHAVAGLLDMADATQAFLFPNINSYRRLDPGAYAPTSKTWGNDNRTVAIRIPSGGKDATRLEHRISGADANPYLAVTSILAGVVEGITNELTPPEAVVGDAYEQDHEHISDNARDALRNMEGDARIQEWFGKDFVQVYSICKWQEIRLFEHQITAKEYDLLLPYL

SEQ ID NO: 1296 - DNA, 1419 bp, Escherichia coli; identical to SEQ ID NO: 1201
  CDS (1)..(1419)

SEQ ID NO: 1297 - protein, 472 aa, Escherichia coli; identical to SEQ ID NO: 1202

SEQ ID NO: 1298 - DNA, 25 bp, Artificial sequence
  primer
atgcatacagattcgaatggtggtc

SEQ ID NO: 1299 - DNA, 24 bp, Artificial sequence
  primer
ttacgcgtttttcaacatccactc

SEQ ID NO: 1300 - protein, 462 aa, Artificial sequence
  consensus sequence
  Variant (2)..(14): Xaa in position 2 to 14 is any amino acid
  Variant (15)..(15): Xaa in position 15 is any or no amino acid
  Variant (17)..(18): Xaa in position 17 to 18 is any amino acid
  Variant (20)..(21): Xaa in position 20 to 21 is any amino acid
  Variant (25)..(29): Xaa in position 25 to 29 is any amino acid
  Variant (30)..(30): Xaa in position 30 is any or no amino acid
  Variant (32)..(36): Xaa in position 32 to 36 is any amino acid
  Variant (37)..(37): Xaa in position 37 is any or no amino acid
  Variant (39)..(41): Xaa in position 39 to 41 is any amino acid
  Variant (42)..(42): Xaa in position 42 is any or no amino acid
  Variant (44)..(47): Xaa in position 44 to 47 is any amino acid
  Variant (48)..(52): Xaa in position 48 to 52 is any or no amino acid
  Variant (54)..(63): Xaa in position 54 to 63 is any amino acid
  Variant (64)..(65): Xaa in position 64 to 65 is any or no amino acid
  Variant (67)..(68): Xaa in position 67 to 68 is any amino acid
  Variant (69)..(70): Xaa in position 69 to 70 is any or no amino acid
  Variant (72)..(75): Xaa in position 72 to 75 is any amino acid
  Variant (77)..(80): Xaa in position 77 to 80 is any amino acid
  Variant (82)..(85): Xaa in position 82 to 85 is any amino acid
  Variant (87)..(100): Xaa in position 87 to 100 is any amino acid
  Variant (101)..(104): Xaa in position 101 to 104 is any or no amino acid
  Variant (106)..(111): Xaa in position 106 to 111 is any amino acid
  Variant (112)..(115): Xaa in position 112 to 115 is any or no amino acid
  Variant (118)..(119): Xaa in position 118 to 119 is any amino acid
  Variant (121)..(130): Xaa in position 121 to 130 is any amino acid
  Variant (132)..(136): Xaa in position 132 to 136 is any amino acid
  Variant (137)..(137): Xaa in position 137 is any or no amino acid
  Variant (139)..(139): Xaa in position 139 is any amino acid
  Variant (146)..(150): Xaa in position 146 to 150 is any amino acid
  Variant (151)..(153): Xaa in position 151 to 153 is any or no amino acid
  Variant (155)..(169): Xaa in position 155 to 169 is any amino acid
  Variant (170)..(179): Xaa in position 170 to 179 is any or no amino acid
  Variant (181)..(196): Xaa in position 181 to 196 is any amino acid
  Variant (199)..(206): Xaa in position 199 to 206 is any amino acid
  Variant (208)..(209): Xaa in position 208 to 209 is any amino acid
  Variant (211)..(211): Xaa in position 211 is any amino acid
  Variant (213)..(213): Xaa in position 213 is any amino acid
  Variant (215)..(218): Xaa in position 215 to 218 is any amino acid
  Variant (220)..(224): Xaa in position 220 to 224 is any amino acid
  Variant (225)..(225): Xaa in position 225 is any or no amino acid
  Variant (227)..(227): Xaa in position 227 is any amino acid
  Variant (229)..(233): Xaa in position 229 to 233 is any amino acid
  Variant (236)..(240): Xaa in position 236 to 240 is any amino acid
  Variant (242)..(243): Xaa in position 242 to 243 is any amino acid
  Variant (245)..(249): Xaa in position 245 to 249 is any amino acid
  Variant (255)..(259): Xaa in position 255 to 259 is any amino acid
  Variant (261)..(261): Xaa in position 261 is any amino acid
  Variant (263)..(263): Xaa in position 263 is any amino acid
  Variant (265)..(265): Xaa in position 265 is any amino acid
  Variant (267)..(267): Xaa in position 267 is any amino acid
  Variant (269)..(273): Xaa in position 269 to 273 is any amino acid
  Variant (274)..(274): Xaa in position 274 is any or no amino acid
  Variant (276)..(276): Xaa in position 276 is any amino acid
  Variant (278)..(286): Xaa in position 278 to 286 is any amino acid
  Variant (287)..(290): Xaa in position 287 to 290 is any or no amino acid
  Variant (292)..(296): Xaa in position 292 to 296 is any amino acid
  Variant (298)..(310): Xaa in position 298 to 310 is any amino acid
  Variant (312)..(313): Xaa in position 312 to 313 is any amino acid
  Variant (316)..(316): Xaa in position 316 is any amino acid
  Variant (319)..(325): Xaa in position 319 to 325 is any amino acid
  Variant (326)..(326): Xaa in position 326 is any or no amino acid
  Variant (328)..(331): Xaa in position 328 to 331 is any amino acid
  Variant (334)..(335): Xaa in position 334 to 335 is any amino acid
  Variant (338)..(341): Xaa in position 338 to 341 is any amino acid
  Variant (343)..(343): Xaa in position 343 is any amino acid
  Variant (345)..(352): Xaa in position 345 to 352 is any amino acid
  Variant (353)..(353): Xaa in position 353 is any or no amino acid
  Variant (357)..(358): Xaa in position 357 to 358 is any amino acid
  Variant (367)..(368): Xaa in position 367 to 368 is any amino acid
  Variant (370)..(371): Xaa in position 370 to 371 is any amino acid
  Variant (374)..(377): Xaa in position 374 to 377 is any amino acid
  Variant (379)..(380): Xaa in position 379 to 380 is any amino acid
  Variant (381)..(384): Xaa in position 381 to 384 is any or no amino acid
  Variant (386)..(390): Xaa in position 386 to 390 is any amino acid
  Variant (392)..(400): Xaa in position 392 to 400 is any amino acid
  Variant (401)..(409): Xaa in position 401 to 409 is any or no amino acid
  Variant (411)..(414): Xaa in position 411 to 414 is any amino acid
  Variant (415)..(415): Xaa in position 415 is any or no amino acid
  Variant (417)..(440): Xaa in position 417 to 440 is any amino acid
  Variant (441)..(441): Xaa in position 441 is any or no amino acid
  Variant (443)..(444): Xaa in position 443 to 444 is any amino acid
  Variant (446)..(448): Xaa in position 446 to 448 is any amino acid
  Variant (450)..(461): Xaa in position 450 to 461 is any amino acid
LXXXXXXXXXXXXXXDXXGXXRGKXXXXXXLXXXXXXGXXXXPXXXXXXXXXGXXXXXXXXXXXXGXXXXDXXXXPXXXXLXXXXWXXXXXXXXXXXXXXXXXXGXXXXXXXXXXPRXXLXXXXXXXXXXGXXXXXXAXELEFYLXXXXXXXXGXXXXXXXXXXXXXXXXXXXXXXXXXLXXXXXXXXXXXXXXXXQGXXXXXXXXEXXPXQXEXXXXHXXXXXXAXDXXXXXKRXXXXXAXXHXXXXXFMAKPXXXXXGXGXHXHXSXXXXXXGXNXXXXXXXXXXXXXLXXXXXGXXXXXXXXXXXXXPXXNSXRRXXXXXXXXPXXXXWGXXNRXXXXRXPXXXXXXXXXEHRXXGADANPYLXXAXXLAXXXXGXXXXXXPXXXXXGXXXXXXXXXXXXXXXXXXPXXXXXAXXXXXXXXXXXXXXXXXXXXXXXXXKXXEXXXFXXXXXXXXXXXXL

SEQ ID NO: 1301 - protein, 18 aa, Artificial sequence
  protein pattern
  Variant (2)..(4): Xaa in position 2 to 4 is any amino acid
  Variant (5)..(5): Xaa in position 5 is Ala, Ser or Thr
  Variant (8)..(8): Xaa in position 8 is any amino acid
  Variant (9)..(9): Xaa in position 9 is Asp, Glu or Asn
  Variant (12)..(12): Xaa in position 12 is any amino acid
  Variant (13)..(13): Xaa in position 13 is Ala, Cys, Ser, Thr or Val
  Variant (14)..(14): Xaa in position 14 is Ala or Ser
  Variant (15)..(15): Xaa in position 15 is Ile, Leu or Val
  Variant (17)..(17): Xaa in position 17 is Ile or Val
  Variant (18)..(18): Xaa in position 18 is Ile, Pro or Val
PXXXXWGXXNRXXXXRXX

SEQ ID NO: 1302 - protein, 26 aa, Artificial sequence
  protein pattern
  Variant (2)..(2): Xaa in position 2 is any amino acid
  Variant (3)..(3): Xaa in position 3 is Ala, Gly, Ile or Leu
  Variant (4)..(6): Xaa in position 4 to 6 is any amino acid
  Variant (7)..(7): Xaa in position 7 is Lys or Arg
  Variant (8)..(10): Xaa in position 8 to 10 is any amino acid
  Variant (11)..(11): Xaa in position 11 is Asp, His, Lys or Arg
  Variant (12)..(13): Xaa in position 12 to 13 is any amino acid
  Variant (15)..(16): Xaa in position 15 to 16 is any amino acid
  Variant (18)..(20): Xaa in position 18 to 20 is any amino acid
  Variant (21)..(21): Xaa in position 21 is Ala or Thr
  Variant (22)..(22): Xaa in position 22 is Cys, Ser or Thr
  Variant (25)..(25): Xaa in position 25 is Ala or Pro
DXXXXXXXXXXXXAXXHXXXXXFMXK

SEQ ID NO: 1303 - protein, 28 aa, Artificial sequence
  protein pattern
  Variant (2)..(2): Xaa in position 2 is any amino acid
  Variant (3)..(3): Xaa in position 3 is His or Arg
  Variant (4)..(4): Xaa in position 4 is Ile, Leu, Pro or Val
  Variant (5)..(5): Xaa in position 5 is Ala, Cys or Ser
  Variant (6)..(6): Xaa in position 6 is Gly or Ser
  Variant (7)..(7): Xaa in position 7 is Ala or Val
  Variant (14)..(15): Xaa in position 14 to 15 is any or no amino acid
  Variant (17)..(24): Xaa in position 17 to 24 is any amino acid
  Variant (25)..(26): Xaa in position 25 to 26 is any or no amino acid
  Variant (28)..(28): Xaa in position 28 is Ile, Leu or Met
EXXXXXXDANPYLXXAXXXXXXXXXXGX

SEQ ID NO: 1304 - protein, 28 aa, Artificial sequence
  protein pattern
  Variant (2)..(5): Xaa in position 2 to 5 is any amino acid
  Variant (6)..(6): Xaa in position 6 is any or no amino acid
  Variant (8)..(11): Xaa in position 8 to 11 is any amino acid
  Variant (12)..(12): Xaa in position 12 is Ile, Leu or Met
  Variant (13)..(16): Xaa in position 13 to 16 is any amino acid
  Variant (17)..(17): Xaa in position 17 is Ala, Leu or Pro
  Variant (18)..(18): Xaa in position 18 is any amino acid
  Variant (19)..(19): Xaa in position 19 is Phe or Leu
  Variant (20)..(20): Xaa in position 20 is Ala, Cys or Val
  Variant (22)..(23): Xaa in position 22 to 23 is any amino acid
  Variant (25)..(25): Xaa in position 25 is Ala, Gly or Ser
  Variant (26)..(26): Xaa in position 26 is any amino acid
LXXXXXGXXXXXXXXXXXXXPXXNXXRR

SEQ ID NO: 1305 - protein, 22 aa, Artificial sequence
  protein pattern
  Variant (2)..(4): Xaa in position 2 to 4 is any amino acid
  Variant (5)..(6): Xaa in position 5 to 6 is any or no amino acid
  Variant (8)..(8): Xaa in position 8 is any amino acid
  Variant (9)..(9): Xaa in position 9 is Ala, Gly or Ser
  Variant (11)..(11): Xaa in position 11 is Ala or Gly
  Variant (13)..(13): Xaa in position 13 is any amino acid
  Variant (15)..(15): Xaa in position 15 is Ile, Leu or Val
  Variant (16)..(16): Xaa in position 16 is Asp, Asn or Thr
  Variant (17)..(17): Xaa in position 17 is Phe or Leu
  Variant (18)..(18): Xaa in position 18 is any amino acid
  Variant (19)..(19): Xaa in position 19 is His or Tyr
  Variant (20)..(21): Xaa in position 20 to 21 is any amino acid
  Variant (22)..(22): Xaa in position 22 is Ala, Asp or Asn
AXXXXXEXXPXQXEXXXXXXXX

SEQ ID NO: 1306 - protein, 9 aa, Artificial sequence
  protein pattern
  Variant (2)..(2): Xaa in position 2 is any amino acid
  Variant (9)..(9): Xaa in position 9 is Phe, Ile, Leu or Val
AXELEFYLX

SEQ ID NO: 1307 - protein, 15 aa, Artificial sequence
  protein pattern
  Variant (2)..(2): Xaa in position 2 is Phe or Tyr
  Variant (3)..(5): Xaa in position 3 to 5 is any amino acid
  Variant (6)..(6): Xaa in position 6 is Ala, Pro or Ser
  Variant (8)..(8): Xaa in position 8 is Asn, Ser or Thr
  Variant (10)..(10): Xaa in position 10 is Phe, Leu or Met
  Variant (12)..(12): Xaa in position 12 is Ile, Leu, Met or Val
  Variant (14)..(14): Xaa in position 14 is any amino acid
PXXXXXGXGXHXHXS

SEQ ID NO: 1308 - DNA, 1344 bp, Escherichia coli K12
  CDS (1)..(1344): transl_table=11
atggcgaacagcatcacggcggatgagattcgggaacagttttcgcaggcaatgtcagccatgtaccagcaagaagttccgcaatatggcacgctgctggaactggtagctgatgtgaatctggctgtgctggaaaacaatcctcaactgcacgaaaaaatggtaaatgcagacgagctggcgcgactgaatgttgaacgtcatggggcgattcgcgttgggactgcacaagagcttgctactcttcggcggatgtttgccattatggggatgtacccggtgagctattacgatctctcgcaggcaggggtgccggtacattcgacagcatttcggcccattgatgatgcttctctggcgcgtaatcccttccgcgtttttacctccttactccgccttgagcttatcgagaacgaaattttgcgccagaaagcggcggagattctgcgtcagcgcgatatcttcaccccacgttgtcgacaactgttagaggaatatgagcagcagggcggttttaacgaaacacaggcacaggagtttgtgcaggaagccctggaaacgtttcgctggcaccagtcagcaacggtagatgaagaaacctatcgcgcattgcacaacgaacatcggttgattgctgatgtggtctgttttcctggatgccatatcaaccacctgacgccacgtacgctggatattgaccgggtgcagtcgatgatgcctgaatgcggaattgaacccaaaattctcatcgaggggccgccgcgccgcgaggtaccgattttactacgccagaccagctttaaagcactggaagagacggtgttgtttgcggggcagaaacagggcacgcataccgcgcgctttggtgaaattgagcagcgtggcgtggcattaacgccgaaagggcgacaactgtatgatgatcttctgcgtaacgctggaaccgggcaggataatctcactcaccaaatgcatttacaggaaaccttccgcacttttcctgacagtgagtttttaatgcgtcagcaagggttggcatggttccggtaccgtctgacgccttcgggtgaggcgcatcgtcaggcgattcatcctggagacgatccacagcccttaattgaacgtggttgggtagtggcgcaacccatcacctatgaagatttcttgcccgttagcgcggcggggatcttccagtcaaatctgggtaatgaaacgcagacacgcagtcacggtaatgccagtcgcgaagcatttgagcaggcgttgggttgtccggttttggatgagttccagctttaccaggaagcggaagaacgcagtaaacgtcgctgtggtttgctttaa

SEQ ID NO: 1309 - protein, 447 aa, Escherichia coli K12
MANSITADEIREQFSQAMSAMYQQEVPQYGTLLELVADVNLAVLENNPQLHEKMVNADELARLNVERHGAIRVGTAQELATLRRMFAIMGMYPVSYYDLSQAGVPVHSTAFRPIDDASLARNPFRVFTSLLRLELIENEILRQKAAEILRQRDIFTPRCRQLLEEYEQQGGFNETQAQEFVQEALETFRWHQSATVDEETYRALHNEHRLIADVVCFPGCHINHLTPRTLDIDRVQSMMPECGIEPKILIEGPPRREVPILLRQTSFKALEETVLFAGQKQGTHTARFGEIEQRGVALTPKGRQLYDDLLRNAGTGQDNLTHQMHLQETFRTFPDSEFLMRQQGLAWFRYRLTPSGEAHRQAIHPGDDPQPLIERGWVVAQPITYEDFLPVSAAGIFQSNLGNETQTRSHGNASREAFEQALGCPVLDEFQLYQEAEERSKRRCGLL

SEQ ID NO: 1310 - DNA, 1401 bp, Sinorhizobium meliloti 1021
  CDS (1)..(1401): transl_table=11
gtgaaagagaatagtttcgtatccgccgacgatattcgctcggccttttccgctgcgatgtcgttgatgtaccgcgaggaagtgccggcctacggcacgctgatggagctcgtcgccagggtcaacggcgaaacgctctcggccgacgccaccctgaaggggcgcctggaagcgaccgattcgctcgaacgcatttccgaggagcgtcacggcgcgatccgtctcggcacgccggcggagctttcgatgatgcgccgggtatttgccgtgatgggcatgtatccggtcggctactacgatctgtcgaccgccggggtgccggtccactccacggccttccggccggtgggcgacgcggctctgaagcacaaccccttccgcgtcttcacctcgcttctgaggctcgacctcatttccgacgaggcccttcgcgccgaggcggaggcgatcctgaaagagcgccggatctttacatccggtgcggtcgagcttaccgaaaaggccgagcgggacggcggcctcgacaaggccgatgccgagcgtttcgtcgccgaagtgctcgagaccttccgctggcacgacgaggcgaatgtcagcgccggcatgtacgagcgcctgcacgatgcgcaccggctgatcgccgacgtggtctccttcaaggggccgcatatcaaccatttgacgccacggacgctcgacatcgaccgcgtccaggcgctgatgccggaatatggcattgccccgaaggccgtcgtcgaaggaccgccgacacgcaaatgcccggtcctgcttcgccagacgtccttcaaggcgctcgaagagccggtttccttccgcgactccgacggcagctggaagaccggctcgcataccgcccgcttcggcgagatcgagcagcgcggcatcgctttgacgcctaagggccgaggtctctacgaccggctgctcgacgaatcgcgcaagatcgtacgcccggccgccgatggttcaaacgccagggaatacgaagcggccttggcccaggtcttcgaggcgttccccgacagctgggcggagctccgcgaggcgggcctcggctatttcagctactccctgacggataagggccggcggacgaagctgcccggccggcgtgatctcaattccctgatcgccgacggcctcgttcaattcgatccgatcgtctatgaggacttccttcccgtcagcgccgccggtatcttccagtcgaacctcggcgacggtgcgcagcaggaattcgaagcgagcccgaaccagaagcgcttcgagaccgatctcggcgtcgccgtgctcaacgaattcgatcactatgccggcatcgagcaggcatcgatcgaaggctgcctcaaggcgcttaccgccgccatggcagcggagtga

SEQ ID NO: 1311 - protein, 466 aa, Sinorhizobium meliloti 1021
MKENSFVSADDIRSAFSAAMSLMYREEVPAYGTLMELVARVNGETLSADATLKGRLEATDSLERISEERHGAIRLGTPAELSMMRRVFAVMGMYPVGYYDLSTAGVPVHSTAFRPVGDAALKHNPFRVFTSLLRLDLISDEALRAEAEAILKERRIFTSGAVELTEKAERDGGLDKADAERFVAEVLETFRWHDEANVSAGMYERLHDAHRLIADVVSFKGPHINHLTPRTLDIDRVQALMPEYGIAPKAVVEGPPTRKCPVLLRQTSFKALEEPVSFRDSDGSWKTGSHTARFGEIEQRGIALTPKGRGLYDRLLDESRKIVRPAADGSNAREYEAALAQVFEAFPDSWAELREAGLGYFSYSLTDKGRRTKLPGRRDLNSLIADGLVQFDPIVYEDFLPVSAAGIFQSNLGDGAQQEFEASPNQKRFETDLGVAVLNEFDHYAGIEQASIEGCLKALTAAMAAE

SEQ ID NO: 1312 - DNA, 1344 bp, Salmonella typhimurium LT2
  CDS (1)..(1344): transl_table=11
atggcgaacaccatcacggcagatgagattcgggaacacttttcgcaggcaatgtcggcaatgtaccagcaggaagttccgcagtacggtacgttactggaacttgtggctgacgtgaatctggcggtgctggaaaataatcccaaactgcatgagcagttggctaatgccgatgaactggcgcgattgaacgtggaacgacatggcgccattcgtgttggcaccgcagaagaactttctaccttgcgtcggatattcgccatcatggggatgtacccagtaagttattacgatctctctcaggcgggcgtgcctgtgcactccacggcatttcgtcccattgacgaggcttcgctctcgcgtaatccctttcgcatgttcacttcgctattacgcctggagctcattgaaaacgcggcattacgccagcgggcggcggaaatcttatcgcagcgtgatatttttacatcgcgctgccgacaattgctggatgagtacgacgagcagggcggttttagcgctgctcaggccgaagagttcgtccgtgaaacgctggagacttttcgctggcatcgtcaggctaccgttgatgaagaaacgtaccgcagcctgcatcgtgagcatcgtttaattgccgacgtggtctgttttccgggatgccacattaaccatctgacgccgcgtactctggatatcgaccgggtacaggccatgatgccggagtgcggcattacgcctaaaattcttatcgaaggtccgcctcgccgcgaagtgcctattctgttgcggcaaaccagtttcaaagctctggaagagcaggtgctcttcgttgatgaaaagcagggtacgcacacggcgcgcttcggcgaaattgagcaacgtggcgtcgcgctgacgccaaaaggtcgtcgattatatgacgaactgttgcacaaggcgggaacgggtaaggataacttcacgcatcaactccatttgcgggaggtctttaacgcctttccggatagcgaatttctgcttcgccagcaggggcttgcctggttccgctatcgcttaacgccttccggcgaggcgcatcgtcaggcgatccatcctggcgacgatccgcagccgcttattgagcgcggttgggtaatcgcgcagccgattacctatgaagattttcttccggtcagcgcagccggcatttttcagtcgaatttgggagatgaaacgctggccagaagccacggcaatgccagccgcgacgcctttgaacaggcgctgggatgtgcagtacgggatgaattttcgttatatcaggaagcggaagaacgcagtaaacgccgttgcggtctgctttaa

SEQ ID NO: 1313 - protein, 447 aa, Salmonella typhimurium LT2
MANTITADEIREHFSQAMSAMYQQEVPQYGTLLELVADVNLAVLENNPKLHEQLANADELARLNVERHGAIRVGTAEELSTLRRIFAIMGMYPVSYYDLSQAGVPVHSTAFRPIDEASLSRNPFRMFTSLLRLELIENAALRQRAAEILSQRDIFTSRCRQLLDEYDEQGGFSAAQAEEFVRETLETFRWHRQATVDEETYRSLHREHRLIADVVCFPGCHINHLTPRTLDIDRVQAMMPECGITPKILIEGPPRREVPILLRQTSFKALEEQVLFVDEKQGTHTARFGEIEQRGVALTPKGRRLYDELLHKAGTGKDNFTHQLHLREVFNAFPDSEFLLRQQGLAWFRYRLTPSGEAHRQAIHPGDDPQPLIERGWVIAQPITYEDFLPVSAAGIFQSNLGDETLARSHGNASRDAFEQALGCAVRDEFSLYQEAEERSKRRCGLL

SEQ ID NO: 1314 - DNA, 1368 bp, Xanthomonas campestris pv. campestris str. ATCC 33913
  CDS (1)..(1368): transl_table=11
atgcgcgagaccgtgtttgtttcccctgaccagatccgcagcctgtttgcgcaggccatgtcagacatgtatcgcgccgaggtgccgctgtatggcgacctgatgaccctggtggccgacgtcaacgcgcagaccctgcaggccgatccggcactggcggcgcggctgcaacgcaacgacgagcgcgcgcggctggatctggagcggcatggtgcgatccgggtcggcacggcacaggagctggccacgttgcggcggctgtttgcggtaatgggcatgcatccggtgggctattacgacctctctgttgcgggcgtgccggtgcactccaccgccttccgcccgatcgacgatgcagcgttgtcggccaatccgttccgcgtgttcacctcgctgctgcgcctggaattgatcgaagatccggcgctgcgcgcgcaggcggcggagatcctggcgcaacgccagatcttcactgccgaggcgctatcactgatcgagcagcacgagcgtgccggcggcctggatgcgacacaggcgcagcagttcgtggcgcaggcgttggaaacctttcgttggcatggcgatgcaacagtggcgttgcccacctaccgcgcgttgagccaggcgcacaaactgattgccgacgtggtgagtttccacggcccgcatatcaatcacctcacgccgcgcacgctggatatcgatgcggcgcaggcacagatgcagcgcgccggcatcgaggccaaggcagtcatcgaaggcccgccacgccggcgcgtgccgatcctgttgcggcagaccagcttcaaggcgctggaagagccggtgcgcttcctgggcgaaacgggccaggccgagcagggcacgcataccgcgcgcttcggcgagatcgagcagcgcgggcttgcactcacgcccaagggccgcgcgctgtacgacgcgttgctggcgcaggcgcgcgagaccgagggcgccggcagtaccggcagcgattacgccaccgtgctgcagaccgcgttcgttgcgttccccgatgatgaagcggtgctgcgccaggaaggcctggggtatttccgttacgcgctcaccgaggccggccgcgccgacccggcgcaggttgccgcgatgccggccgaaaccgcgatcgcgctgggattggtgcgcgccgatccgatcatctacgaagacttcctgccggtgagcgcggcgggcatctttcaatccaatctgggcggcgccgagcagcgcgcctatgccgcgcacgccagcaagagcaccttcgaacgcgaactgggcgcgccggtgcatgacgagtttgcgctgtatgcgcagctggagcgcgactcgttgcgggcgttgctggtgtag

SEQ ID NO: 1315 - protein, 455 aa, Xanthomonas campestris pv. campestris str. ATCC 33913
MRETVFVSPDQIRSLFAQAMSDMYRAEVPLYGDLMTLVADVNAQTLQADPALAARLQRNDERARLDLERHGAIRVGTAQELATLRRLFAVMGMHPVGYYDLSVAGVPVHSTAFRPIDDAALSANPFRVFTSLLRLELIEDPALRAQAAEILAQRQIFTAEALSLIEQHERAGGLDATQAQQFVAQALETFRWHGDATVALPTYRALSQAHKLIADVVSFHGPHINHLTPRTLDIDAAQAQMQRAGIEAKAVIEGPPRRRVPILLRQTSFKALEEPVRFLGETGQAEQGTHTARFGEIEQRGLALTPKGRALYDALLAQARETEGAGSTGSDYATVLQTAFVAFPDDEAVLRQEGLGYFRYALTEAGRADPAQVAAMPAETAIALGLVRADPIIYEDFLPVSAAGIFQSNLGGAEQRAYAAHASKSTFERELGAPVHDEFALYAQLERDSLRALLV

SEQ ID NO: 1316 - DNA, 1368 bp, Xanthomonas axonopodis pv. citri str. 306
  CDS (1)..(1368): transl_table=11
atgcgcgataccgcctttatctctcccgatcagatccgcagctggttcgcccaggcgatgtcggacatgtatcgcaccgaggtgccgttgtatggcgatctgatgtcgctggtggcgcaggtcaacgcacagacgctgcaagccaatccggcgctggcgcagcggctgcagcgcaacgacgagcgcgcgcggctggatctggaacggcacggcgccatccgcgtcggcacggcggccgaactggccaccttgcgccggttgttcgcagtgatgggcatgcagccggtgggctattacgacctgtcggtggccggcgtgccggtgcattccaccgcgttccgcccgatcgatgaggcggcgctgtcggcaaatccgtttcgcgtgttcacctcgctgctgcggctggaactgatcgaagacgccgccctgcgcgaacaggcacagcagatcctgcagcagcgacagatctttaccgtcggcgccttgcagttgatcgagcgctacgaacagcagggcgggctggatgccgaccaggcacggcagttcgtggccgaagcgctggaaaccttccgctggcatggcgatgccacggtgtcgttgccgacctatcgcgcgctgagccaggcgcataagttgattgccgatgtggtgagcttccacggcccgcacatcaatcacctcacgccacgcacgttggacatcgatgcggcgcaggaacagatgcagcgcgccggcatcgatgccaaggcggtgatcgaggggccgccgcgtcggcgcgtgccgatcctgttgcggcagaccagtttcaaggcgctggaagagccggtgcgttttgtcggcgatgacgggcaaccggaacacggcacgcataccgcacgctttggcgagatcgagcagcgcggccttgccctcacgccaaagggccgcgcgttgtacgacgcgctgctggcgcaggcgcgcgatgccgatggcgccggcagcaccggcaccgattacgccacccggctgcagactgccttcgtggccttccccgacgacgaggcgttgctgcggcaggaagggctgggctatttccgctatgcgctcaccgacgccggccgcgccgatcccgcgcaggtggccgccatgccggcagaaaccgcgatcgcgctcggcttggtcagtgccgacccgatcatctacgaagattttttgccggtcagcgcggccggcatcttccagtccaacctcggtggtgccgagcaacgcgcctatgccgcccattcgagcaagcgcagtttcgagcaggcgctcggtgcgcaggtgcacgacgaattcgcgctgtatgcgcagttggagcgggagtccctgcaggggttgctggcgtag

SEQ ID NO: 1317 - protein, 455 aa, Xanthomonas axonopodis pv. citri str. 306
MRDTAFISPDQIRSWFAQAMSDMYRTEVPLYGDLMSLVAQVNAQTLQANPALAQRLQRNDERARLDLERHGAIRVGTAAELATLRRLFAVMGMQPVGYYDLSVAGVPVHSTAFRPIDEAALSANPFRVFTSLLRLELIEDAALREQAQQILQQRQIFTVGALQLIERYEQQGGLDADQARQFVAEALETFRWHGDATVSLPTYRALSQAHKLIADVVSFHGPHINHLTPRTLDIDAAQEQMQRAGIDAKAVIEGPPRRRVPILLRQTSFKALEEPVRFVGDDGQPEHGTHTARFGEIEQRGLALTPKGRALYDALLAQARDADGAGSTGTDYATRLQTAFVAFPDDEALLRQEGLGYFRYALTDAGRADPAQVAAMPAETAIALGLVSADPIIYEDFLPVSAAGIFQSNLGGAEQRAYAAHSSKRSFEQALGAQVHDEFALYAQLERESLQGLLA

SEQ ID NO: 1318 - DNA, 1437 bp, Yersinia pestis KIM
  CDS (1)..(1437): transl_table=11
atgcccccccaacagtttgtgcatcccgatgagatacgggccaaattctccagcgctatgtcggatatgtatcagaccgaagtccctctatatagcacattattacggctcgttgcggacacgaatacacaagagatggtgcaagatcagaaacttacccgtcatttgcagcaaactggggaaattgaacgcctaacgatggaaagacatggcgccatccgcgtcgggacagccgaagaactcaagatgctgcggcgcttgtttgcagtcatgggaatggtgccggtcggttattatgatttagcaccagcgggtgtcccggttcactccaccgccttccgtgcggtgcatgaaacctcactgcaagcctgccctttcagagtcttcacctcattactgcgtctggagttgattgagcaacctacactacggcaactggctgcggatattctggcgaaaagaacaattttcaccccacaggcgattaaactaattgttcagcatgaaacatcgggggggctcaatcgccatcaagccgatgatttcattgctcagtcgctggaaacatttcgctggcatcatcaggcaacggtcagcactgaaacctaccaacagctacacgatcaacaccgtctgattgctgatgtggtcgctttcaaaggtccgcatattaaccacctaactccacggaccttaaatatcgacgtcgtacaaacagcaatggcagagcataatatgatgcccaaagccgttatcgaagggccacccccccgccactgcccaatactgttacgccaaaccagcttcaaggcgctggaggaaaaaatcgcgtttgtatcaaatggtgggcaaataataccaggccaccatacggcccgcttcggggagatagagcaacgaggagccgctttgacggccaaaggccgtaatctgtatgaccacttactgcaaagcgcacaggatcaattgaacgttcctgtaaatgagaacaatgcggcgcaatatagcgcgatcctgagcgagaaatttagtcaattccctgatgattacccaacaatgcgagcagagaaactcgccttcttccgctattttcctacagaaaaaggccttatcactgcatcaatacaggaaatacaggaaatacaggaaatacaggaaatacaggaaatgacattagacgaacttattgataacggctttattcaatatgaaccgttggtttatgaagatttcctgccagtcagcgccgctggaatattccagtcaaacttaggcgagaaagggcagagtcactttaccgggcactccaataaagcagacttccagcgggatttggggattgcggttattgatgaactgcaactctacgaagcaacccagcaacgttccgttgctgaatgtgcagccgccctcaaactaacgttgttaagccaataa

SEQ ID NO: 1319 - protein, 478 aa, Yersinia pestis KIM
MPPQQFVHPDEIRAKFSSAMSDMYQTEVPLYSTLLRLVADTNTQEMVQDQKLTRHLQQTGEIERLTMERHGAIRVGTAEELKMLRRLFAVMGMVPVGYYDLAPAGVPVHSTAFRAVHETSLQACPFRVFTSLLRLELIEQPTLRQLAADILAKRTIFTPQAIKLIVQHETSGGLNRHQADDFIAQSLETFRWHHQATVSTETYQQLHDQHRLIADVVAFKGPHINHLTPRTLNIDVVQTAMAEHNMMPKAVIEGPPPRHCPILLRQTSFKALEEKIAFVSNGGQIIPGHHTARFGEIEQRGAALTAKGRNLYDHLLQSAQDQLNVPVNENNAAQYSAILSEKFSQFPDDYPTMRAEKLAFFRYFPTEKGLITASIQEIQEIQEIQEIQEMTLDELIDNGFIQYEPLVYEDFLPVSAAGIFQSNLGEKGQSHFTGHSNKADFQRDLGIAVIDELQLYEATQQRSVAECAAALKLTLLSQ

SEQ ID NO: 1320 - DNA, 1401 bp, Brucella suis 1330
  CDS (1)..(1401): transl_table=11
atgaaagaccagaaattcgtttcgccggatgccattcgctccgctttttcggcagccatgtcggccatgtacagggaagaagtgcctgcctatggcaccctcatggacctcgtcgccgacgtgaatgccaaggttctggccgacgacagccatctgcatgaacgcctggccgaaaccgatgcgctcgaccgtatttcggaagaacgccatggcgcaatccgccttggcaccgccgccgagctttccatgatgcgccgcgtcttcgcggtcatgggcatgttcccggtcggctattacgatctgagcgcggccggtgttccggttcactccaccgccttccgcccggttaatgacgcagccctgaaacacaatccgttccgcgttttcacctcgctgctgcgcctcgaccttatcaccgatgaaaagctgcgcgctcaatcgcaagacgttctgtcgaagcgcaatatcttcacggcaggcgccgttgctcttgtcgaaaaagccgaagccgaaggcggccttcttgaagaagatgcaaaaacctttgttgctgaagtgctggaaaccttccgctggcatgaccgcgccaatgtcagtgccgagctttatcaccgcctgcatgatgcccatcgcctgatcgccgatgtcgtttccttcaaggggccgcacatcaaccacctgacgccgcgcacgctcgacatcgacgccgtgcaggaacagatgccgcaacgcggcatcaaccccaaggccgtggtcgaaggcccgcccacgcgcaactgcccgatcctgctgcgccagacctcgttcaaggcgctggaagaggaagtctccttcatcggcgacaacggcgagtggacccccggctcgcataccgcccgtttcggtgagatcgagcagcgcggcgtggcgctgacgccgaagggccgcgcgctttacgacaagcttctcaacgacacccgcgccatcgtgcgcccagcgccggacggctccaatgcgagcgactatgtgaaggctctcggcgacaccttcgccgccttccccgacacatgggcaggcattcgcgaagaaggacttggctatttcgcctattcggtgaaggatgcggcaaagcttgcaagtttcaggccgggcactgatatcgaagttctgattgaagctggcgcggtgcagttcgacccgatcacctatgaggacttcctgccggtcagcgccgccggtatattccagtccaatctgggcgacgacgaaacacaggaatttgtcgaaagccccaaccagaagcgtttcgaggacgatctgggcgcaaaagtgctcaatgagttcgagcactatgcccgcatcgaacgggaatccattgaagcccttcaggcaggcctgaagggccttgaagcggcagaataa

SEQ ID NO: 1321 - protein, 466 aa, Brucella suis 1330
MKDQKFVSPDAIRSAFSAAMSAMYREEVPAYGTLMDLVADVNAKVLADDSHLHERLAETDALDRISEERHGAIRLGTAAELSMMRRVFAVMGMFPVGYYDLSAAGVPVHSTAFRPVNDAALKHNPFRVFTSLLRLDLITDEKLRAQSQDVLSKRNIFTAGAVALVEKAEAEGGLLEEDAKTFVAEVLETFRWHDRANVSAELYHRLHDAHRLIADVVSFKGPHINHLTPRTLDIDAVQEQMPQRGINPKAVVEGPPTRNCPILLRQTSFKALEEEVSFIGDNGEWTPGSHTARFGEIEQRGVALTPKGRALYDKLLNDTRAIVRPAPDGSNASDYVKALGDTFAAFPDTWAGIREEGLGYFAYSVKDAAKLASFRPGTDIEVLIEAGAVQFDPITYEDFLPVSAAGIFQSNLGDDETQEFVESPNQKRFEDDLGAKVLNEFEHYARIERESIEALQAGLKGLEAAE

SEQ ID NO: 1322 - DNA, 1332 bp, Corynebacterium efficiens YS-314
  CDS (1)..(1332): transl_table=11
atgtacggaacagaggttcccgcctacaccacgctcgtcgaggtctccgaggaggtgaaccgggatttcctgtcccgccggggtgatgatgcggaacgactggggtcaatcgaccgggtgaccgccgaacgccacggcgccatccgcgtcggctcccccaccgaactggcgcaggtggcccgagtcttcgcggccttcggcatgcatcctgtgggtttctacgatctgcgtgatgcctcggcagcctcggtccccgtggtgtccacggcgttccgtccgatcacaggcccggaactggcagagaatcccttccgggtgttcacctccatgctcaccgcggatgatccacgctttttcaccccggaccagcagcaacgactccaggagttcctggcgtcacgcacgctgttccccgatggcctgctggagcttgcggatcaggccacccgggatgggggtctggaggacggggatgccgagcagctcctcacactggccaccgccgcgtttgagctttccgacgaaccggttgatcattcctggtaccgggaactcgaggcggtgtcagccgtggcagctgatatcggtggcgtggccaccacccacatcaatcacctcacccccagggtcctggacatcgatgagctgtaccgacgaatggaagcccgtgggatcaccatgatcgatgagatccaagggccacccgcctgggagggccccgatgtcctgctccgccagacgtcattccgggcgctttccgaggaacggaccttccgtttcgaggacggcaccatcgggccgggttccctgcgggtccgtttcggtgaggtggaacaacgtggcatcgccctgacccccgccggacgggaactctatgaccagatgctcgccgagatagaccggagaaaggccgagaccgggggcacacgcatgaccatcgcccgcgcggtatgggaggagaatctcccgaacaccgaagcggggatgctcgaacggggtctcggttacttcaccttcgacctggcgaagcaccccgcggatatcggtgacacggtccacctgcgggatctgctggccgacggtattgtcacggccacaccgattgtctacgaggatttcctaccacgttccgccgcggggatcttccagtcgaatctcaccggcgaggggtcaaaagacaccgcgcaggaaggtgtcgactacaaacaggaggttctctccaccatcatcggcacccccatcttcgatgcctatgacctctaccaggcccaggtcgatgactccctgagcaggttggagaataccctcaacaccacgattctgactgattga

SEQ ID NO: 1323 - protein, 443 aa, Corynebacterium efficiens YS-314
MYGTEVPAYTTLVEVSEEVNRDFLSRRGDDAERLGSIDRVTAERHGAIRVGSPTELAQVARVFAAFGMHPVGFYDLRDASAASVPVVSTAFRPITGPELAENPFRVFTSMLTADDPRFFTPDQQQRLQEFLASRTLFPDGLLELADQATRDGGLEDGDAEQLLTLATAAFELSDEPVDHSWYRELEAVSAVAADIGGVATTHINHLTPRVLDIDELYRRMEARGITMIDEIQGPPAWEGPDVLLRQTSFRALSEERTFRFEDGTIGPGSLRVRFGEVEQRGIALTPAGRELYDQMLAEIDRRKAETGGTRMTIARAVWEENLPNTEAGMLERGLGYFTFDLAKHPADIGDTVHLRDLLADGIVTATPIVYEDFLPRSAAGIFQSNLTGEGSKDTAQEGVDYKQEVLSTIIGTPIFDAYDLYQAQVDDSLSRLENTLNTTILTD

SEQ ID NO: 1324 - DNA, 1395 bp, Pseudomonas putida KT2440
  CDS (1)..(1395): transl_table=11
atgcccgccaacgatttcgtcagcccagacagcatccgcgcgcagttctctgccgccatgtcgctcatgtacaaacaggaagtgccgctgtacggcacgctgctggagctggtgagcgaaatcaaccagcaggtgatggcccagcaacccgaagtggcagaggccctgcgctggaccggcgaaatcgagcgcctggaccaggaacgtcacggcgccatccgcgtcggcaccgccgaagaactggccaccatcgcccgcctgttcgccgtcatgggcatgcaaccggtcggctattatgacctcagctccgctggcgtaccggtgcattccactgcctttcgcgcggtgcacgagcaatcgctgcatgtcagcccgttccgtgtgttcacctcgctgctgcgcctggagctgatcgacaacccgcagttgcgcgagctggcacagagcatcctggccaagcgccagatcttcacctcccgcgccctcgaactgatcgcccagtgtgagcgcgagggtggccttgacgccgcggatgcagagacgttcgtgcaggaagcgctgcacaccttccgctggcaccaggacgctaccgtcacggccgagcaataccagcagctgcacgaccaacaccgcctgatcgccgatgtggtggccttcaagggcccgcacatcaaccacctgaccccgcgtaccctggatatcgatgcaatccagctcggcatgcctgccaagggcatcccgccgaaggccgtggttgaaggcccgcccacccgccgccacccgatcctgctgcgccagaccagcttcaaggccctgcaggaaacggtcgccttccgcgaccaacaaggccgcgaaggcagccacaccgcacgctttggcgaaatcgagcaacgcggcgcggcgctgacgccgaaaggtcgccagctttacgacaagttgctcgacgctacccgcgttgcgctgggtggcgctccggccgaagccaatgccgagcgttacatggcgctgctacaggcaaactttgccgagttcccggatgacctggcgcaaatgcgcgaacagggcctcgcatatttccgctacttcgccaccgagaaaggcctggccgcacgcgaccaggaaggccgcccgaccaccctgcaaggcttgatcgacgcgggccacgtgcacttcgaggcgctggtgtacgaggacttcctgccggtgagtgcggcggggatcttccaatccaacctgggcgacgatgcgcaggccgaatacggcagcaacgccaaccgcgaagcgttcgaagcggcgctggggttgcaggtacaggatgagctggcgctgtatgcgcaaagcgagcgccggtcgctgcaggcctgtgcacaggcgttgaacctgggttcgatgtaa

SEQ ID NO: 1325 - protein, 464 aa, Pseudomonas putida KT2440
MPANDFVSPDSIRAQFSAAMSLMYKQEVPLYGTLLELVSEINQQVMAQQPEVAEALRWTGEIERLDQERHGAIRVGTAEELATIARLFAVMGMQPVGYYDLSSAGVPVHSTAFRAVHEQSLHVSPFRVFTSLLRLELIDNPQLRELAQSILAKRQIFTSRALELIAQCEREGGLDAADAETFVQEALHTFRWHQDATVTAEQYQQLHDQHRLIADVVAFKGPHINHLTPRTLDIDAIQLGMPAKGIPPKAVVEGPPTRRHPILLRQTSFKALQETVAFRDQQGREGSHTARFGEIEQRGAALTPKGRQLYDKLLDATRVALGGAPAEANAERYMALLQANFAEFPDDLAQMREQGLAYFRYFATEKGLAARDQEGRPTTLQGLIDAGHVHFEALVYEDFLPVSAAGIFQSNLGDDAQAEYGSNANREAFEAALGLQVQDELALYAQSERRSLQACAQALNLGSM

SEQ ID NO: 1326 - DNA, 1386 bp, Pseudomonas syringae pv. tomato str. DC3000
  CDS (1)..(1386): transl_table=11
atgagcactgcacgctttgccgacccggaccagattcgcgccgggttctcacgcgccatgtcgcagatgtaccagcacgaagtgccgctttacggcacgctgatggaactggtgagcgaggtcaacgcgcaggtcatgagccgcgacagccaggtgctgaacagtttgcgccagacgggcgaaatccagcgtctggacatggagcgtcacggcgcgattcgcgtgggtacggcgcaggaactggccaccctcgcccgcctgtttgcggtgatgggcatgcagccggtcggttactacgacctgacggcagccggcgtgccggtccactcgactgcctttcgtgctgtgcacgagcaggcattgcaggtcagtccgtttcgggtgttcacctcgttgctgcgtctggagctgatcgaaagcgacagcctgcgcgagttcgccagtcgtgtgctggccaagcgcacgatcttcacgcctggcgccttggcgctgatcgaaaagcatgaagcagacggcggcttgagcgagcccgacgccgccgagttcattcagcaagcgctggaaacctttcgctggcatcacacggcgacggtctcgctcgacgagtaccggcaattgaatgctcagcatcgcctgatcgccgatgtggtggcgtttcgtggcccgcacatcaaccacctgacgccgcgaaccctggacatcgacgccgtgcagagcggcatgcccggcaagggcattacgcccaaggccgtggttgaaggaccgccacctcgtcagtgtccaatcctgttgcgccagaccagcttcaaggcgctggaagaaccgatcagcttcatcggtcagggtggcagtcagtcgggcagtcactcggcacgcttcggcgagatcgaacagcgcggcgccgccctgacgcccaaaggccgcgagctgtatgaccggctgctgaacgaggcccgcgatgcactgggcgagttccccaatgaggccaatgccgtgcgctatgccgggctactggaaaaggcctttcaggcattcccggacagccatgatgaaatgcgtgcgcagggtctggcgtattttcgctatttcccgactgacacgggcgttgcggtccgtgtatccggcacgctggagcagcttatcgaagcgggtcatgtacgcttcgagcctttggcgtacgaagacttcctgcccgtcagcgcggcaggtatcttccagtccaacctgggtgacaacgcccaggcgcactacgcagcgaattcgaatcggcaggattttgagcgggcgctggggcgtgggacgcttgatgaactggcgctgtacgccgacacccagcggcggtcactggaagactgcgccgaggtgctggggttgaatgagtcataa

SEQ ID NO: 1327 - protein, 461 aa, Pseudomonas syringae pv. tomato str. DC3000
MSTARFADPDQIRAGFSRAMSQMYQHEVPLYGTLMELVSEVNAQVMSRDSQVLNSLRQTGEIQRLDMERHGAIRVGTAQELATLARLFAVMGMQPVGYYDLTAAGVPVHSTAFRAVHEQALQVSPFRVFTSLLRLELIESDSLREFASRVLAKRTIFTPGALALIEKHEADGGLSEPDAAEFIQQALETFRWHHTATVSLDEYRQLNAQHRLIADVVAFRGPHINHLTPRTLDIDAVQSGMPGKGITPKAVVEGPPPRQCPILLRQTSFKALEEPISFIGQGGSQSGSHSARFGEIEQRGAALTPKGRELYDRLLNEARDALGEFPNEANAVRYAGLLEKAFQAFPDSHDEMRAQGLAYFRYFPTDTGVAVRVSGTLEQLIEAGHVRFEPLAYEDFLPVSAAGIFQSNLGDNAQAHYAANSNRQDFERALGRGTLDELALYADTQRRSLEDCAEVLGLNES

SEQ ID NO: 1328 - DNA, 1419 bp, Yersinia pestis biovar Medievalis str. 91001
  CDS (1)..(1419): transl_table=11
atgcccccccaacagtttgtgcatcccgatgagatacgggccaaattctccagcgctatgtcggatatgtatcagaccgaagtccctctatatagcacattattacggctcgttgcggacacgaatacacaagagatggtgcaagatcagaaacttacccgtcatttgcagcaaactggggaaattgaacgcctaacgatggaaagacatggcgccatccgcgtcgggacagccgaagaactcaagatgctgcggcgcttgtttgcagtcatgggaatggtgccggtcggttattatgatttagcaccagcgggtgtcccggttcactccaccgccttccgtgcggtgcatgaaacctcactgcaagcctgccctttcagagtcttcacctcattactgcgtctggagttgattgagcaacctacactacggcaactggctgcggatattctggcgaaaagaacaattttcaccccacaggcgattaaactaattgttcagcatgaaacatcgggggggctcaatcgccatcaagccgatgatttcattgctcagtcgctggaaacatttcgctggcatcatcaggcaacggtcagcactgaaacctaccaacagctacacgatcaacaccgtctgattgctgatgtggtcgctttcaaaggtccgcatattaaccacctaactccacggaccttaaatatcgacgtcgtacaaacagcaatggcagagcataatatgatgcccaaagccgttatcgaagggccacccccccgccactgcccaatactgttacgccaaaccagcttcaaggcgctggaggaaaaaatcgcgtttgtatcaaatggtgggcaaataataccaggccaccatacggcccgcttcggggagatagagcaacgaggagccgctttgacggccaaaggccgtaatctgtatgaccacttactgcaaagcgcacaggatcaattgaacgttcctgtaaatgagaacaatgcggcgcaatatagcgcgatcctgagcgagaaatttagtcaattccctgatgattacccaacaatgcgagcagagaaactcgccttcttccgctattttcctacagaaaaaggccttatcactgcatcaatacaggaaatacaggaaatacaggaaatgacattagacgaacttattgataacggctttattcaatatgaaccgttggtttatgaagatttcctgccagtcagcgccgctggaatattccagtcaaacttaggcgagaaagggcagagtcactttaccgggcactccaataaagcagacttccagcgggatttggggattgcggttattgatgaactgcaactctacgaagcaacccagcaacgttccgttgctgaatgtgcagccgccctcaaactaacgttgttaagccaataa

SEQ ID NO: 1329 - protein, 472 aa, Yersinia pestis biovar Medievalis str. 91001
MPPQQFVHPDEIRAKFSSAMSDMYQTEVPLYSTLLRLVADTNTQEMVQDQKLTRHLQQTGEIERLTMERHGAIRVGTAEELKMLRRLFAVMGMVPVGYYDLAPAGVPVHSTAFRAVHETSLQACPFRVFTSLLRLELIEQPTLRQLAADILAKRTIFTPQAIKLIVQHETSGGLNRHQADDFIAQSLETFRWHHQATVSTETYQQLHDQHRLIADVVAFKGPHINHLTPRTLNIDVVQTAMAEHNMMPKAVIEGPPPRHCPILLRQTSFKALEEKIAFVSNGGQIIPGHHTARFGEIEQRGAALTAKGRNLYDHLLQSAQDQLNVPVNENNAAQYSAILSEKFSQFPDDYPTMRAEKLAFFRYFPTEKGLITASIQEIQEIQEMTLDELIDNGFIQYEPLVYEDFLPVSAAGIFQSNLGEKGQSHFTGHSNKADFQRDLGIAVIDELQLYEATQQRSVAECAAALKLTLLSQ

SEQ ID NO: 1330 - DNA, 1500 bp, Magnaporthe grisea 70-15
  CDS (1)..(1500)
atgatttccacattgacatcccctaaagaaccggcccacggtgccccgcccgcggcaggtgacggcctcgtgcagcccgatgagctccgcgcagcgtttgcgatggccatgtcgcaaatgtacaagaacgaggtgcctctgtacggcgacctgatgcggatcgtgcaaggggtcaacaagaaagtgctggagcgttcttcagacgagccccccagctctgatgccctcgatcaacttaccatggagcgccacggtgcaatccgcctgggcaaagcatcggagctcgggacggtgcggcgcatatttgctctcctggggatgcaccccgtcggatactacgacctctcggcagctggtctgcccatgcacgccacatgcttcaggccgccggactcgggctctctgagacgcaacccgttccgcgtctttacgacgctgctccgcacagacctgatccgctccgaggaggcgcgccgactcgcgctgcaactcttgtcaaagcgcaacctgtttagcgaggagctgatgcaattgctggaccgggccgaggcgcaaaacggaatcccgatcgacgaggccgacgtcttcatccgcgaggcgatgcaaatcttccggtgggcgcccgtggcggcgtcgacgcttgccgagtaccgaacgctgagggagcagcacccgatcctagccgacattgcctgcttccggacggcccacattaaccacctgaccccccgcacgctagacattggcctgactcaggcggccatgctggacgagggcatggccgtcaaggatcgcatcgagggcccgcctccccgcaaatgccagatcctgctgcgtcagaccagcttcctcgccctcgaggaggccatccgcttcaagagcgacgaggcgaccgaccaagatgccgccgccaccaatctgatcagcgcctcccacaaggcgcgattcggcgagatcgaggagcgcggtgccgccgtgacgcctgccggtcgccggctgtacgacgagctgctcgaggaggcctttgccagcagcgcgggcaagagcatccccgagatcgacgcggccatggcaaaagcctttgtccggtatcccgaccagtgggacgagctctgcgcgcggggtctcgtgtactacgaataccgcctggggtccaagcggcccggcgcagatgaccttgtgccgctgggtcacgtgcccgaggccgatgtggagcggctggtgggccaaggcttcctcgaaagggtgccgattacgtacgaggactttctgcccttctccgcagcgggaatcttccagtccaacctgccgcaggacggcaagagtgagccggtggagaaggaggtcatcaaggcgtcgccggatcacatcggcatggaaagggcgttgggctctgccaccatcaacccggacggtctgtatgaggaggtccaaaggaaaagtctggcgtccagcttggcggcgttgcagtctattgtgcaaggggctggcccaaactag

SEQ ID NO: 1331 - protein, 499 aa, Magnaporthe grisea 70-15
MISTLTSPKEPAHGAPPAAGDGLVQPDELRAAFAMAMSQMYKNEVPLYGDLMRIVQGVNKKVLERSSDEPPSSDALDQLTMERHGAIRLGKASELGTVRRIFALLGMHPVGYYDLSAAGLPMHATCFRPPDSGSLRRNPFRVFTTLLRTDLIRSEEARRLALQLLSKRNLFSEELMQLLDRAEAQNGIPIDEADVFIREAMQIFRWAPVAASTLAEYRTLREQHPILADIACFRTAHINHLTPRTLDIGLTQAAMLDEGMAVKDRIEGPPPRKCQILLRQTSFLALEEAIRFKSDEATDQDAAATNLISASHKARFGEIEERGAAVTPAGRRLYDELLEEAFASSAGKSIPEIDAAMAKAFVRYPDQWDELCARGLVYYEYRLGSKRPGADDLVPLGHVPEADVERLVGQGFLERVPITYEDFLPFSAAGIFQSNLPQDGKSEPVEKEVIKASPDHIGMERALGSATINPDGLYEEVQRKSLASSLAALQSIVQGAGPN

SEQ ID NO: 1332 - DNA, 1323 bp, Gibberella zeae PH-1
  CDS (1)..(1323)
atgacggcaacaaattcggtcagcccggacgccatcagggccatgttcgcattcgccctttcgagcatgtaccggcgcgaagtccctcaatatggcgctcttctcaagttggtatccgatatcaaccacaagaaacaacagcatatcgaaccgcgtatcgaagttgaaagacatggcgctatcaggctcgggacaccagaagagctatctatgatgcgacgtttattctccgtcatggggatgcattccgttggctactacgacctcactgttgccaatctcccagttcatgccacgtgctttcgaccactcacacaagaagcacttgcttacaaccctttccgggtttttacttcgttattgaggctagaactcatcgaggacgaagagctaagatcaaaagctgccgatatcttgagcaagcgatgcatcttcacatctcgttgtgtggagcttatcgaacagtttgaatcacaaggaccattgtcagcagccacagcagaggaattcatcaaagaggctctagaaacgtttcgctggcacaagacgtcaaccgtggatatcaagacatacaaagccctccgaaaagcacatcccttaatcgcagatgtcgtgtgcttcaaaggccctcacatcaaccatctcacgcctcgcgtcttggatattgaaatggcacaagtggaaatgctgcgatatggtctacaagcaaaagatgccatagaaggaccaccgtcacgattatgccccatattactccgccagaccagttttctagctatcgacgaagccatcgcattctcggagggtgaagaaactggtggaagtcacaaggcccgcttcggagagattgaacagcgaggaatggcattgacgcccaagggacgacgactatacgatgatctcattaatgagtggcgagagacatcgagtagcctcactgaagccgagtcgaaagagaagcatctagccaagatctttgagagattccctgacgatatggaaacacttcgaaaagagaaactggcctacttttcatacaagcctgtccacaacgcgtccatagcccaagacgctgatatcaactctcttatcagttctggagctgttgaggttgagcccattacatacgaagacttcctgccagtcagtgccgcagggatttttcactcaaatcttggtgatgacggtggtatgagccacacagtcggcgctgacaaaaattcgtttgagaagagtcttggatgttctgtgaagagggagtttgagctgtatagtgagatgcaggaggcttcgcttagacagtgttttgacactttgtgttaa

SEQ ID NO: 1333 - protein, 440 aa, Gibberella zeae PH-1
MTATNSVSPDAIRAMFAFALSSMYRREVPQYGALLKLVSDINHKKQQHIEPRIEVERHGAIRLGTPEELSMMRRLFSVMGMHSVGYYDLTVANLPVHATCFRPLTQEALAYNPFRVFTSLLRLELIEDEELRSKAADILSKRCIFTSRCVELIEQFESQGPLSAATAEEFIKEALETFRWHKTSTVDIKTYKALRKAHPLIADVVCFKGPHINHLTPRVLDIEMAQVEMLRYGLQAKDAIEGPPSRLCPILLRQTSFLAIDEAIAFSEGEETGGSHKARFGEIEQRGMALTPKGRRLYDDLINEWRETSSSLTEAESKEKHLAKIFERFPDDMETLRKEKLAYFSYKPVHNASIAQDADINSLISSGAVEVEPITYEDFLPVSAAGIFHSNLGDDGGMSHTVGADKNSFEKSLGCSVKREFELYSEMQEASLRQCFDTLC

SEQ ID NO: 1334 - DNA, 1929 bp, Ustilago maydis 521
  CDS (1)..(1929)
atgtacactaccgacacacgtgcaaggtatacattcgtctctttgcaaagtaccgccacggattacgccgagacagcgaactgtaagcagcgacgggatcgtcgtggaagtcagacaactgatcgttgcgacgtgcatccggctgttgcacaactgtacctgcgtacgattgcgtcgttggacggtgtaccacgtcgagcgtatagtgatacagcggtggaaaagaaatcgagtaggaagacgaacaagatgggcgtacaagcgaacgtgatacgcgcaacaaggtcggtgatgtcggaaaagttgacgacgacgttggacctgacagcgagctttgaggaatcgcaatcgcagacgttgccggcgctcagcagcacggacgagagcgaagtgtcgtcgtccacgtcgtcgatctcgagcaaagcgttgacgagcagtcagatgcgtgcgctgctcgcgtcatgcatgtcgtccatgtaccgctgtgaagtaccgctctacggcgaactcgtctcgatcatctcgagcgtcaactcggacgtgattcgcgccgccgcgaacacgatcagcgacgacgaaatctcgaggctgtacgtcgagcgtcacggcgcgatccgcgtcggcaccgcccaagagctttcgctgctagcaaggatcttcaaagtatttggaatgcatcccgtgggctactacgacctaatgcgcgatgccaaactacccatccatgcaaccgcatttcgaccggtgggaagagagaacctggtcaagaaccccttccggatcttctgcagtctgcttcgactggactgcattgcggatgacgagacgagaatgttggccaagcagctactggaaaacaggcaaattgtttcagaacgatgcatcgagttgctcgtcaaagccgaaatggatctgcagacgtgcaaggattatcaagacgacagcaaggtcagtggtctgacgcgcgacgaagcgttggagtttgtcgagcgcgtggtggatattttcgcgtggcacaaggacacgcccgtgtcactggagcagtacaacttgctggctgaaacgcacgcgcttgttgccgacatagtcagcttccgcggtcctcacatcaaccacttgacgccacgaacgctggacattgaccaggtgcagcgcaccatgctcgctcgtggcattgatgccaaggacgtcatcgagggtccacctaggagggagaacgaggtgtacttgaggcagacaagtttccacgcactctcggaaagcgtcgagtttctaggtggcaacacgggcacggtggaaggcaggcacaaggcgaggttcggagagatcgaggcgagaggtcaagctctcacgcgcaaaggcgctcagctgtacgatgcgctgatgcaacaagtggcgtgcaggaagagagaggtggagcagaagagtggagcaaagatggaaaaggaggaatgcgttcagattatgcaacacgtcttccaggatgggtttccggatagcaaagatgaactgctgcgacaagggttgggctactttacgttcagcatcaacgacggtcagctggccaagaacatgtgggagcgccaaagtcaagcctctgcttcttgtgacttgctagccgatatggtcaagagtggagcattgcatgcagagcctatcacgtacgaggactttttgcccgcttcggcagcgggtatctttcaaagcaatcttccccaagccaccgcgtcgctacctctggacccgcgattgcagatggaagcttgggaggcgagagctacgctacaagccgcggtgggcggaaccatcttggactactttgctctctacaccgaacagcagagccagagtcttatcgaggtgggcaccgtcttaggcaccgatatgggagagatagtgcgcgagatagcaacgcgccaggacgcgtaa

SEQ ID NO: 1335 - protein, 642 aa, Ustilago maydis 521
MYTTDTRARYTFVSLQSTATDYAETANCKQRRDRRGSQTTDRCDVHPAVAQLYLRTIASLDGVPRRAYSDTAVEKKSSRKTNKMGVQANVIRATRSVMSEKLTTTLDLTASFEESQSQTLPALSSTDESEVSSSTSSISSKALTSSQMRALLASCMSSMYRCEVPLYGELVSIISSVNSDVIRAAANTISDDEISRLYVERHGAIRVGTAQELSLLARIFKVFGMHPVGYYDLMRDAKLPIHATAFRPVGRENLVKNPFRIFCSLLRLDCIADDETRMLAKQLLENRQIVSERCIELLVKAEMDLQTCKDYQDDSKVSGLTRDEALEFVERVVDIFAWHKDTPVSLEQYNLLAETHALVADIVSFRGPHINHLTPRTLDIDQVQRTMLARGIDAKDVIEGPPRRENEVYLRQTSFHALSESVEFLGGNTGTVEGRHKARFGEIEARGQALTRKGAQLYDALMQQVACRKREVEQKSGAKMEKEECVQIMQHVFQDGFPDSKDELLRQGLGYFTFSINDGQLAKNMWERQSQASASCDLLADMVKSGALHAEPITYEDFLPASAAGIFQSNLPQATASLPLDPRLQMEAWEARATLQAAVGGTILDYFALYTEQQSQSLIEVGTVLGTDMGEIVREIATRQDA

SEQ ID NO: 1336 - DNA, 1446 bp, Yersinia pseudotuberculosis IP 32953
  CDS (1)..(1446): transl_table=11
atgaccccccaacagtttgtgcatcccgatgagatacgggccaaattctccagcgctatgtcggatatgtatcagaccgaagtccccctatatagcacattattacggctcgttgcggacacgaatacacaagagatgatgcaagatcagaagcttacccgtcatttgcagcaaactggggaaattgaacgcctaacgatggaaagacatggcgccatccgcgtcgggacagccgaagaactcaagatgctgcggcgcttgtttgcagtcatgggaatggtgccggtcggttattatgatttagcaccagcgggtgtcccggttcactccaccgccttccgtgcggtgcatgaaacctcactgcaagcctgccctttcagagtcttcacctcattactgcgtctggagttgattgagcaacctacactacggcaactggctgcggatattctggcgaaaagaacaattttcaccccacaggcgattaaactaattgttcagcatgaaacatcgggggggctcaatcgccatcaagccgatgatttcattgctcagtcgctggaaacatttcgctggcatcatcaggcaacggtcagcactgaaacctaccaacagctacacgatcaacaccgtctgattgctgatgtggtcgctttcaaaggtccgcatattaaccacctaactccacggaccttaaatatcgacgtcgtacaaacagcaatggcagagcataatatgatgcccaaagccgttatcgaagggccacccccccgccactgcccaatactgttacgccaaaccagcttcaaggcgctggaggaaaaaatcgcgtttgtatcaaatggtgggcaaataataccaggccaccatacggcccgcttcggggagatagagcaacgaggagccgctttgacggccaaaggccgtaatctgtatgaccacttactgcaaagcgcacaggatcaattgaacgttcctgtaaatgagaacaatgcggcgcaatatagcgcgatcctgagcgagaaatttagtcaattccctgatgattacccaacaatgcgagcagagaaactcgccttcttccgctattttcctacagaaaaaggccttatcactgcatcaatacaggaaatacaggaaatacaggaaatacaggaaatacaggaaatacaggaaatgacattagacgaacttattgataacggctttattcaatatgaaccgttggtttatgaagatttcctgccagtcagcgccgctggaatattccagtcaaacttaggcgagaaagggcagagtcactttaccgggcactccaataaagcagacttccagcgggatttggggattgcggttattgatgaactgcaactctacgaagcaacccagcaacgttccgttgctgaatgtgcagccgccctcaaactaacgttgttaagccaataa

SEQ ID NO: 1337 - protein, 481 aa, Yersinia pseudotuberculosis IP 32953
MTPQQFVHPDEIRAKFSSAMSDMYQTEVPLYSTLLRLVADTNTQEMMQDQKLTRHLQQTGEIERLTMERHGAIRVGTAEELKMLRRLFAVMGMVPVGYYDLAPAGVPVHSTAFRAVHETSLQACPFRVFTSLLRLELIEQPTLRQLAADILAKRTIFTPQAIKLIVQHETSGGLNRHQADDFIAQSLETFRWHHQATVSTETYQQLHDQHRLIADVVAFKGPHINHLTPRTLNIDVVQTAMAEHNMMPKAVIEGPPPRHCPILLRQTSFKALEEKIAFVSNGGQIIPGHHTARFGEIEQRGAALTAKGRNLYDHLLQSAQDQLNVPVNENNAAQYSAILSEKFSQFPDDYPTMRAEKLAFFRYFPTEKGLITASIQEIQEIQEIQEIQEIQEMTLDELIDNGFIQYEPLVYEDFLPVSAAGIFQSNLGEKGQSHFTGHSNKADFQRDLGIAVIDELQLYEATQQRSVAECAAALKLTLLSQ

SEQ ID NO: 1338 - DNA, 1392 bp, Pseudomonas syringae pv. syringae B728a
  CDS (1)..(1392): transl_table=11
atgagcacagcacgctttgccgacccggaccagatccgcgcgggcttttctcgcgccatgtcgcagatgtacaagcacgaagtgccgctgtacggcacgctgatggcgctggtgagtgaagtcaacgaacaggtcatgagccatgacagcagtgtgctggacagcctgcgccagaccggtgaaatccagcgcctggacatggaacggcacggtgcgatccgcgtcggcacggcacaggaactggccaccctcgcccgcctgttcgcggtcatgggcatgcagccggtgggttactacgacctgagcgcggccggcgtgccggttcactccaccgcctttcgcgccgtgcatgagcaggcgctgcaggtcagtccgtttcgggtgttcacctcgttgctgcgtctggaactgatcgaaagcgacagcctgcgtgagttcgccagtcaggtgctgggcaaacgcagtatcttcacgcccggcgccctggcgttgatcgagaagcatgaagcagacggcggcttgagcgaagccgatgcggccgagttcattcagcaggcgctggaaacctttcgctggcacaacacggcgaccgtttcgctggacgactatcagaagctgaacacgcagcatcgtctgatcgctgatgtggtggcgtttcgtggtccgcacatcaaccacctgacgcctcgcacgctggacatcgatgcggttcaggccggcatgcccggcaagggcatcacccccaaagcggtggttgaagggccgccacgtcgccagtgcccgattctgctgcgccagaccagcttcaaggcgctggaagaaccgattgccttcatcggccaaggtggcagtcagtcgggcagccactcggcacgcttcggcgagatcgaacagcgtggcgccgcactgacgcccaaaggccgcgagctgtatgaccggctgttgagcgaagcccgcgacgcgctgggcgagttccccaatgaggccaatgccgtgcgctatgccgggctgctggaagagacgttcaaggcgttcccggacagccacgctgaaatgcgcaggcagggtctggcctacttccgctatttcccgaccgaatcaggcattgccgcgcgcgcatcaggcagtctggagcagcttgtcgaagccggtcatgtgcgcttcgagccactggtgtacgaagactttttgccggtcagcgcggcgggtatcttccagtccaatctgggcgataacgcacaggcgcattacgcgacgaattcgaatcagcaggatttcgagcgggcgctgggacgcgggacgcttaacgaactggacctgtatgccgatacccagcgtcgctccctggaggaatgcgccaaggcgctggagctgagcagtcccgcctactaa

SEQ ID NO: 1339 - protein, 463 aa, Pseudomonas syringae pv. syringae B728a
MSTARFADPDQIRAGFSRAMSQMYKHEVPLYGTLMALVSEVNEQVMSHDSSVLDSLRQTGEIQRLDMERHGAIRVGTAQELATLARLFAVMGMQPVGYYDLSAAGVPVHSTAFRAVHEQALQVSPFRVFTSLLRLELIESDSLREFASQVLGKRSIFTPGALALIEKHEADGGLSEADAAEFIQQALETFRWHNTATVSLDDYQKLNTQHRLIADVVAFRGPHINHLTPRTLDIDAVQAGMPGKGITPKAVVEGPPRRQCPILLRQTSFKALEEPIAFIGQGGSQSGSHSARFGEIEQRGAALTPKGRELYDRLLSEARDALGEFPNEANAVRYAGLLEETFKAFPDSHAEMRRQGLAYFRYFPTESGIAARASGSLEQLVEAGHVRFEPLVYEDFLPVSAAGIFQSNLGDNAQAHYATNSNQQDFERALGRGTLNELDLYADTQRRSLEECAKALELSSPAY

SEQ ID NO: 1340 - DNA, 1500 bp, Pseudomonas fluorescens Pf-5
  CDS (1)..(1500): transl_table=11
atgaagttcagaggaaacttcgtttgtcagcctcgggcaggcccagcagaatcgaggccgacccgccctttcacgcctcgcccctctgccacgggaagcctgttcatgagcaaccagcacttcgtcagcccggacctgatccgccagggattttcccgggcgatgtcggacatgtaccgcgaggaggtgccgctctacggcgccctgatggagctggtggccgaagtcaacgcccaggtcctggagcggcagccggcgcttgcccggcacctgcagagcagcggcgagttgcagcgcctggacctggagcgccacggcgcgatccgcgtcggcagcgccgccgagctggcgaccctggcccggctgttcgcggtgatgggcatgcagccggtgggctactacgacctgacccccgccggggtgccggtgcattccacggcctttcgcgcggtgcacgaagcggccctgcaagtcagcccgttccgggtcttcacctcgctgctgcgcctggagctgatcgacaacccggagctgcgcagctttgccgaacaggtcctggcccggcgccagatcttcaccccccaggtgctggaactgatccagcaggccgaggctgccggaggcctggacgccgaagacgccgagcgctttatccgccaggccctggaaaccttccgctggcaccaccacgccacggtgaccgccgcccagtacgccagcctcagcgcccagcaccggctgatcgccgacgtggtggccttcaagggcccgcacatcaaccacctgaccccgcgtaccctggacatcgatgaagtgcaacggctgatgcctgcccgcggcatcacccccaaggcggtgatcgaaggcccgccgcgccgggaatgcccgatcctgctgcgccagaccagcttcaaggccctggaggaatccgtggccttcaccgaccaggcccagagccagggcagccacagcgcgcgtttcggcgagatcgaacagcgcggcgcggcgctgacccccaagggccgcgagctctacgaccgcctgctgaacgccgcccgcgacgccctgggcgacttccccaacgaagccaatgcccaacgctacaaccaactgatgcaagagcacttcagggaatttcccgacagccacccagccatgcgcgaacagggcctggcctactttcgctacttcgtcagcgaaaccgggctggccgcgcgcaaccagccccagcggcccaccaccctggcagcgctgctggcggccgggcacctgagcgccgaacccctggtgtatgaagatttcctgccggtcagcgccgccgggatcttccagtccaacctgggggacgacagccagagccactacgccgggcaatccaaccgccaggcgttcgaagccgccctgggccgccccaccctcgacgaactgcagctctacgcccagacccagcagcgctccctggagcactgcgccgccaccctgggcctgccggcgctctaa

SEQ ID NO: 1341 - protein, 499 aa, Pseudomonas fluorescens Pf-5
MKFRGNFVCQPRAGPAESRPTRPFTPRPSATGSLFMSNQHFVSPDLIRQGFSRAMSDMYREEVPLYGALMELVAEVNAQVLERQPALARHLQSSGELQRLDLERHGAIRVGSAAELATLARLFAVMGMQPVGYYDLTPAGVPVHSTAFRAVHEAALQVSPFRVFTSLLRLELIDNPELRSFAEQVLARRQIFTPQVLELIQQAEAAGGLDAEDAERFIRQALETFRWHHHATVTAAQYASLSAQHRLIADVVAFKGPHINHLTPRTLDIDEVQRLMPARGITPKAVIEGPPRRECPILLRQTSFKALEESVAFTDQAQSQGSHSARFGEIEQRGAALTPKGRELYDRLLNAARDALGDFPNEANAQRYNQLMQEHFREFPDSHPAMREQGLAYFRYFVSETGLAARNQPQRPTTLAALLAAGHLSAEPLVYEDFLPVSAAGIFQSNLGDDSQSHYAGQSNRQAFEAALGRPTLDELQLYAQTQQRSLEHCAATLGLPAL

SEQ ID NO: 1342 - DNA, 1389 bp, Pseudomonas syringae pv. phaseolicola 1448A
  CDS (1)..(1389): transl_table=11
atgagcactgcacgctttgccgacccggaccagatccgcgcgggcttttctcgcgccatgtcgcagatgtaccagcacgaagtgccgctgtacggcacgctgatggcgctggtcagcgaggtcaatgcgcaggtcatgagccgcgacagccaggtgctgaacagcctgcgccagaccggcgagatccagcggctggacatggaacgccacggcgcgatccgcgtcggtacggctgaggaactggccaccctcgcccgcctgtttgcggtgatgggcatgcagccggtcggttattacgacctgaccgaagccggtgtgccggttcactccacagcgtttcgtgccgtgcatgaacaggcgttgcaggtcagcccgtttcgggttttcacctcactgctgcgcctggaactgatcgagagtgacagcctgcgcgagtttgccagtcaggtgctggccaagcgcagaatcttcacgcccggtgccctggcgttgatcgacaagcatgagacagacggcgggttgagcgagcccgacgctgccgagttcattcagcaggcgctggaaacctttcgctggcataacacggcgacggtctcgcttgacgagtaccagaagctcaacgtccagcatcgcctgatcgccgatgtggtggcgtttcgtggcccgcacatcaatcacctcaccccgcgcacactggatatcgatgcggtgcaaagcggcatgcccggcaaaggcatcacgcccaaggccgtggttgaagggccaccgcgtcgccagtgtccgattttgttgcgccagaccagcttcaaggcgcttgaagaacccattacgttcattggtcaggggggcagtcagtcgggcagtcattcggcacgcttcggcgagatcgaacagcgcggcgcagccctgacgcccaaaggtcgcgcgctgtatgaccggctgttgaacgaagctcgcgacgaactgggtgagtttcccaacgaagccaacgccgtgcgctatgcagaattgctggaaaaggcatttcaggcctttccggacaatcatgatgaaatgcgcacgcaggggctggcctactttcgctattttccgactgaatcaggcattgccgagcgtgcatcctgcagcctggagcagcttgtggaagcaggtcatgtgcgtttcgagccgctggtgtatgaagactttctgccagtcagtgcggcaggcatcttccagtccaacctgggcgacaacgcgcaggcgcattacacgacgaattcgaatcagcaggattttgagcgggcactggggcgcagcacacttgatgaactggcgctgtacgccgacacccagcagcgttcgctcgaggaatgcgccaaggcgttggggctgaaagcactgggctga

SEQ ID NO: 1343 - protein, 462 aa, Pseudomonas syringae pv. phaseolicola 1448A
MSTARFADPDQIRAGFSRAMSQMYQHEVPLYGTLMALVSEVNAQVMSRDSQVLNSLRQTGEIQRLDMERHGAIRVGTAEELATLARLFAVMGMQPVGYYDLTEAGVPVHSTAFRAVHEQALQVSPFRVFTSLLRLELIESDSLREFASQVLAKRRIFTPGALALIDKHETDGGLSEPDAAEFIQQALETFRWHNTATVSLDEYQKLNVQHRLIADVVAFRGPHINHLTPRTLDIDAVQSGMPGKGITPKAVVEGPPRRQCPILLRQTSFKALEEPITFIGQGGSQSGSHSARFGEIEQRGAALTPKGRALYDRLLNEARDELGEFPNEANAVRYAELLEKAFQAFPDNHDEMRTQGLAYFRYFPTESGIAERASCSLEQLVEAGHVRFEPLVYEDFLPVSAAGIFQSNLGDNAQAHYTTNSNQQDFERALGRSTLDELALYADTQQRSLEECAKALGLKALG

SEQ ID NO: 1344 - DNA, 1377 bp, Pseudomonas fluorescens PfO-1
  CDS (1)..(1377): transl_table=11
atgaccgtgcagcctttcgtcagccccgacctgatccgccaacgcttctccaaagcgatgtccgacatgtaccgcgaagaagtgccgctgtacggcgcgttgatggaattggtggaacagaccaaccgcgacgtgctggcacgcgaaccgcagatcgccagccaactgcacagcactggcgaaatcgaacggctggacatggagcgccacggtgccatccgcgtcggcaccgccgcagagctcgccaccctcgcccgcctgtttgcggtgatgggcatgcaaccggtgggctattacgacctgacccctgccggggtgccggtgcactccacggcgttccgggcggtgcatgaagatgcgctgcaggtcagtccgttccgggtgttcacttcgttgctgcgactggaattgattgaagaccccgagctgcgggcctttgctgaatcggtgctggataagcgttcgatctttacgccatcggcgctaaggttgatcgaacaggccgaatcggctggcggtctgaatgaatccgaggccggggaatttgtcctgcaagcgctggagacttttcgctggcaccacagcgccaccgtcactgccgcgcaataccagacgctcagcgcccagcatcgcttgatcgccgatgtcgtggccttcaagggcccgcacatcaaccacctgaccccgcgcacgctggacatcgacatcgtccaggcacagatgccgctgcacggcatcacgcccaaagcggtgatcgaaggcccgccgcgccggcagcatccgatcctgttgcgtcagaccagtttcaaggcgctggacgagccgatcgccttcaccgaccagacacaaacccgcggcagccacagcgcccgcttcggcgaaatcgaacaacgtggcgcagcgctgacccccaagggccgtgcgttgtacgaccgcctgctgaacgcggcgcgcgatgaactgggcgatttccccaacgaagccaacgcctcacgttacaacgcgctgatgacccagcatttcagcgaattccctgacagcctcgagggcatgcgcgagcaggaactggcgtacttccgttatttcctgacaggcaaagtaggtcgtcccgcagatgtaacgctgcaaggattattacgcgacggctatgtgaaagccgaaccgctggtgtacgaagatttcctgccagtcagtgcggcagggatttttcagtcgaacctgggggacgcggcgcaggcgcactatggcgaacattccaatcgacaggcgttcgagttggccttggggcgttcgaccattgatgagttgggcctgtatgccgaaacccagcaacgttcgattgaggaatgcctcactgcaattgcccactccgcgtga

SEQ ID NO: 1345 - protein, 458 aa, Pseudomonas fluorescens PfO-1
MTVQPFVSPDLIRQRFSKAMSDMYREEVPLYGALMELVEQTNRDVLAREPQIASQLHSTGEIERLDMERHGAIRVGTAAELATLARLFAVMGMQPVGYYDLTPAGVPVHSTAFRAVHEDALQVSPFRVFTSLLRLELIEDPELRAFAESVLDKRSIFTPSALRLIEQAESAGGLNESEAGEFVLQALETFRWHHSATVTAAQYQTLSAQHRLIADVVAFKGPHINHLTPRTLDIDIVQAQMPLHGITPKAVIEGPPRRQHPILLRQTSFKALDEPIAFTDQTQTRGSHSARFGEIEQRGAALTPKGRALYDRLLNAARDELGDFPNEANASRYNALMTQHFSEFPDSLEGMREQELAYFRYFLTGKVGRPADVTLQGLLRDGYVKAEPLVYEDFLPVSAAGIFQSNLGDAAQAHYGEHSNRQAFELALGRSTIDELGLYAETQQRSIEECLTAIAHSA

SEQ ID NO: 1346 - DNA, 1449 bp, Mesorhizobium sp. BNC1
  CDS (1)..(1449): transl_table=11
atgacaacttcaggcgagtctgactttgatggaaccagaaaagcattggacatggtgagcaaggacagcttcctccccgcagacgaaatccgcagcgcattctctgcggccatgtccgcgatgtaccgcacggaagtgcctgcctatggtactctcctgtcgctcgtcgccgaagtaaaccaacgcaccctcgccgagaatccagagctgcgcgagcgactcgaggtgacggattcgctcgaccgcatctcagaggagcggcacggcgccatccggctcgggcgcgcagacgagctttccatgatgcgacgggcattcgcggtcatgggaatgtttccagttgggtattacgatctcagcgaagcgggcgtccctgttcattccacggcgttccggcccttcgacggagctgcgctaagcatcaatccgttccgggtctttacgtcgctgctgcggctcgacctgatcgaagacgcagagctgcgtgaggatgcgcgggcgatcctcgagcggcgccagattttcacgccgcgcgcaatggagctgatcgagaaggccgaggctggaggcgggcttgaggctgacgacgccacgctcttcgtgactgaactgctggagaccttccagtggcactcccaagccagcgtggatcatcaactctataggcgacttcattccgcccatcggctgattgcagatgtggtttccttccgcggcccgcatatcaaccacctgacgccccgcaccctcgacatcgatgaagttcagcggcttatgccggagcgtggcatcgtaccgaaggccgtcatcgaagggccgccgtcgcgtgcctgccccatcctgctgcgccagacgtctttcaaggcgctggaggagcctgtcgccttcctccagcagggtagcggacgggtagcaggctctcacacggcccggttcggcgagatcgagcagcgcggcgtcgcgctcacgccgaaagggcgcaagctctacgaccggctcctaggcgaggcacggaaaaatgcccgcccggccgccgacggctccaacgcagcggactaccggagcgcgctggagatcgccttcctgaacttccccgatacttgggacgagatcaggcggcagggcctgggatatttcacctatcgtgtggaagagcccgtcctgggaacggccttgcatgctaccggaaaatcgttcgacgaactcgtagaagccggagccgtcgcgtgcgatccgatcgtatatgaagatttcctcccggtcagcgcggcaggcatcttccagtcgaatcttggcgacgacgatgctcaggagttctcgcccagcccgaaccagaggacgttcgaggaagcgctcggcgtcaatgtgctcaacgagttcgagcactatgcggagcttgagaggcgttcgatcgaacgctgtctgttgcggttgtcggcggcggcatga

SEQ ID NO: 1347 - protein, 482 aa, Mesorhizobium sp. BNC1
MTTSGESDFDGTRKALDMVSKDSFLPADEIRSAFSAAMSAMYRTEVPAYGTLLSLVAEVNQRTLAENPELRERLEVTDSLDRISEERHGAIRLGRADELSMMRRAFAVMGMFPVGYYDLSEAGVPVHSTAFRPFDGAALSINPFRVFTSLLRLDLIEDAELREDARAILERRQIFTPRAMELIEKAEAGGGLEADDATLFVTELLETFQWHSQASVDHQLYRRLHSAHRLIADVVSFRGPHINHLTPRTLDIDEVQRLMPERGIVPKAVIEGPPSRACPILLRQTSFKALEEPVAFLQQGSGRVAGSHTARFGEIEQRGVALTPKGRKLYDRLLGEARKNARPAADGSNAADYRSALEIAFLNFPDTWDEIRRQGLGYFTYRVEEPVLGTALHATGKSFDELVEAGAVACDPIVYEDFLPVSAAGIFQSNLGDDDAQEFSPSPNQRTFEEALGVNVLNEFEHYAELERRSIERCLLRLSAAA

SEQ ID NO: 1348 - DNA, 1407 bp, Aspergillus oryzae
  CDS (1)..(1407)
atggggtgggatcaagacgtcctcagggcccaattctgccatgcactttctgaaatgtacaagagcgaggtccccctctacggggatctagtggatcttgtctggaaggcagatgccgaagcaatcaacgcccgccacgaacaaggaaccgaggtgtttgatccggatgagatactgccgtcgcgaaaccgagtcgaaagacatggggctatccggctgggtaccgcatacgagctctcgactattcgacggatgtttgcaatcatgggcatgttccctgtgggatattacgatctgagtgctgccggattcccaatgcatgctactgcgtttcgtccctggacaaaggaagcattatccagacatccgtttcgggtgttcacgacggttctacgtatggagttgttgacggagaagacccaagagttggcacaaagagctctacgacaaaggaatatttttacagatcggctagtcgctcttattgagttggccgaaaagcaaggtcagcttagttcgacggagtgcaaagagtttattgtggaagggctggagacgttccggtggcattccagggcgactgtgacgatggaggaatatcagattctaaaggctgagcatccactgattgcggatgttgtttcctttcccagttgccatattaaccatctcacaccgcggacggtcgatatcgatctagtgcagaaaatgatgcaggaccatggcatgccggcaaaggaacggattgaaggtcccccacgacggcaatgcccgatcttgctccgtcagactagcttcaaagcattggaggaaactgtttacttccgagaagcccatgatgcttatgtgaaaggttcacacacggctcggtttggagaggttgagcagcgcggatacgcattgacgcggaagggtcgccaactctatgacagaattttgtcacgggtcaatattgagtcaactgagagagatatcggtatttctgaatatgaaagcctcctggtgcaacattttaaggatttcccggacgatatggctcagttgcagtctcagcaactggcgtacttttgttaccatttatcgccacacggtcaaaagcccccggggctcgatctgcaagggggtgatatgaccttgcaacagctactggagaatagtatcatcgagtatgagcctatcacatatgaggactttctacccttgtcagccgggggtatcttcaattcaaacttaggaaacacgtcccaatcaaaacagctggtcatggaagctgaagcggacctggatggatttcagcgtatgctggggacgtctataatggatgagttccatctctatgcacaaatacaacaaaacagcttggagaactgtcggaggcaactgggattgaatgtgattctagagtaa

SEQ ID NO: 1349 - protein, 468 aa, Aspergillus oryzae
MGWDQDVLRAQFCHALSEMYKSEVPLYGDLVDLVWKADAEAINARHEQGTEVFDPDEILPSRNRVERHGAIRLGTAYELSTIRRMFAIMGMFPVGYYDLSAAGFPMHATAFRPWTKEALSRHPFRVFTTVLRMELLTEKTQELAQRALRQRNIFTDRLVALIELAEKQGQLSSTECKEFIVEGLETFRWHSRATVTMEEYQILKAEHPLIADVVSFPSCHINHLTPRTVDIDLVQKMMQDHGMPAKERIEGPPRRQCPILLRQTSFKALEETVYFREAHDAYVKGSHTARFGEVEQRGYALTRKGRQLYDRILSRVNIESTERDIGISEYESLLVQHFKDFPDDMAQLQSQQLAYFCYHLSPHGQKPPGLDLQGGDMTLQQLLENSIIEYEPITYEDFLPLSAGGIFNSNLGNTSQSKQLVMEAEADLDGFQRMLGTSIMDEFHLYAQIQQNSLENCRRQLGLNVILE

SEQ ID NO: 1350 - DNA, 1425 bp, Aspergillus oryzae
  CDS (1)..(1425)
atgcaaaaccacactttacgccagcatgtcccatcagcaaacatccgacaagcctttgcggtggccatgtcagccatgtacgccaaagaggtccctttatatggcgatttgcttagtttggttcaacaaagtaaccagagagtacttgagagcgatccaaatcttcgccaaaagctcagtactactgataatctcgacagaatccattgggagcgccacggagccatacgtgtcggcaggccggacgagctgaaccaggtccgacgcgtcctccaggtcatgaatatgctgcctactgggtattatgaccttgcaccggctaatgtcccggtgcattcgacttgtttccgagcacctgaactatctgagctctcgaaaaatgcttttcgcatgtttgtctccttgctccgcccagagctgatcaagtccgatgaggttcgtcaacgcgttaccagcattctttcccgccggagtatattctccgaaaggatgttggcgctgctggccatatatgaatccaacgggggccttgtcgaagcggaagccgaagagtttgtccatgaagcaacgagcagcttccagtggcacaactcagccgcggtatcttatgtggaataccaggagatgttatccgaaagcgctatcttggccgacattgttgccttcaagtcgccgcatatcaaccacctgaccccacgagtactggacattgacgcagtccaatcgagtatgcgagactggaacataccggtcaaagattacatcgagggacctccgaaacggaaatgtcctattcttcttcgacagactagttttaaagcgattgaggagccaatcagctttcctgtggaaataacagaatctgcaaacactaagcaatttgtcccaggcagacacaaggcacgcttcggcgagattgaacagcgaggtgcggctctaacggtgaaaggacgtcaactgtatgattcgcttctggcaatagcgaccagggattctatcacagccggtgatacgactgcgttctcccgtgtctttgcgagtttcccagactcttggatggaaatgcgcgagctaggactggcctggttccgctactacatcaatcccaacaaacttcacgcgcagcctgaaccgaagccattcaacttaagccaattgattgaggatgacatagtccgctacgagcccatagtctacgaagactttctccccataagcgcggccggcatcttccggagtaacttggacaagaacggggatagcgcaactatatacttgaactcctgtgacctctgtagtaagtgtgactttgagaaggctctcggggttgaagtcgccgacgagatgcttctgtatcagagaattcaggcggagagcatcgaccagtgtaaggcttgggttgaaaacgcttggggaggtttatag

SEQ ID NO: 1351 - protein, 474 aa, Aspergillus oryzae
MQNHTLRQHVPSANIRQAFAVAMSAMYAKEVPLYGDLLSLVQQSNQRVLESDPNLRQKLSTTDNLDRIHWERHGAIRVGRPDELNQVRRVLQVMNMLPTGYYDLAPANVPVHSTCFRAPELSELSKNAFRMFVSLLRPELIKSDEVRQRVTSILSRRSIFSERMLALLAIYESNGGLVEAEAEEFVHEATSSFQWHNSAAVSYVEYQEMLSESAILADIVAFKSPHINHLTPRVLDIDAVQSSMRDWNIPVKDYIEGPPKRKCPILLRQTSFKAIEEPISFPVEITESANTKQFVPGRHKARFGEIEQRGAALTVKGRQLYDSLLAIATRDSITAGDTTAFSRVFASFPDSWMEMRELGLAWFRYYINPNKLHAQPEPKPFNLSQLIEDDIVRYEPIVYEDFLPISAAGIFRSNLDKNGDSATIYLNSCDLCSKCDFEKALGVEVADEMLLYQRIQAESIDQCKAWVENAWGGL

SEQ ID NO: 1352 - DNA, 1248 bp, Mycobacterium tuberculosis
  CDS (1)..(1248): transl_table=11
atgagccgctcgaaaagactgcagactggccagctgcgcgcgcgcttcgccgccgggttgtcagccatgtacgccgctgaggtgcccgcctacggcacgctggtcgaggtatgcgcacaagtcaactccgattacctgacccggcatcggcgagccgagcggctggggtcgcttcagcgcgtcaccgccgagcgccacggcgccatccgagtgggcaacccggccgaactcgctgcggtcgccgacctgttcgccgcgttcgggatgctgccggtcggctactacgatctgcgcaccgctgagtcaccaattccagtggtgtccaccgcatttcgcccaatcgatgcgaacgagctggcacacaacccgtttcgggtgttcacctcgatgctggccatcgaggatcggcggtacttcgatgccgacctacgcacccgagtgcagaccttcctcgcgcgccggcaactctttgaccccgcgttgctcgcccaggcgcgggcaatcgcggctgacggcggctgcgatgccgacgacgcaccggctttcgtcgccgcggcggtggccgcgtttgcgctgtcgcgggaaccggtcgagaaatcctggtacgacgagttgtccagggtgtcggcggtggccgctgatatcgctggagtcggctccacacacatcaaccatctgacgcctcgggtgctcgacatagacgatctgtaccgtcggatgaccgagcgcggcatcaccatgatcgacaccatccaaggccctccccgcaccgacggacccgatgtgttgttgcggcaaacctcatttcgcgcgctggccgaaccacgcatgtttcgcgacgaggacggtaccgtgacgccgggaatcctgcgggtgcggttcggtgaggtcgaggcgcgcggtgtcgcgctgaccccgcgagggcgcgaacgctacgaagccgcgatggcggccgcagatccggccgcggtctgggccactcactttccctcgacggatgcggagatggccgctcaaggcttggcctactaccgaggtggtgacccgtcagcgccgatcgtctacgaagacttcctgcccgcttcggccgcgggcatcttccgctccaacctggatcgcgactcgcaaaccggtgacggacccgacgatgccggctacaacgtcgattggttggccggggcaatcggccgacacattcacgacccgtatgcgctctatgacgcgctcgcccaggaggagcggcgctga

SEQ ID NO: 1353 - protein, 415 aa, Mycobacterium tuberculosis
MSRSKRLQTGQLRARFAAGLSAMYAAEVPAYGTLVEVCAQVNSDYLTRHRRAERLGSLQRVTAERHGAIRVGNPAELAAVADLFAAFGMLPVGYYDLRTAESPIPVVSTAFRPIDANELAHNPFRVFTSMLAIEDRRYFDADLRTRVQTFLARRQLFDPALLAQARAIAADGGCDADDAPAFVAAAVAAFALSREPVEKSWYDELSRVSAVAADIAGVGSTHINHLTPRVLDIDDLYRRMTERGITMIDTIQGPPRTDGPDVLLRQTSFRALAEPRMFRDEDGTVTPGILRVRFGEVEARGVALTPRGRERYEAAMAAADPAAVWATHFPSTDAEMAAQGLAYYRGGDPSAPIVYEDFLPASAAGIFRSNLDRDSQTGDGPDDAGYNVDWLAGAIGRHIHDPYALYDALAQEERR

SEQ ID NO: 1354 - DNA, 21 bp, Artificial sequence
  primer
atggcgaacagcatcacggcg

SEQ ID NO: 1355 - DNA, 24 bp, Artificial sequence
  primer
ttaaagcaaaccacagcgacgttt

SEQ ID NO: 1356 - protein, 498 aa, Artificial sequence
  consensus sequence
  Variant (2)..(3): Xaa in position 2 to 3 is any amino acid
  Variant (5)..(6): Xaa in position 5 to 6 is any amino acid
  Variant (8)..(9): Xaa in position 8 to 9 is any amino acid
  Variant (13)..(13): Xaa in position 13 is any amino acid
  Variant (16)..(17): Xaa in position 16 to 17 is any amino acid
  Variant (21)..(21): Xaa in position 21 is any amino acid
  Variant (24)..(24): Xaa in position 24 is any amino acid
  Variant (26)..(27): Xaa in position 26 to 27 is any amino acid
  Variant (30)..(32): Xaa in position 30 to 32 is any amino acid
  Variant (34)..(42): Xaa in position 34 to 42 is any amino acid
  Variant (43)..(56): Xaa in position 43 to 56 is any or no amino acid
  Variant (58)..(60): Xaa in position 58 to 60 is any amino acid
  Variant (68)..(68): Xaa in position 68 is any amino acid
  Variant (70)..(72): Xaa in position 70 to 72 is any amino acid
  Variant (75)..(78): Xaa in position 75 to 78 is any amino acid
  Variant (80)..(80): Xaa in position 80 is any amino acid
  Variant (83)..(83): Xaa in position 83 is any amino acid
  Variant (87)..(87): Xaa in position 87 is any amino acid
  Variant (95)..(96): Xaa in position 95 to 96 is any amino acid
  Variant (97)..(99): Xaa in position 97 to 99 is any or no amino acid
  Variant (101)..(101): Xaa in position 101 is any amino acid
  Variant (102)..(102): Xaa in position 102 is any or no amino acid
  Variant (111)..(116): Xaa in position 111 to 116 is any amino acid
  Variant (118)..(120): Xaa in position 118 to 120 is any amino acid
  Variant (131)..(132): Xaa in position 131 to 132 is any amino acid
  Variant (133)..(134): Xaa in position 133 to 134 is any or no amino acid
  Variant (137)..(140): Xaa in position 137 to 140 is any amino acid
  Variant (141)..(141): Xaa in position 141 is any or no amino acid
  Variant (143)..(144): Xaa in position 143 to 144 is any amino acid
  Variant (146)..(148): Xaa in position 146 to 148 is any amino acid
  Variant (150)..(151): Xaa in position 150 to 151 is any amino acid
  Variant (153)..(153): Xaa in position 153 is any amino acid
  Variant (156)..(161): Xaa in position 156 to 161 is any amino acid
  Variant (163)..(166): Xaa in position 163 to 166 is any amino acid
  Variant (168)..(169): Xaa in position 168 to 169 is any amino acid
  Variant (170)..(182): Xaa in position 170 to 182 is any or no amino acid
  Variant (186)..(189): Xaa in position 186 to 189 is any amino acid
  Variant (191)..(192): Xaa in position 191 to 192 is any amino acid
  Variant (194)..(200): Xaa in position 194 to 200 is any amino acid
  Variant (202)..(202): Xaa in position 202 is any amino acid
  Variant (205)..(206): Xaa in position 205 to 206 is any amino acid
  Variant (208)..(208): Xaa in position 208 is any amino acid
  Variant (210)..(213): Xaa in position 210 to 213 is any amino acid
  Variant (215)..(216): Xaa in position 215 to 216 is any amino acid
  Variant (218)..(220): Xaa in position 218 to 220 is any amino acid
  Variant (222)..(222): Xaa in position 222 is any amino acid
  Variant (224)..(224): Xaa in position 224 is any amino acid
  Variant (227)..(227): Xaa in position 227 is any amino acid
  Variant (229)..(229): Xaa in position 229 is any amino acid
  Variant (231)..(233): Xaa in position 231 to 233 is any amino acid
  Variant (247)..(248): Xaa in position 247 to 248 is any amino acid
  Variant (250)..(251): Xaa in position 250 to 251 is any amino acid
  Variant (253)..(255): Xaa in position 253 to 255 is any amino acid
  Variant (257)..(259): Xaa in position 257 to 259 is any amino acid
  Variant (261)..(263): Xaa in position 261 to 263 is any amino acid
  Variant (268)..(268): Xaa in position 268 is any amino acid
  Variant (270)..(271): Xaa in position 270 to 271 is any amino acid
  Variant (273)..(273): Xaa in position 273 is any amino acid
  Variant (282)..(282): Xaa in position 282 is any amino acid
  Variant (285)..(285): Xaa in position 285 is any amino acid
  Variant (287)..(289): Xaa in position 287 to 289 is any amino acid
  Variant (291)..(295): Xaa in position 291 to 295 is any amino acid
  Variant (296)..(307): Xaa in position 296 to 307 is any or no amino acid
  Variant (309)..(309): Xaa in position 309 is any amino acid
  Variant (311)..(311): Xaa in position 311 is any amino acid
  Variant (322)..(322): Xaa in position 322 is any amino acid
  Variant (326)..(326): Xaa in position 326 is any amino acid
  Variant (330)..(330): Xaa in position 330 is any amino acid
  Variant (334)..(334): Xaa in position 334 is any amino acid
  Variant (337)..(344): Xaa in position 337 to 344 is any amino acid
  Variant (345)..(366): Xaa in position 345 to 366 is any or no amino acid
  Variant (368)..(369): Xaa in position 368 to 369 is any amino acid
  Variant (370)..(370): Xaa in position 370 is any or no amino acid
  Variant (374)..(382): Xaa in position 374 to 382 is any amino acid
  Variant (384)..(385): Xaa in position 384 to 385 is any amino acid
  Variant (387)..(387): Xaa in position 387 is any amino acid
  Variant (389)..(390): Xaa in position 389 to 390 is any amino acid
  Variant (391)..(422): Xaa in position 391 to 422 is any or no amino acid
  Variant (424)..(426): Xaa in position 424 to 426 is any amino acid
  Variant (428)..(430): Xaa in position 428 to 430 is any amino acid
  Variant (431)..(432): Xaa in position 431 to 432 is any or no amino acid
  Variant (434)..(435): Xaa in position 434 to 435 is any amino acid
  Variant (442)..(442): Xaa in position 442 is any amino acid
  Variant (453)..(468): Xaa in position 453 to 468 is any amino acid
  Variant (469)..(475): Xaa in position 469 to 475 is any or no amino acid
  Variant (477)..(479): Xaa in position 477 to 479 is any amino acid
  Variant (482)..(486): Xaa in position 482 to 486 is any amino acid
  Variant (488)..(489): Xaa in position 488 to 489 is any amino acid
  Variant (492)..(497): Xaa in position 492 to 497 is any amino acid
DXXRXXFXXAMSXMYXXEVPXYGXLXXLVXXXNXXXXXXXXXXXXXXXXXXXXXXXRXXXERHGAIRXGXXXELXXXXRXFAXMGMXPVGYYDLXXXXXAXXPVHSTAFRXXXXXXLXXXPFRVFTSLLRXXXXLIXXXXXRXXAXXXLXXRXIFXXXXXXLXXXXEXXXXXXXXXXXXXXXGGLXXXXAXXFXXXXXXXFXWHXXAXVXXXXYXXLXXXHXLXADXVXFXXXHINHLTPRTLDIDXXQXXMXXXGXXXKXXXEGPPXRXXPXILLRQTSFXALXEXXXFXXXXXXXXXXXXXXXXXGXHXARFGEIEQRGXALTXKGRXLYDXLLXXXXXXXXXXXXXXXXXXXXXXXXXXXXXXFXXXFPDXXXXXXXXXLXXFXYXXXXXXXXXXXXXXXXXXXXXXXXXXXXXXXXXXLXXXGXXXXXPXXYEDFLPXSAAGIFQSNLXXXXXXXXXXXXXXXXXXXXXXXFXXXLGXXXXXEXXLYXXXXXXS

SEQ ID NO: 1357 - protein, 48 aa, Artificial sequence
  protein pattern
  Variant (2)..(2): Xaa in position 2 is Ile or Val
  Variant (5)..(5): Xaa in position 5 is any or no amino acid
  Variant (7)..(7): Xaa in position 7 is any amino acid
  Variant (8)..(8): Xaa in position 8 is any or no amino acid
  Variant (10)..(10): Xaa in position 10 is any amino acid
  Variant (11)..(11): Xaa in position 11 is Gly or Ser
  Variant (12)..(12): Xaa in position 12 is Cys or Pro
  Variant (21)..(21): Xaa in position 21 is Thr or Val
  Variant (22)..(22): Xaa in position 22 is Leu or Val
  Variant (23)..(23): Xaa in position 23 is Asp or Asn
  Variant (25)..(25): Xaa in position 25 is Asp or Glu
  Variant (26)..(26): Xaa in position 26 is any amino acid
  Variant (27)..(27): Xaa in position 27 is Ala, Ile or Val
  Variant (29)..(30): Xaa in position 29 to 30 is any amino acid
  Variant (32)..(34): Xaa in position 32 to 34 is any amino acid
  Variant (35)..(35): Xaa in position 35 is Gly or Asn
  Variant (36)..(36): Xaa in position 36 is Ile, Leu or Met
  Variant (37)..(37): Xaa in position 37 is any amino acid
  Variant (38)..(38): Xaa in position 38 is Ala or Pro
  Variant (40)..(41): Xaa in position 40 to 41 is any amino acid
  Variant (42)..(42): Xaa in position 42 is Ile or Val
  Variant (47)..(47): Xaa in position 47 is any amino acid
LXADXVXXFXXXHINHLTPRXXXIXXXQXXMXXXXXXXKXXXEGPPXR

SEQ ID NO: 1358 - protein, 39 aa, Artificial sequence
  protein pattern
  Variant (2)..(4): Xaa in position 2 to 4 is any amino acid
  Variant (12)..(12): Xaa in position 12 is Leu or Val
  Variant (14)..(14): Xaa in position 14 is any amino acid
  Variant (15)..(15): Xaa in position 15 is any or no amino acid
  Variant (17)..(17): Xaa in position 17 is any or no amino acid
  Variant (20)..(21): Xaa in position 20 to 21 is any amino acid
  Variant (22)..(22): Xaa in position 22 is Ile, Leu, Met or Val
  Variant (23)..(23): Xaa in position 23 is any amino acid
  Variant (24)..(24): Xaa in position 24 is Asp or Arg
  Variant (25)..(25): Xaa in position 25 is any amino acid
  Variant (27)..(27): Xaa in position 27 is any amino acid
  Variant (28)..(28): Xaa in position 28 is Ala, Ile or Val
  Variant (29)..(29): Xaa in position 29 is Phe or Met
  Variant (32)..(32): Xaa in position 32 is any amino acid
  Variant (35)..(35): Xaa in position 35 is Gly or Ser
RXXXERHGAIRXGXXAXELXXXXXXFXXXGMXPVXYYDL

SEQ ID NO: 1359 - protein, 35 aa, Artificial sequence
  protein pattern
  Variant (2)..(2): Xaa in position 2 is any amino acid
  Variant (3)..(3): Xaa in position 3 is any or no amino acid
  Variant (5)..(6): Xaa in position 5 to 6 is any or no amino acid
  Variant (8)..(8): Xaa in position 8 is any amino acid
  Variant (11)..(11): Xaa in position 11 is Ala or Cys
  Variant (14)..(14): Xaa in position 14 is Ala or Pro
  Variant (15)..(18): Xaa in position 15 to 18 is any amino acid
  Variant (19)..(19): Xaa in position 19 is Ala, Glu or Ser
  Variant (21)..(22): Xaa in position 21 to 22 is any amino acid
  Variant (23)..(23): Xaa in position 23 is Cys, Asn or Ser
  Variant (24)..(24): Xaa in position 24 is Ala or Pro
  Variant (27)..(27): Xaa in position 27 is Met or Val
  Variant (29)..(29): Xaa in position 29 is Thr or Val
  Variant (31)..(31): Xaa in position 31 is Leu or Met
  Variant (33)..(33): Xaa in position 33 is any amino acid
  Variant (34)..(34): Xaa in position 34 is Ala, Ile, Leu or Pro
  Variant (35)..(35): Xaa in position 35 is Asp or Glu
AXXPXXVXSTXFRXXXXXXLXXXXFRXFXSXLXXX

SEQ ID NO: 1360 - protein, 29 aa, Artificial sequence
  protein pattern
  Variant (2)..(2): Xaa in position 2 is any amino acid
  Variant (4)..(4): Xaa in position 4 is any amino acid
  Variant (12)..(12): Xaa in position 12 is Ala or Gln
  Variant (15)..(15): Xaa in position 15 is any amino acid
  Variant (19)..(19): Xaa in position 19 is any amino acid
  Variant (22)..(23): Xaa in position 22 to 23 is any amino acid
  Variant (27)..(27): Xaa in position 27 is any amino acid
  Variant (29)..(29): Xaa in position 29 is Ile, Leu or Met
GXHXARFGEIEXRGXALTXKGXXLYDXLX

SEQ ID NO: 1361 - protein, 28 aa, Artificial sequence
  protein pattern
  Variant (2)..(2): Xaa in position 2 is any amino acid
  Variant (3)..(3): Xaa in position 3 is Ile, Leu or Val
  Variant (4)..(6): Xaa in position 4 to 6 is any amino acid
  Variant (7)..(7): Xaa in position 7 is Ala or Pro
  Variant (8)..(8): Xaa in position 8 is Ile or Leu
  Variant (9)..(9): Xaa in position 9 is any amino acid
  Variant (16)..(16): Xaa in position 16 is any amino acid
  Variant (27)..(27): Xaa in position 27 is Gly, Pro or Thr
  Variant (28)..(28): Xaa in position 28 is Asp, Glu, Gly, Asn or Gln
GXXXXXXXXYEDFLPXSAAGIFQSNLXX

SEQ ID NO: 1362 - protein, 29 aa, Artificial sequence
  protein pattern
  Variant (2)..(2): Xaa in position 2 is any amino acid
  Variant (3)..(3): Xaa in position 3 is Ile or Leu
  Variant (5)..(5): Xaa in position 5 is Ala, Glu, Gln or Ser
  Variant (6)..(6): Xaa in position 6 is any amino acid
  Variant (8)..(11): Xaa in position 8 to 11 is any or no amino acid
  Variant (13)..(13): Xaa in position 13 is any amino acid
  Variant (16)..(17): Xaa in position 16 to 17 is any amino acid
  Variant (21)..(21): Xaa in position 21 is any amino acid
  Variant (23)..(23): Xaa in position 23 is Gly or Ser
  Variant (24)..(24): Xaa in position 24 is Ala, Asp or Thr
  Variant (26)..(26): Xaa in position 26 is Leu, Met or Val
  Variant (27)..(27): Xaa in position 27 is any amino acid
  Variant (28)..(28): Xaa in position 28 is Ile or Leu
DXXRXXFXXXXSXMYXXEVPXYXXLXXXV

SEQ ID NO: 1363 - protein, 17 aa, Artificial sequence
  protein pattern
  Variant (8)..(8): Xaa in position 8 is Lys or Arg
  Variant (11)..(11): Xaa in position 11 is any or no amino acid
  Variant (13)..(15): Xaa in position 13 to 15 is any amino acid
  Variant (16)..(16): Xaa in position 16 is any or no amino acid
LLRQTSFXALXEXXXXF

SEQ ID NO: 1364 - protein, 17 aa, Artificial sequence
  protein pattern
  Variant (2)..(2): Xaa in position 2 is Ile or Val
  Variant (3)..(3): Xaa in position 3 is any amino acid
  Variant (4)..(4): Xaa in position 4 is Glu or Gln
  Variant (5)..(7): Xaa in position 5 to 7 is any amino acid
  Variant (8)..(8): Xaa in position 8 is Ser or Thr
  Variant (10)..(10): Xaa in position 10 is Gln or Arg
  Variant (13)..(14): Xaa in position 13 to 14 is any amino acid
  Variant (15)..(15): Xaa in position 15 is Ala or Ser
  Variant (16)..(16): Xaa in position 16 is Ala, Asn, Ser or Thr
FXXXXXXXFXWHXXXXV

SEQ ID NO: 1365 - protein, 37 aa, Artificial sequence
  protein pattern
  Variant (3)..(3): Xaa in position 3 is any amino acid
  Variant (4)..(4): Xaa in position 4 is Asp, Asn, Gln or Ser
  Variant (5)..(6): Xaa in position 5 to 6 is any amino acid
  Variant (7)..(7): Xaa in position 7 is Ala, Leu or Val
  Variant (9)..(10): Xaa in position 9 to 10 is any amino acid
  Variant (11)..(11): Xaa in position 11 is Ala, Ser or Val
  Variant (12)..(13): Xaa in position 12 to 13 is any amino acid
  Variant (14)..(14): Xaa in position 14 is Ile, Leu or Val
  Variant (16)..(17): Xaa in position 16 to 17 is any amino acid
  Variant (19)..(19): Xaa in position 19 is any amino acid
  Variant (20)..(20): Xaa in position 20 is Ile or Leu
  Variant (22)..(22): Xaa in position 22 is Ser or Thr
  Variant (23)..(27): Xaa in position 23 to 27 is any amino acid
  Variant (29)..(32): Xaa in position 29 to 32 is any amino acid
  Variant (33)..(33): Xaa in position 33 is any or no amino acid
  Variant (35)..(35): Xaa in position 35 is any amino acid
  Variant (36)..(36): Xaa in position 36 is Ala, Asp, Glu, Gly, Asn, Gln or Ser
  Variant (37)..(37): Xaa in position 37 is Gly or Asn
LIXXXXXRXXXXXXLXXRXXFXXXXXXLXXXXXEXXX

SEQ ID NO: 1366 - protein, 21 aa, Artificial sequence
  protein pattern
  Variant (2)..(3): Xaa in position 2 to 3 is any amino acid
  Variant (7)..(7): Xaa in position 7 is Asp, Asn, Ser or Thr
  Variant (8)..(10): Xaa in position 8 to 10 is any amino acid
  Variant (11)..(11): Xaa in position 11 is Ile, Leu or Met
  Variant (12)..(12): Xaa in position 12 is Gln or Arg
  Variant (13)..(15): Xaa in position 13 to 15 is any amino acid
  Variant (17)..(17): Xaa in position 17 is Ala or Gly
  Variant (18)..(18): Xaa in position 18 is Phe, Trp or Tyr
  Variant (20)..(20): Xaa in position 20 is any amino acid
FXXFPDXXXXXXXXXLXXFXY

SEQ ID NO: 1367 - protein, 16 aa, Artificial sequence
  protein pattern
  Variant (2)..(2): Xaa in position 2 is Glu, Pro or Gln
  Variant (3)..(3): Xaa in position 3 is any amino acid
  Variant (4)..(4): Xaa in position 4 is Ala, Asp, Glu, Ser or Thr
  Variant (5)..(5): Xaa in position 5 is any amino acid
  Variant (6)..(6): Xaa in position 6 is Ala or Gly
  Variant (7)..(8): Xaa in position 7 to 8 is any amino acid
  Variant (9)..(9): Xaa in position 9 is Ala, Thr or Val
  Variant (10)..(10): Xaa in position 10 is any amino acid
  Variant (11)..(11): Xaa in position 11 is Asp, Asn, Gln or Arg
  Variant (12)..(12): Xaa in position 12 is Glu or Gly
  Variant (13)..(13): Xaa in position 13 is Phe, Leu or Met
  Variant (14)..(15): Xaa in position 14 to 15 is any amino acid
FXXXXXXXXXXXXXXY

SEQ ID NO: 1368 - DNA, 309 bp, Escherichia coli K12
  CDS (1)..(309): transl_table=11
atgaaaaaagtattagctctggttgttgccgctgctatgggtctgtcttctgccgcctttgctgcagagactacgaccacacctgctccgactgcgacgaccaccaaagcagcgccggcgaaaactacacatcataaaaaacagcataaagcagcacctgcccagaaagcgcaggcggctaaaaagcatcataaaaatacgaaagctgaacagaaagcccctgaacaaaaagcgcaggcagcgaagaaacacgccaagaaacacagccatcagcaaccggcaaaacctgctgcacaacccgcagcgtaa

SEQ ID NO: 1369 - protein, 102 aa, Escherichia coli K12
MKKVLALVVAAAMGLSSAAFAAETTTTPAPTATTTKAAPAKTTHHKKQHKAAPAQKAQAAKKHHKNTKAEQKAPEQKAQAAKKHAKKHSHQQPAKPAAQPAA

SEQ ID NO: 1370 - DNA, 336 bp, Shigella flexneri 2a str. 301
  CDS (1)..(336): transl_table=11
atgaaaaaacaaattgagggtatgacaatgaaaaaagtattagctctggttgttgccgctgctatgggtctgtcttctgccgcctttgctgcagagactgcgaccacacctgctccgactgcgacgaccaccaaagcagcgccagcgaaaactacacatcataaaaaacagcataaagcagcacctgcccagaaagcgcaggcggctaaaaagcatcataaaaatacgaaagctgaacagaaagcccctgaacaaaaagcgcaggcagcgaagaaacacgccgggaaacacggccatcagcaaccggcaaaacctgctgcacaacccgcagcgtaa

SEQ ID NO: 1371 - protein, 111 aa, Shigella flexneri 2a str. 301
MKKQIEGMTMKKVLALVVAAAMGLSSAAFAAETATTPAPTATTTKAAPAKTTHHKKQHKAAPAQKAQAAKKHHKNTKAEQKAPEQKAQAAKKHAGKHGHQQPAKPAAQPAA

SEQ ID NO: 1372 - DNA, 26 bp, Artificial sequence
  primer
atgaaaaaacaaattgagggtatgac

SEQ ID NO: 1373 - DNA, 21 bp, Artificial sequence
  primer
ttacgctgcgggttgtgcagc

SEQ ID NO: 1374 - DNA, 1383 bp, Escherichia coli K12
  CDS (1)..(1383): transl_table=11
atggaaaagaaactgggactgagcgcactcaccgcgctggtattaagctcaatgctgggcgcgggtgttttcagtctgccgcaaaatatggcggcagttgccagcccggcagcactgctcatcggctggggtattactggcgctggcattttattgctggcctttgccatgctgatcctcacgcgcattcgtcccgaacttgacggcggtatctttacctatgcccgcgaagggtttggcgagctaatcggcttttgttccgcatggggatactggctgtgcgcagtcatcgccaacgtctcctatctggtgatcgttttttccgcgttaagcttttttacggacacgccggaattgcgcctgtttggcgatggtaatacctggcaatcgatagtcggtgcatcggctttattgtggattgttcactttttgatcctgcgcggggtgcaaaccgctgccagcattaacctggtggcgacactggcaaaattgttgccgctgggtctgtttgttgtgctggcgatgatgatgttcaaactggataccttcaagctcgacttcaccggacttgcacttggcgtacccgtttgggaacaggtgaaaaacaccatgctgatcaccctgtgggttttcattggtgtggaaggtgccgtggttgtttctgcgcgtgcgcgtaataaacgtgatgttggcaaagcgacactgctggcggttctctccgctctgggcgtttacttgctggtaacgctgctttcgctgggtgtggtggcacgtcctgaactggctgaaattcgtaacccgtcaatggccggtctgatggtggaaatgatgggaccatggggcgaaatcatcatcgctgccggtttgatcgtttccgtttgcggcgcgtacttaagctggaccatcatggcagcagaagtaccgttcctggccgccactcataaagcattcccgcgcatttttgcgcgccagaacgcacaagctgcgccatccgcctcactgtggttgaccaacatctgcgtgcaaatttgtctggtactcatctggctgaccggttccgattacaacacgttgctgaccatcgcctcagaaatgattctggtgccctatttcctggtcggcgcgttcttgctgaaaatcgcaacccgtccactgcataaagcggtaggtgtcggtgcctgcatttatggcttatggttattgtacgcctctggtccaatgcacttgctgttatccgttgttctgtatgcaccggggctgctggttttcctgtacgcgcgcaaaacgcatacccatgataatgtactgaaccgtcaggaaatggtgctgattggcatgctgttaattgcctcagttccggcgacctggatgctggtgggataa

SEQ ID NO: 1375 - protein, 460 aa, Escherichia coli K12
MEKKLGLSALTALVLSSMLGAGVFSLPQNMAAVASPAALLIGWGITGAGILLLAFAMLILTRIRPELDGGIFTYAREGFGELIGFCSAWGYWLCAVIANVSYLVIVFSALSFFTDTPELRLFGDGNTWQSIVGASALLWIVHFLILRGVQTAASINLVATLAKLLPLGLFVVLAMMMFKLDTFKLDFTGLALGVPVWEQVKNTMLITLWVFIGVEGAVVVSARARNKRDVGKATLLAVLSALGVYLLVTLLSLGVVARPELAEIRNPSMAGLMVEMMGPWGEIIIAAGLIVSVCGAYLSWTIMAAEVPFLAATHKAFPRIFARQNAQAAPSASLWLTNICVQICLVLIWLTGSDYNTLLTIASEMILVPYFLVGAFLLKIATRPLHKAVGVGACIYGLWLLYASGPMHLLLSVVLYAPGLLVFLYARKTHTHDNVLNRQEMVLIGMLLIASVPATWMLVG

SEQ ID NO: 1376 - DNA, 1452 bp, Chlamydia trachomatis D/UW-3/CX
  CDS (1)..(1452): transl_table=11
atgttattaaagaaacggtctcctactagcattttaggaaccttagctcttactggaatcgtgatcagctccatgatcggaggaggtatttttagtcttcctcaaaatatggtggcctctgcaagtgcgggggcggtcatgttagcgtggatgctttccggaatcggaatattttttatagcaaacacctttaaaacactttctattatccgccctgacttaaaagctggtatctatacttacagtagagaaggatttggtccttatgtcggatttacaatagcttggggatattggctttgccaaattttcgggaatgtcgactatgccgtaattaccatggatgcccttaactatttcttcccaccatactttgctggaggaaacacaattccggccatcttattaggatcactattgatttggatattcaattacattgtcttacgaggtatccgccaggctagctttgttaacattattggcgcagtctgcacgttaatccctttgctcctatttattctcatcacagctcgattctttaagttttcgatctttaaaactgacttttgggggactgctccgcaacatacactaggatctatcggatctcaactaaagagcacgatgttagtcactctttgggcctttataggaatcgaaggagctgtagtaatttctggcagagctgctaatctctcctctgttgggaaagccactatcttaggattttcaggatgcctactcatatatgtcctgctttcactgcttccttttggttccctatttcagtatcaactagcaaaaatagccgatccttctactgctggggtactgaacattctggtagggaaatggggagaagtccttatgaatacaggactattaatagccgtcttaaccagctggttatcctggacaatccttgcttctgaaattccttacgctgcagctaagaatggaacattcccagaatgttttgccatcgagaatagcaaacacgccccttctttttccctattcatgacaagtgggttaatgcagattaccatgctactagtatatttctcttctaatgcatggaatacaatgttagaaatcactggcgttatggttcttcctgcttatctaactagttcccttttccttgtgaaatttagtctaagtaagaagtatcccaaacaggccgctatcaaagctcgcattgcgatgatcaccagtctattgggctcactgtactctctatggctgatctatgctggaggattgcaacatctatttatggtcgctatcctacttgctttagggattccattttacgtagattcaggaatcagacataaacaagaaaaaactttcttgaatcgtaaagaaatcctgaaaatgacgatcgtggctcttgcggctctactcgctatatttttattctctgctaataaaatccatttgtag

SEQ ID NO: 1377 - protein, 483 aa, Chlamydia trachomatis D/UW-3/CX
MLLKKRSPTSILGTLALTGIVISSMIGGGIFSLPQNMVASASAGAVMLAWMLSGIGIFFIANTFKTLSIIRPDLKAGIYTYSREGFGPYVGFTIAWGYWLCQIFGNVDYAVITMDALNYFFPPYFAGGNTIPAILLGSLLIWIFNYIVLRGIRQASFVNIIGAVCTLIPLLLFILITARFFKFSIFKTDFWGTAPQHTLGSIGSQLKSTMLVTLWAFIGIEGAVVISGRAANLSSVGKATILGFSGCLLIYVLLSLLPFGSLFQYQLAKIADPSTAGVLNILVGKWGEVLMNTGLLIAVLTSWLSWTILASEIPYAAAKNGTFPECFAIENSKHAPSFSLFMTSGLMQITMLLVYFSSNAWNTMLEITGVMVLPAYLTSSLFLVKFSLSKKYPKQAAIKARIAMITSLLGSLYSLWLIYAGGLQHLFMVAILLALGIPFYVDSGIRHKQEKTFLNRKEILKMTIVALAALLAIFLFSANKIHL

SEQ ID NO: 1378 - DNA, 1458 bp, Chlamydophila pneumoniae CWL029
  CDS (1)..(1458): transl_table=11
atgacctcaaggactaaatcctcaaaaaatttagggaccatagcccttgcgggtatggtagtcagttccataattgggggagggattttcagcctcccccaaaacatggcagcgacagcaggagctggtgccgtaatcctatcttggatactcactggcttcggcatgttctttatcgcaaatacgtttaggatcctctctacaatacgtcccgaccttaaggaagggatctacatgtacagtagagaaggtttcggcccctacataggattcaccatcggctggggatattggctttgtcaaatcttcggtaatgtgggatatgccgtaattactatggatgctctaaactacttcttccctccctacttccaaggaggaaataccctacctgctattttaggaggctccattcttatctgggtgttcaacttcatagttctgaaaggaatccgtcaagcatcgataatcaacgtcatcggaactatatttaaaatcatccctctaatcatcttcattatcctgactgcgttcttcttcaagctcgctgttttcaaaacagatttttggggacatgccgtaacaaaagcccaaccgagtttaggatccgtaagttcacaacttaaagggactatgttggtcaccctatgggcatttataggaatcgaaggtgccgtggtgatgtctggacgagcaaaaaatcctctctctgtagggcaagctacagtcttaggatttttaggttgcctaacaatctacatcttattttctttattaccttttggctcgctcttccaacatcaactagcgaacatccccaatccctctacagctggtgtcctcgacatcctcgtagggaaatggggagaagtgctcatgaatgtcggcctgattattgctgttttatctagctggttatcctggacgatcatcgttgcagaaatccccttctcagcagctaaaaatggcaccttccctgagatcttcactatagaaaataaagagaaatctcccagcgtctccctatacattacgagctctgtgatgcagctcgccatgctccttgtttacttttcttcgaatgcttggaatactatgctcagcatcacgggggtcatggttctccctgcgtatctagcgagtgctgcctttctctttaaacttagcaaaagcaaaacatatcctaaaaaagggtctattaaagcccctttggcaatgataactggtatcctgggagtggtttactctctatggcttatctatgcaggaggtctaaaatacctctttatggccttagttcttttagctcttggcatccccttctatatagacgcagggaaaaagaagaaaaatgctaagacattctttgctaaaaaagaaattgtaggaatgactttcataggccttcttgcactgacagcgatcttcctattcttaacaggaagaatcaaaatttaa

SEQ ID NO: 1379 - protein, 485 aa, Chlamydophila pneumoniae CWL029
MTSRTKSSKNLGTIALAGMVVSSIIGGGIFSLPQNMAATAGAGAVILSWILTGFGMFFIANTFRILSTIRPDLKEGIYMYSREGFGPYIGFTIGWGYWLCQIFGNVGYAVITMDALNYFFPPYFQGGNTLPAILGGSILIWVFNFIVLKGIRQASIINVIGTIFKIIPLIIFIILTAFFFKLAVFKTDFWGHAVTKAQPSLGSVSSQLKGTMLVTLWAFIGIEGAVVMSGRAKNPLSVGQATVLGFLGCLTIYILFSLLPFGSLFQHQLANIPNPSTAGVLDILVGKWGEVLMNVGLIIAVLSSWLSWTIIVAEIPFSAAKNGTFPEIFTIENKEKSPSVSLYITSSVMQLAMLLVYFSSNAWNTMLSITGVMVLPAYLASAAFLFKLSKSKTYPKKGSIKAPLAMITGILGVVYSLWLIYAGGLKYLFMALVLLALGIPFYIDAGKKKKNAKTFFAKKEIVGMTFIGLLALTAIFLFLTGRIKI

SEQ ID NO: 1380 - DNA, 1407 bp, Vibrio cholerae O1 biovar eltor str. N16961
  CDS (1)..(1407): transl_table=11
atggataaaaaactgggtttaggctctctcacggcgctagtgattggttcaatgattggtgcgggcgtgtttagcttgccacaaaatatggcagcggttgccagtccactggcagtgatgatcggctggtcgatcactgggatcggcatgatctttcttgcgctctcttttcaatatttagccgtcaataaaccccatgtgaacagtggtgtgtttggttttgctcgtgaaggttttggtgattttgccggattttgctcggcgtggggctactggtttagtgccatggtcgcgaacgtctcttatctggtgattgtgttcagtactttaggactgttgtttgatacgcctgatcagattatctttggctcaggtaatacttggtggtcaattggtggcgcttctctactattgtgggctgttcacagcttagtattaagaggggtgcaaaccgccgcgctgatcaatctcatcaccactatgactaaaatggtgcctttgctacttttcattgtgtctgcgattgcggcgttcaactggtccacatttagcttggatttcgcagggctccatcacatttcaggcgctgatctgctcggtcaggtcaaagcgaccatgttgatcacggtttgggtttttgtggggattgaaggtgctgtggtggtatcaagccgagcacgtcagcgtaaagacatcggtcgcgcgaccattcttgggttactcacggctctgtcgatttatgtcttagtcacgctgttgtcgatgggcgtgattcaagtcaatcagttggcgcaatacccgaatccttctatggcgcaagtgttgactacgattattggtccttggggtaagtacattattgcggttgggcttttgatctcggtttgcggtgcgtttttgagttggacggtattggcttccgaagcgcctttccttgccgccaaagataagatgtttccccgccattttgccaagcagaatcaagcgggaagtccagttaatgccttgttcttaaccacactctgtatccaagtctccttgatcttggtgcgctatacttccagcacttacgatagcttattgatctttgcctcagagatgattttagtgccgtattttctggtgggcgcttttacccttaagcttgctctggagcaaagagatcgagggaagttgctattgattggctttggcgcaacggcttatggtctatggttgctgtatgcatcaggtttgcactatttgatgctctcaaccctgttgtatgtaccgggcttcgctttctatctcaaagcaaagcgtgagcaaggtgtaaaagcattctgcggccgagaaatggtcggagccagcaccctactgctgtttgccgttggggcggcaggcatgctttggcaaggcgcttggtaa

SEQ ID NO: 1381 - protein, 468 aa, Vibrio cholerae O1 biovar eltor str. N16961
MDKKLGLGSLTALVIGSMIGAGVFSLPQNMAAVASPLAVMIGWSITGIGMIFLALSFQYLAVNKPHVNSGVFGFAREGFGDFAGFCSAWGYWFSAMVANVSYLVIVFSTLGLLFDTPDQIIFGSGNTWWSIGGASLLLWAVHSLVLRGVQTAALINLITTMTKMVPLLLFIVSAIAAFNWSTFSLDFAGLHHISGADLLGQVKATMLITVWVFVGIEGAVVVSSRARQRKDIGRATILGLLTALSIYVLVTLLSMGVIQVNQLAQYPNPSMAQVLTTIIGPWGKYIIAVGLLISVCGAFLSWTVLASEAPFLAAKDKMFPRHFAKQNQAGSPVNALFLTTLCIQVSLILVRYTSSTYDSLLIFASEMILVPYFLVGAFTLKLALEQRDRGKLLLIGFGATAYGLWLLYASGLHYLMLSTLLYVPGFAFYLKAKREQGVKAFCGREMVGASTLLLFAVGAAGMLWQGAW

SEQ ID NO: 1382 - DNA, 1413 bp, Pasteurella multocida subsp. multocida str. Pm70
  CDS (1)..(1413): transl_table=11
atgtcgaataaaaaaatcggtttattatccctcaccgccttagtgttaagctcgatgattggctcggggatttttagtttgccacaaaacatggcggaagtggcaggtgcacaagcactcgttattggttggatcattactggtattgggatcatctttttaggtctttcctttttctttatttcccgtttacgtcctgagttagacggcggcatctacacttatgctcgagaaggttttggcgatttagtcggttttctctctgcttggggttattggttgtgtgctactattggtagcgttggttacttagtggtcgcctttgagggaatcggtttatttaccgatagtcctaatcgtatcattttcgctcaaggcaatacgattttcgcctttctaggctcttctttagtggtttggttagtgcattggctgattacacgaggagtcaaagaagcagcatttttaaatctcttagcgacttttgtcaaagcttttccgttagtgttgtttattgtattagccgcttggtttttctcaccagaaacctttaaccatgatattcaagccacaaatttaaatcattccattactgatcaagtgaaaaacaccatgttgatcacgctctgggtattcgttggggttgaaggggcagcagtgttatccgctcacgccaaaaaacgcagtgatgtggggttagccacggtgttggggattgtgattgccttaattttatatgtggcgattaccgtattatctctggggatcttaccacgtgaaatgatcgccaatatgcccaatccatcgatggctggtctgctagaacacctgattggcagtagcggtaaaatcattatcaccgcctgtttaattgtctctgtgttagcgtcttacattagttggaccatgtattctgccgaagtcccttatcgtggcgcgcaaaacggggcgttcccgaaaatcttaaataagatcaacgaaaacgacacgccaattaactctctgtggttcactaacctcgtggtgcaattctgtctcgtgttggtattaatgacaggtaaaagctataacgcactgttgttaatttccacctctatgatcttagtgccatatttcctgattggtgcctacttattgaaattgtctattcaacaaaacagtgcttggtatatcaagcttactgggttacttgcctcgatttacggagtctggattttatatgccgccggactagatcatttattgttatcgatcttgttgtatgtcccggggattggaatctacttatattctcgctatcagcaccaaggcaaacttcattttaatcaaaaagagaaagcactattgctctttattgctatcgcgtttgtgttagctatttacaatagtgctgtcaatgtcaattggaattaa

SEQ ID NO: 1383 - protein, 470 aa, Pasteurella multocida subsp. multocida str. Pm70
MSNKKIGLLSLTALVLSSMIGSGIFSLPQNMAEVAGAQALVIGWIITGIGIIFLGLSFFFISRLRPELDGGIYTYAREGFGDLVGFLSAWGYWLCATIGSVGYLVVAFEGIGLFTDSPNRIIFAQGNTIFAFLGSSLVVWLVHWLITRGVKEAAFLNLLATFVKAFPLVLFIVLAAWFFSPETFNHDIQATNLNHSITDQVKNTMLITLWVFVGVEGAAVLSAHAKKRSDVGLATVLGIVIALILYVAITVLSLGILPREMIANMPNPSMAGLLEHLIGSSGKIIITACLIVSVLASYISWTMYSAEVPYRGAQNGAFPKILNKINENDTPINSLWFTNLVVQFCLVLVLMTGKSYNALLLISTSMILVPYFLIGAYLLKLSIQQNSAWYIKLTGLLASIYGVWILYAAGLDHLLLSILLYVPGIGIYLYSRYQHQGKLHFNQKEKALLLFIAIAFVLAIYNSAVNVNWN

SEQ ID NO: 1384 - DNA, 1419 bp, Pseudomonas aeruginosa PAO1
  CDS (1)..(1419): transl_table=11
atggccgattcggacaagggaaaactggggctgccggcgctgaccgcgctggtggtgggcggcatcatcggcagcggcatcttcagcctgccgcagaacatggccgaaggcgcaggcgccggcgcgatcctgatcgcctgggcgatcaccttcgtcggcatgctgaccctgacgcggatattccagtggctgtcgaccacccgccccgaactggacgacggcgtctacggctacgcccgcgaaggcttcggcgaatacctggggttcaatgccgcctggggctactggatttccgcctgggtcggcaacgccggctacctggtggtgctgttcagcgccctcggctcgttcggcgcgctggccttcttcggcgacggaaccacctggccggcgctgctcggcgaattgacggtgctctggctgatgcatgccttcgtcctccacggcgtgcacaacgcggcgatcaccaacgccatcgtgaccctcgccaaggtggtgccgatcgccctgttcatcctctgcgtagccctggccttccgcatcgagacctttcacctggacttctggggcagcccggccctgggcagcgtcacccgccaggtggaaaccaccatgctctacaccgtctgggtattcctcggcatcgagagcgccacggtctatgccagccacgcgcggcacgcggccgatgtcagccgcgcaaccctgctcggcttcgtggtcaccctgctgttgctggtctgcgtctcggtgctgtcgctgggcgtggtgccgcagcacgaactggcgcagatgaagaacccctcgatggcccaggtgatggccgcggcggtgggcccctggggcgccacgctgatcaacgtcgggctgatcgtctcggtcggcggcgcgctgctggcctggaccatgctcgcggtggaaatgctctacctggccagccgtggcccaacgcacaccgcgccggcactgttcggccgcaccaatgcggtggaaaccccggcgccggcactgtggctgaccagcacgctgatctctgcgctgctgctggtggccttcctcaacgcctcgggctacaacgcgctgatccagttggccacctcgatggcgctgatcccctacctgctctgcgccggcttctgcctgaagctggtggcgcgccgcccgcactcgggcgcgatgctggcgctggcgctgttggggacgctctacggggtctggctgatctacgccgccgggctgaaatacctgctgctgtcgatgatcctctacgcgccaggcctgggcttcttcctgcatgcccgtcgccagcgcggcctgccggcgttcggcaatcgcgccgaaggcagcgtcgcggcgctggtgctggtcctcgcgctggcggcgctatggatgatcggcagcggtcggctgaccctctag

SEQ ID NO: 1385 - protein, 472 aa, Pseudomonas aeruginosa PAO1
MADSDKGKLGLPALTALVVGGIIGSGIFSLPQNMAEGAGAGAILIAWAITFVGMLTLTRIFQWLSTTRPELDDGVYGYAREGFGEYLGFNAAWGYWISAWVGNAGYLVVLFSALGSFGALAFFGDGTTWPALLGELTVLWLMHAFVLHGVHNAAITNAIVTLAKVVPIALFILCVALAFRIETFHLDFWGSPALGSVTRQVETTMLYTVWVFLGIESATVYASHARHAADVSRATLLGFVVTLLLLVCVSVLSLGVVPQHELAQMKNPSMAQVMAAAVGPWGATLINVGLIVSVGGALLAWTMLAVEMLYLASRGPTHTAPALFGRTNAVETPAPALWLTSTLISALLLVAFLNASGYNALIQLATSMALIPYLLCAGFCLKLVARRPHSGAMLALALLGTLYGVWLIYAAGLKYLLLSMILYAPGLGFFLHARRQRGLPAFGNRAEGSVAALVLVLALAALWMIGSGRLTL

SEQ ID NO: 1386 - DNA, 1452 bp, Chlamydia muridarum Nigg
  CDS (1)..(1452): transl_table=11
atgttcttgaaaaaacgctcctcttcaggaattttagggacattgtctcttactggagttgtgatcagctccatggttggaggggggattttcagtcttcctcagaatatggcagcctctgcaagcgcaggggctattatcattgcctggcttctctccggaataggaatattttttatcgcaaatacctttaaaactctttcccttgttcgtcctgacttaaaggccggtatctatacctatagtagagaaggatttggcccctacgtaggatttacaatagcatggggatactggctttgccaaatttttggaaatgtcggctatgccgtaattaccatggatgccctaaactatttctttcccccctatttcgaaggaggaaatactctccctgctattctattaggatctatccttatttgggtattcaattccatcgtcttacgaggcatccgtcaagctgcttttatgaatgtgattggtgtaatttttactctaattcctctacttattttcattctcattacagctctatttttcaaattctcaatatttaaaaccgatttttggggaactgctccccaacaccatctgggatctatcggctctcagcttaaaagcaccatgttagtcaccctctgggcctttatcggaattgaaggcgccgtagtcatgtctggaagagcctcaaatccctcttctgtcgggaaagctacgatcctagggttttccggatgcttactcatttatgtccttctttctttacttccttttggatctctatcccaatatcaacttgctaagattgctgacccctccactgctggggtactgaaatttctagttgggaaatggggagaagtccttatgaatacaggacttttaattgctgttttaacaagctggttatcctggactattcttactgctgaaattccttacgcagcagcaaaaaatggcactttcccagaatgctttgcaattgaaaatgctaaacactcacctgcattctctttattcattacaagcggcttgatgcaaattaccatgctgttagtgtatttttcctctaatgcttggcataccatgttagaaatcaccagtgttatggttcttccggcttacttaactagctctcttttccttgttaagctcagcttaagtaaaaaatatcctaaacaggcacccatcaaggcccgcgttgcaatattcacgggaatattagggacgctatattctctatggctaatctatgctggaggattacagcacctatttatggtcgctgttctccttgctttaggaattccgttctacatagactcgggaataagacatgatcaagaaaagacattcttgaaccgtaaggaagtcatgaaaatgactaccttagctcttatagctttgcttgctgtatttttattctctgcaaataaaattcatttataa

SEQ ID NO: 1387 - protein, 483 aa, Chlamydia muridarum Nigg
MFLKKRSSSGILGTLSLTGVVISSMVGGGIFSLPQNMAASASAGAIIIAWLLSGIGIFFIANTFKTLSLVRPDLKAGIYTYSREGFGPYVGFTIAWGYWLCQIFGNVGYAVITMDALNYFFPPYFEGGNTLPAILLGSILIWVFNSIVLRGIRQAAFMNVIGVIFTLIPLLIFILITALFFKFSIFKTDFWGTAPQHHLGSIGSQLKSTMLVTLWAFIGIEGAVVMSGRASNPSSVGKATILGFSGCLLIYVLLSLLPFGSLSQYQLAKIADPSTAGVLKFLVGKWGEVLMNTGLLIAVLTSWLSWTILTAEIPYAAAKNGTFPECFAIENAKHSPAFSLFITSGLMQITMLLVYFSSNAWHTMLEITSVMVLPAYLTSSLFLVKLSLSKKYPKQAPIKARVAIFTGILGTLYSLWLIYAGGLQHLFMVAVLLALGIPFYIDSGIRHDQEKTFLNRKEVMKMTTLALIALLAVFLFSANKIHL

SEQ ID NO: 1388 - DNA, 1446 bp, Chlamydophila pneumoniae J138
  CDS (1)..(1446): transl_table=11
atgacctcaaggactaaatcctcaaaaaatttagggaccatagcccttgcgggtatggtagtcagttccataattgggggagggattttcagcctcccccaaaacatggcagcgacagcaggagctggtgccgtaatcctatcttggatactcactggcttcggcatgttctttatcgcaaatacgtttaggatcctctctacaatacgtcccgaccttaaggaagggatctacatgtacagtagagaaggtttcggcccctacataggattcaccatcggctggggatattggctttgtcaaatcttcggtaatgtgggatatgccgtaattactatggatgctctaaactacttcttccctccctacttccaaggaggaaataccctacctgctattttaggaggctccattcttatctgggtgttcaacttcatagttctgaaaggaatccgtcaagcatcgataatcaacgtcatcggaactatatttaaaatcatccctctaatcatcttcattatcctgactgcgttcttcttcaagctcgctgttttcaaaacagatttttggggacatgccgtaacaaaagcccaaccgagtttaggatccgtaagttcacaacttaaagggactatgttggtcaccctatgggcatttataggaatcgaaggtgccgtggtgatgtctggacgagcaaaaaatcctctctctgtagggcaagctacagtcttaggatttttaggttgcctaacaatctacatcttattttctttattaccttttggctcgctcttccaacatcaactagcgaacatccccaatccctctacagctggtgtcctcgacatcctcgtagggaaatggggagaagtgctcatgaatgtcggcctgattattgctgttttatctagctggttatcctggacgatcatcgttgcagaaatccccttctcagcagctaaaaatggcaccttccctgagatcttcactatagaaaataaagagaaatctcccagcgtctccctatacattacgagctctgtgatgcagctcgccatgctccttgtttacttttcttcgaatgcttggaatactatgctcagcatcacgggggtcatggttctccctgcgtatctagcgagtgctgcctttctctttaaacttagcaaaagcaaaacatatcctaaaaaagggtctattaaagcccctttggcaatgataactggtatcctgggagtggtttactctctatggcttatctatgcaggaggtctaaaatacctctttatggccttagttcttttagctcttggcatccccttctatatagacgcagggaaaaagaagaaaaatgctaagacattctttgctaaaaaagaaattgtaggaatgactttcataggccttcttgcactgacagcgatcttcctattctcaacaggttga

SEQ ID NO: 1389 - protein, 481 aa, Chlamydophila pneumoniae J138
MTSRTKSSKNLGTIALAGMVVSSIIGGGIFSLPQNMAATAGAGAVILSWILTGFGMFFIANTFRILSTIRPDLKEGIYMYSREGFGPYIGFTIGWGYWLCQIFGNVGYAVITMDALNYFFPPYFQGGNTLPAILGGSILIWVFNFIVLKGIRQASIINVIGTIFKIIPLIIFIILTAFFFKLAVFKTDFWGHAVTKAQPSLGSVSSQLKGTMLVTLWAFIGIEGAVVMSGRAKNPLSVGQATVLGFLGCLTIYILFSLLPFGSLFQHQLANIPNPSTAGVLDILVGKWGEVLMNVGLIIAVLSSWLSWTIIVAEIPFSAAKNGTFPEIFTIENKEKSPSVSLYITSSVMQLAMLLVYFSSNAWNTMLSITGVMVLPAYLASAAFLFKLSKSKTYPKKGSIKAPLAMITGILGVVYSLWLIYAGGLKYLFMALVLLALGIPFYIDAGKKKKNAKTFFAKKEIVGMTFIGLLALTAIFLFSTG

SEQ ID NO: 1390 - DNA, 1431 bp, Staphylococcus aureus subsp. aureus Mu50
  CDS (1)..(1431): transl_table=11
atgaacgaatcaggagataacaaactcagtaaatcttctttaattggactagttataggatccatgattggtggcggtgcgttcaatataatgtctgatatgggcggtaaagccggtggattagccattattattggttggattattacagctataggaatgatttcattagcgttcgtatttcaaaatttaaccaatgaacggccggagctagacggtggtatttatagttatgctcaagcaggatttggcgattttgtaggatttatcagtgcttggggatattggttctcagcgtttttaggcaatgttgcctatgcaacactattgatgtcagcagtaggtaactttttcccgatttttaaaggaggcaacacattaccaagtattattgtcgcctcgttactactctggggtgtccatttcttgattttaaaaggcgttgaaacagcagcatttatcaatagtattgttactgttgcaaagttaatcccgattttacttgtaatcatatgcatgataattgcattcaattttgacacttttaaaacaggctttttcggtatgacgtcagagggtgtattgccatttagttgggcgagcacaatgagccaagttaaaagtacgatgctagtgacagtttgggtgtttatcggtatcgaaggtgcagtaattttttctagtagagctaaaaataaaaaagatgtaggtagtgccacggttataggacttatatcagttttaattatctatttcttattaactgtattagctcaaggcgtgattttgcaaaatcatatttctcaattagattcgccaagtatggcacaggtgcttgcaactattgtaggtggttggggatctacacttgtaaatattggtttaattatttcggtactaggtgcatggttaggatggacattgcttgctggtgaattacctttcattgttgcaaaagatggattatttccaaagtggtttgctaaagaaaataaaaatggagcacctgtaaatgcactgcttattaccaatatattagtacaattatttttaataagtatgctatttacacagagtgcgtatcaatttgcattttcactagcatcaagtgctattttatacccttacatgttcagtgcattttaccaagttaaatacactttagagcatcgacagcaagcaactactaaacaatggacgattggcatcatagcctcaatttatgctatatggcttatatatgcagcaggtatcaattacttattattgacgatgttactttatattccagctcttcttgtttattcaatcgttcaaaagaataatcagacacgtttgattaaatcagactatattctttttatgattattatcgtacttgcagttatcggattaattaagttattgatgggaacgataaatgttttttaa

SEQ ID NO: 1391 - protein, 476 aa, Staphylococcus aureus subsp. aureus Mu50
MNESGDNKLSKSSLIGLVIGSMIGGGAFNIMSDMGGKAGGLAIIIGWIITAIGMISLAFVFQNLTNERPELDGGIYSYAQAGFGDFVGFISAWGYWFSAFLGNVAYATLLMSAVGNFFPIFKGGNTLPSIIVASLLLWGVHFLILKGVETAAFINSIVTVAKLIPILLVIICMIIAFNFDTFKTGFFGMTSEGVLPFSWASTMSQVKSTMLVTVWVFIGIEGAVIFSSRAKNKKDVGSATVIGLISVLIIYFLLTVLAQGVILQNHISQLDSPSMAQVLATIVGGWGSTLVNIGLIISVLGAWLGWTLLAGELPFIVAKDGLFPKWFAKENKNGAPVNALLITNILVQLFLISMLFTQSAYQFAFSLASSAILYPYMFSAFYQVKYTLEHRQQATTKQWTIGIIASIYAIWLIYAAGINYLLLTMLLYIPALLVYSIVQKNNQTRLIKSDYILFMIIIVLAVIGLIKLLMGTINVF

SEQ ID NO: 1392 - DNA, 1428 bp, Sinorhizobium meliloti 1021
  CDS (1)..(1428): transl_table=11
gtgaccagcactgctcagaaactttcgctcgcgtcgctggccgcgctcgtcgtcggctccatggtgggagcgggcatattttcgctgccccgcaccttcggcgatgcgactggtccgttcggagcgatcgtggcctggtgcatcgcaggggcgggcatcttcacgctggcgcacgtgttccgggtgctcgcggaacgcaagtcggatctcgatgcaggcgtctacgcgtatgcgaacgccggcttcggcgactatgccggcttcctttcggttctcggctattggctggtcggctgcattgccgatgtgtcgtactgggtgttaatcaaggccaccctcggggccttcttcccgatcttcggagacggcaacacgatcgccgctgtgcttgtctcctcggtcgcgctgtggggcttccacttcatgatcttgcgagggatcaaagaggcagcggccatcaacactgtcgtcaccgtggcaaagatcgtgcccatcctaatcttcatagtcatcctgctcggcgcgttcgagaccgacctctttcgcagcaatttttggggcggcgcggacatgcccgaggcgagccttttcgagcagatacgtgcgaccatgctggtcaccgtttttgtgttcatcggcgtagagggcgcgagcgtctattcgcgctacgcgcgcaaacgttccgatgtgggcgtggccaccacactgggcttcgtagtcgtgctgggactgatggtgttagtaacgctgctaccctacggggccctggaacgacccgaaatcgcggccatgcggcaaccctcgatggcttccgttctggaatccatcgtcgggccgtggggctccgtctttgtcagtgccggtttgatcgtttccgtgctcggagcgtatctggcatggtcgctgatctgcgtcgaagtgctcttctgcgccgccaaaaacggagacatgccgagcgtactcgccagggagaacagcaacagcgttccggctgcggctctttggctgagcaatggagtgatccagctcttcctcattagcaccctgttctcggaagatgcgtttcgcttgatggtaaacctgacgagtgcaatggtgctgattccatacctgctagtggcagcctatggatttcttgtcgccaaacgcggggaaacctacaacatcagaccgaaggaacggttccgcgatctgatcttggcgggcgccgccacggtctacacggcctttatgatttatgccggcggcctgaagtttctcctgctttccgccattctctacgcgcttggaacggcactgttcttctacgcaagacgcgaacagaagaagccgctcttcagccctcgggaatggctcgtcttcatagctgtagtcgccggatgccttgtcggcatctatggtctcgtgaccggctccatcactatatag

SEQ ID NO: 1393 - protein, 475 aa, Sinorhizobium meliloti 1021
MTSTAQKLSLASLAALVVGSMVGAGIFSLPRTFGDATGPFGAIVAWCIAGAGIFTLAHVFRVLAERKSDLDAGVYAYANAGFGDYAGFLSVLGYWLVGCIADVSYWVLIKATLGAFFPIFGDGNTIAAVLVSSVALWGFHFMILRGIKEAAAINTVVTVAKIVPILIFIVILLGAFETDLFRSNFWGGADMPEASLFEQIRATMLVTVFVFIGVEGASVYSRYARKRSDVGVATTLGFVVVLGLMVLVTLLPYGALERPEIAAMRQPSMASVLESIVGPWGSVFVSAGLIVSVLGAYLAWSLICVEVLFCAAKNGDMPSVLARENSNSVPAAALWLSNGVIQLFLISTLFSEDAFRLMVNLTSAMVLIPYLLVAAYGFLVAKRGETYNIRPKERFRDLILAGAATVYTAFMIYAGGLKFLLLSAILYALGTALFFYARREQKKPLFSPREWLVFIAVVAGCLVGIYGLVTGSITI

SEQ ID NO: 1394 - DNA, 1383 bp, Salmonella typhimurium LT2
  CDS (1)..(1383): transl_table=11
atggaaaaaaaactgggactgagcgcgctgaccgcgctggttttaagctcaatgcttggcgcaggtgttttcagtctgccccagaatatggccgccgttgccagtccggctgcgttgttaattggctgggccattaccggcgtggggatactcttactggcattcgccatgttaatccttacgcgcattcgctccgagcttgacggcggtatctttacttacgcccgcgaaggcttcggcgaactgattggcttttgttctgcctggggctattggctgtgcgcggtcatcgccaacgtatcctatttggttatcgtcttttcagcgctgagtttctttaccgatacgcctgccttgcgtctgtttggtgacggtaatacctggcaggctattgtcggcgcttcagtcttgctctggattgtccatttcctcatcctgcgcggcgtacaaacggcagccagcatcaatctggtcgcgactctggcgaaactgttgccgctcggcgcgtttattgtgctggctatcatgatgttcaaactggataccttcacactggacttcactggtgttgaactcggtattcccgtatgggaacaggtcaagaacaccatgcttattacgctgtgggtgtttattggcgttgaaggcgccgtcgtcgtctcggcccgagcgaaaaataaacgcgatgtaggccgcgccacgctactggcggtcctcgcggcgctgggaatatatctcctggtcacgctgctttctcttggcgttcttgcgcgtccggaactggcggagatgcgtaacccgtcgatggccggactaatggtaaaaatgatggggccgtggggagaaattattattgcagcgggactgattgtgtctgtctgcggggcttatctaagctggactattatggcggcggaggtgccatttctggcggcagcctataaatccttcccgggcatcttcgcgcgacaaaatgcgcaaggcgcgccttctgcatcgttatggctcaccaatatctgtgtgcaaatctgtctggtgctgatctggctgaccggttcggactacaacacgctattgacgattgcgtcagaaatgattctggtgccctactttctggtcggcgcatttctgctgaagattgcaacacgtcccctccatcgggcggtcggtatcggagcctgtatttatggcttatggttgttatacgcgtcgggtcccatgcacctgctgctgtccgtcgtactgtacgcgcctggattactggttttcctgtatgcgcgtcggacgcacaagcatgacaacgtgttaaatcgtcaggaagtcgtgctgattggtttattgctggtcgcggcggttccggctacgtggatgctggtgggttga

SEQ ID NO: 1395 - protein, 460 aa, Salmonella typhimurium LT2
MEKKLGLSALTALVLSSMLGAGVFSLPQNMAAVASPAALLIGWAITGVGILLLAFAMLILTRIRSELDGGIFTYAREGFGELIGFCSAWGYWLCAVIANVSYLVIVFSALSFFTDTPALRLFGDGNTWQAIVGASVLLWIVHFLILRGVQTAASINLVATLAKLLPLGAFIVLAIMMFKLDTFTLDFTGVELGIPVWEQVKNTMLITLWVFIGVEGAVVVSARAKNKRDVGRATLLAVLAALGIYLLVTLLSLGVLARPELAEMRNPSMAGLMVKMMGPWGEIIIAAGLIVSVCGAYLSWTIMAAEVPFLAAAYKSFPGIFARQNAQGAPSASLWLTNICVQICLVLIWLTGSDYNTLLTIASEMILVPYFLVGAFLLKIATRPLHRAVGIGACIYGLWLLYASGPMHLLLSVVLYAPGLLVFLYARRTHKHDNVLNRQEVVLIGLLLVAAVPATWMLVG

SEQ ID NO: 1396 - DNA, 1392 bp, Yersinia pestis KIM
  CDS (1)..(1392): transl_table=11
ttggaaaagaaactcggtctgactgcgctaacggcgctggttcttagctcaatgctgggagcgggtgtctttagcctgccgcaaaacatggctgaagtcgccagccctgctgctctgctcattggctggagtattactggcatcgggatcattttcctggccttcgccatgttgctactgactcgcctacgccctgatctcgatggcgggatatttacctatgctaaagaaggttttggcgacctcatcggttttttctctgcgtggggttattggctatgtgcggtgatcgctaacgtatcttacttggtgattgtttttgcagcactgagcttttttaccgataaatccggcagcatcatttttggtgaaggtaacacctggcaggcattgttgggggcatcattcctgttatggctggttcacgctttggtactacgaggggtacagactgcggccagtatcaacttggcggcaacactggcaaaactgttacctattggcggctttattattctggccggcatcgcatttagcctcgatacttttagtatcgatttcactggcttagcactacacacgccggtttggcagcaagtaaaagataccatgctgattaccttatgggtctttatcggtgtcgaaggtgcagtggttgtctctgcccgtgcacgcaacaagaaagatgtgggccgtgccacgatgctagccgtaatttcagcccttagcgtctacctgttgattaccttattgtcactcggcgtggtgcctcgggcggaattagcgggtatgcgtaatccgtcaatggcaggcattatggtcgaaatgattggcccatggggagaaatcattatcgccaccgggctgattatttctgtctgtggtgcttatcttagctggacaattatggccgctgaagtaccgatggtggcagctaaacatggcgctttccctaaaatattccgtcaccaaaataaaaacaacgcgccagctcaatccttatggttaaccaacagcgcggtacaagttgcgctggttttgatttggctgacaggcagcaattacaataccttactgacaattgcctcggaaatgattctggtgccctattttctcgtcggtgcattcttatttaaagtggcattaaagcggcaagattggcgtttgattgttgctgccagcggggcttgtttgtacggtttatggctgatttatgctgctggtttagtgtatttactgttgtctgtacttttgtatgccccaggattattggtgtttatttatgctcgtaaggggcatgaagggctgagattgctgaatacggttgagcgggcggcgattttcctcgtgttactcgccactatcccagcgacatggttgatgatgcactag

SEQ ID NO: 1397 - protein, 463 aa, Yersinia pestis KIM
MEKKLGLTALTALVLSSMLGAGVFSLPQNMAEVASPAALLIGWSITGIGIIFLAFAMLLLTRLRPDLDGGIFTYAKEGFGDLIGFFSAWGYWLCAVIANVSYLVIVFAALSFFTDKSGSIIFGEGNTWQALLGASFLLWLVHALVLRGVQTAASINLAATLAKLLPIGGFIILAGIAFSLDTFSIDFTGLALHTPVWQQVKDTMLITLWVFIGVEGAVVVSARARNKKDVGRATMLAVISALSVYLLITLLSLGVVPRAELAGMRNPSMAGIMVEMIGPWGEIIIATGLIISVCGAYLSWTIMAAEVPMVAAKHGAFPKIFRHQNKNNAPAQSLWLTNSAVQVALVLIWLTGSNYNTLLTIASEMILVPYFLVGAFLFKVALKRQDWRLIVAASGACLYGLWLIYAAGLVYLLLSVLLYAPGLLVFIYARKGHEGLRLLNTVERAAIFLVLLATIPATWLMMH

SEQ ID NO: 1398 - DNA, 1428 bp, Streptococcus agalactiae 2603V/R
  CDS (1)..(1428): transl_table=11
atggaaaaagaaaaaaaattaggtcttttaccactaacaatgcttgtcattggctctcttatcggtggcggaatctttgatttaatgcaaaatatgagttccagagccggtttggtaccaatgcttattgcttgggtaattactgctatcgggatggggactttcgttttaagttttcaaaatttatctgaaaaaaggccggacctaacagctggaatctttagttacgctaaagaggggtttggaaactttatgggatttaactctgcatggggttattggttatcagcttggcttggaaatgttgcctacgctgcactcttattcagttcactcggttatttctttaaattctttggtaatggaaataatatcatctcaattattggagcaagtatagttatttgggttgtccatttcttaattttaagaggtgttaatacagctgcatttattaataccatagttacctttgcaaaattagtacctgttattattttcttaatttcagcgttattagctttcaaatttaacatttttagtcttgatatctggggaaatggattacatcaatcaattttcaaccaagtcaattcaactatgaaaaccgctgtttgggtatttattggtattgagggcgccgttgtcttctcaggtcgtgctaaaaaacactctgatattggtaaagcaagtatcctagcattattcactatgatttcactttatgtattgatttctgttttatcacttggtatcatgtcacgtccagaacttgcaaacttaaaaacaccagctatggcttacgttctagaaaaggctgttggtcactggggcgctatcttagttaaccttggtgttatcatttcagtatttggcgctattcttgcttggactttatttgcagcagaattaccatatcaagctgctaaagaaggtgcttttcctaaattctttgcaaaagaaaataaaaacaaagctccaatcaattcactcttagtcactaatctttgtgtacaagcattcttaatcacgttcttattcacacaaagtgcttatcgttttggtttcgcattagcatcatctgctatcttaattccttatgcttttacagcactatatcaattacaattcacactccgtgaggataagtcaactccaggacatcaaaagaatttaattatcggtatcctcgctacaatctatgctgtttaccttatctacgctggtggttttgattacttacttttgacaatgattgcttacactctaggtatgattctctatattaaaatgagaaaagatgacaagcttcctatctttgtgggatatgaaaaaattagtgccattgtcattctagcgctttgcttattatgtattattgaaattatgactggacaaattgacattgctgcaatcctagcaggttag

SEQ ID NO: 1399 - protein, 475 aa, Streptococcus agalactiae 2603V/R
MEKEKKLGLLPLTMLVIGSLIGGGIFDLMQNMSSRAGLVPMLIAWVITAIGMGTFVLSFQNLSEKRPDLTAGIFSYAKEGFGNFMGFNSAWGYWLSAWLGNVAYAALLFSSLGYFFKFFGNGNNIISIIGASIVIWVVHFLILRGVNTAAFINTIVTFAKLVPVIIFLISALLAFKFNIFSLDIWGNGLHQSIFNQVNSTMKTAVWVFIGIEGAVVFSGRAKKHSDIGKASILALFTMISLYVLISVLSLGIMSRPELANLKTPAMAYVLEKAVGHWGAILVNLGVIISVFGAILAWTLFAAELPYQAAKEGAFPKFFAKENKNKAPINSLLVTNLCVQAFLITFLFTQSAYRFGFALASSAILIPYAFTALYQLQFTLREDKSTPGHQKNLIIGILATIYAVYLIYAGGFDYLLLTMIAYTLGMILYIKMRKDDKLPIFVGYEKISAIVILALCLLCIIEIMTGQIDIAAILAG

SEQ ID NO: 1400 - DNA, 1428 bp, Pseudomonas putida KT2440
  CDS (1)..(1428): transl_table=11
atgtctgattcatccggaaaactaaagctcggcgcgttagttgcacttgtcgtcggctcgatgattggcggcggtatcttctcgctgccacaaaacatggccgccagcgcaggggttggggccgtactgatcggctgggcgatcaccgcagtcggcatgctgaccctggccttcgtgttccagaccctggccaaccgcaagcccgacctggatggtggggtgtatgcgtatgccaaggctggcttcggcgactatatgggcttttcctcagcctggggctactggatcagtgcctggctgggcaacgtcggctacttcgtgctgctgttcagcaccctgggctacttcttcccgatcttcggtgaaggcaacaccccagccgccataattggcgcgtcgatcctgttgtgggcggtgcacttcctggtactgcgcggcatcaaggaagccgccttcatcaacttggtcaccactgtggccaaagtggtgccgctggtgctgttcgccctgatctgcctgttcgccttcaggctcgacatcttcaccgccgatatctgggccatgggcacgccagagcttggcagtgtcatgaaccaggtgcgcaacatgatgctggtcaccgtgtgggtgttcatcggcatcgagggcgcgagcatcttctcggcgcgggcggaaaaacgcaccgacgtgggcaaggcaacggtgatcggcttcgtgaccgtgctgctgttcctggtgttggtcaacgtgctgtcgctgggcatcatgactcagccggaactggccaagctgcagaacccgtcgatggctgccgtgctggagcatgtggtcggccactggggggcggtgctgatcagcgtcggcctggtcatctcgctgctcggggcgctgctgtcgtgggtgctgctgtgcgccgagatcatgttcgccgcagccaaggaccacaccatgccggagttcctgcgccgcgagaacgccaaacaggtaccggccaacgccctgtggctgaccaacgccatggtgcagatctttctggtcatcacgctgttctcaagcagcacctacctgtctctgatctacctcgccacctcgatgatcctggtgccctacctgtggtcggcagcctatgcgttcctgctggcactgcgcagcgaaacctacgaacaagccctggccgaacgcaagaaggacctgatcatcggtggcatcgccctgttgtacgccatctggctgctgtacgccggcggcgtgaaatacctgctgctctctgccctgctctacgcacctggcgccatcctgttcgccaaggccaagcgtgaggtgggcaaaccggtcttcaccaacgtggaaaaactgatcttcgcagccgtggtcattggcgccctggtggcagcctatggcctgtatgacggcttcctgaccctttga

SEQ ID NO: 1401 - protein, 475 aa, Pseudomonas putida KT2440
MSDSSGKLKLGALVALVVGSMIGGGIFSLPQNMAASAGVGAVLIGWAITAVGMLTLAFVFQTLANRKPDLDGGVYAYAKAGFGDYMGFSSAWGYWISAWLGNVGYFVLLFSTLGYFFPIFGEGNTPAAIIGASILLWAVHFLVLRGIKEAAFINLVTTVAKVVPLVLFALICLFAFRLDIFTADIWAMGTPELGSVMNQVRNMMLVTVWVFIGIEGASIFSARAEKRTDVGKATVIGFVTVLLFLVLVNVLSLGIMTQPELAKLQNPSMAAVLEHVVGHWGAVLISVGLVISLLGALLSWVLLCAEIMFAAAKDHTMPEFLRRENAKQVPANALWLTNAMVQIFLVITLFSSSTYLSLIYLATSMILVPYLWSAAYAFLLALRSETYEQALAERKKDLIIGGIALLYAIWLLYAGGVKYLLLSALLYAPGAILFAKAKREVGKPVFTNVEKLIFAAVVIGALVAAYGLYDGFLTL

SEQ ID NO: 1402 - DNA, 1428 bp, Pseudomonas putida KT2440
  CDS (1)..(1428): transl_table=11
atgagcgaaccgggacagaagctgcgcctgggcgcgctgatcgcgctggtggtcgggtcgatgattggcggcgggatcttctcgctgccgcagaacatggccgcgcgtgctgatgtgggcgcagtgctgatcggctgggggatcaccgcggtcggcatgttggccctggccttcgtgttccagaccctggccaaccgcaagccggaactggactcgggggtatatgcctacgccaaggccggctttggcgagtacatgggcttttcctcggcctggggctactggatcagcgcctggctgggcaacgtcggctatttcgtgctgctgttcagcaccctgggcttctacttcccggtgttcggcgaaggcaacacacccatcgccatcggttgtgcatcgctgctgctgtggtcggtacattttctggtgctgcgcggtatcaaggaggcggccttcatcaaccaggtcaccaccgtcgccaaagtggtgcctttgctgattttcgtggtgatcgctgcattcgccttccgcgccgatatcttcacccgggatatctggggcttgagcaacccacaattcggcagcgtgctggagcaggtgcgcaacatgatgctggtgaccgtgttcgtgttcatcggcatcgagggcgccagtgtgtattccgggcgcgcccagcgtcggtcagacgtgggcaaggccacggtcatcggttttctgggtgtgctggcgctgctggtgctggtcaacgtgttgtcgctgggcatcatgacccaaccggaactggccgggctgcagaacccctcgctggcctcggtgctggagcatatcgtcggcccctggggcgccttgctgatcagcctcggcctggcggtctcgctgcttggcgccttgctttcatgggcgctgctgtgtgccgaaatcctttacgccacggcgcgggacaagaccatgccgcgctttctggccaaggaaaacgccaaccatgtgccggctaacgccctgtggctgaccaactgcatgattcagggtttcctgctgattacgctgttctccgccggtacgtacaccagtctgatctacctggcctcgtcaatgatcctggtgccctacctgtggtctgcggcctatgccgtgctgctggcgatgcgcgcagaaacctatgccgggcagccgaggttgcggcgcaaggacttgctggtggcgctggttgccctgctgtatgccgtgtggctgctgtatgccggcgggctcaagtacctgctgctttcggcgctgctgtacgcccccggcgtcatcttgttcgcgagggccaagcatgagcaggggcagacgttgttcacggcctgggaaaagctgattttcgccgccgtgctggtgggtgccgcgctggcggcctacgccttgtattcagggctgctgagcttgtga

SEQ ID NO: 1403 - protein, 475 aa, Pseudomonas putida KT2440
MSEPGQKLRLGALIALVVGSMIGGGIFSLPQNMAARADVGAVLIGWGITAVGMLALAFVFQTLANRKPELDSGVYAYAKAGFGEYMGFSSAWGYWISAWLGNVGYFVLLFSTLGFYFPVFGEGNTPIAIGCASLLLWSVHFLVLRGIKEAAFINQVTTVAKVVPLLIFVVIAAFAFRADIFTRDIWGLSNPQFGSVLEQVRNMMLVTVFVFIGIEGASVYSGRAQRRSDVGKATVIGFLGVLALLVLVNVLSLGIMTQPELAGLQNPSLASVLEHIVGPWGALLISLGLAVSLLGALLSWALLCAEILYATARDKTMPRFLAKENANHVPANALWLTNCMIQGFLLITLFSAGTYTSLIYLASSMILVPYLWSAAYAVLLAMRAETYAGQPRLRRKDLLVALVALLYAVWLLYAGGLKYLLLSALLYAPGVILFARAKHEQGQTLFTAWEKLIFAAVLVGAALAAYALYSGLLSL

SEQ ID NO: 1404 - DNA, 1422 bp, Staphylococcus epidermidis ATCC 12228
  CDS (1)..(1422): transl_table=11
atggatgaaaataaattaggtaaaacttccttaattggtttagtcataggctctatgataggcggtggtgcattcaatatcatctcagatatgggtggccaagctggtggacttgcaataattatcggttggataataactgctattggtatgatttctcttgctttcgtatttcaaaatttaacaaatgagcgaccagatcttgatggaggaatttatagttatgctcaaacagggtttggagattttattgggttttcaagtgcttggggatattggtttgcagcatttctaggtaatgtggcttatgcaaccctattaatgtcagctgtgggtaactttttccctatatttaaaggaggtaacacacttccaagtattatcatagcatcaattttattatggggtgtacattttttaatacttagaggtgtagaaactgcagcgtttataaatagtattgttacagtagctaaattaatacctatatttctagttattatatgcatgatagttgtattcaacttcagtacttttaaatccggtttttatggtatgactagtggaagtgttggcgtttttagttggggagatacaatggcacaagtaaaaagtactatgttagtaactgtatgggtattcacagggattgaaggagccgttgtcttttctggacgtgcaaagtctaaaaaggatgtaggaactgctaccgttattggtttgatttctgtgctagtcatttatttcttaatgactgtactagcccaaggtgtcattcagcagaaccaaatttcaaaacttgctaatccatcaatggcacaagtattagaacatattgtaggtcattggggttcagtgttagttaatataggcttaattatctctgttttaggagcttggttaggatggacattactagctggtgaattaccattcattgtagctaaagatggacttttcccgaaatggtttgctaaagaaaataagaataaagctccggtcaacgctttaattattactaatatattagttcagttatttttaattagtatgttgtttacagatagtgcctatcagtttgcgttttcacttgcatcaagtgcaatcttaattccatatacactcagtgctttttaccaggttaaatatactattcaaaataaatctaaagctaatttaaaacaatggataataggaattattgcatctatttacacaatttggttggtttatgcagctggattagattatttactattaacgatgttgttatatatacctggattactcgtatacagctacgtacaaagggataataacaaacatttgacaaaattggattatacgttattcatattcatcattgtacttgcaataataggaatagttcgtttgattacaggtaatatttctgtattttaa

SEQ ID NO: 1405 - protein, 473 aa, Staphylococcus epidermidis ATCC 12228
MDENKLGKTSLIGLVIGSMIGGGAFNIISDMGGQAGGLAIIIGWIITAIGMISLAFVFQNLTNERPDLDGGIYSYAQTGFGDFIGFSSAWGYWFAAFLGNVAYATLLMSAVGNFFPIFKGGNTLPSIIIASILLWGVHFLILRGVETAAFINSIVTVAKLIPIFLVIICMIVVFNFSTFKSGFYGMTSGSVGVFSWGDTMAQVKSTMLVTVWVFTGIEGAVVFSGRAKSKKDVGTATVIGLISVLVIYFLMTVLAQGVIQQNQISKLANPSMAQVLEHIVGHWGSVLVNIGLIISVLGAWLGWTLLAGELPFIVAKDGLFPKWFAKENKNKAPVNALIITNILVQLFLISMLFTDSAYQFAFSLASSAILIPYTLSAFYQVKYTIQNKSKANLKQWIIGIIASIYTIWLVYAAGLDYLLLTMLLYIPGLLVYSYVQRDNNKHLTKLDYTLFIFIIVLAIIGIVRLITGNISVF

SEQ ID NO: 1406 - DNA, 1404 bp, Staphylococcus epidermidis ATCC 12228
  CDS (1)..(1404): transl_table=11
atgaatgacacaggagataaaaaattaagtcgaacatcattaatcggtcttgttataggttcgatgattggtggcggtgctttcaatattcaatctgatatgggaggccacgctggaggattagcaattataattggatggttgattactgctataggaatgatttcattagcacttgtctttcaaaacctaactaatgaacgatctgatttagatggtggtatttatagttatgctcaagcaggttttggtgattttatagggtttgcaagtgcttggggatattggttctcagcttttttaggtaatgtcgcatatgcaacgttattaatgtcttctatagggaacttctttccaatatttaaagggggcaacacatttcctagtatcatagtggcatcaatattattgtggagtgtgcactttttaatattaaaaggagttgagacggctgctttaatcaatagtattgtcactattacaaaattaattcctatcttattagtgattatatgtatgattgtagcctttaattttaatacattcaagataggtttctttggaatggatggatatggatcattatcatttcatttcgctaatacgatgtcacaagttaaaagtacgatgttagtgacagtttgggtatttattggtattgaaggtgctgttgtattctccggaagagctaaaaataaaaaagatgttggaactgccactgttatcggacttatttcagtattgctcatttacttcttgctgactgtattagcacaaggtattgtaattcaaaatcatatttctaaacttgaggcaccatcaatggcacaaattttagcttatattgttggtgattggggagcaacatttgtcaatattggtcttattatttcagtattaggtgcatggctaggttggacattacttgccggagagttgccttttattgtagctaaagatggtttgtttcctaagtggtttgcaaaagaaaataaaaatggggcacctatgaacgccttattcattactaatgtgttagttcaaatattccttattagtatgctgtttaccaaaagtgcttatcattttgcattttctctcgcggcaagtgctatactttatccatacatgttcagtgcgttttatcaggtgaaatatacaatagaacacaagttaactgcaacgcctaaacaatggattataggaattctagcatctatttatgcaatttggctggtatacgcgtcaggtatagattacttgttacttaccatgttgctctatattccggggattatcgtctatgttgttgttcagaaaaataatcaaaagcgacttacacaatttgactatattttcttcagtcttatcgttattttagcattgatagggttattacgatga

SEQ ID NO: 1407 - protein, 467 aa, Staphylococcus epidermidis ATCC 12228
MNDTGDKKLSRTSLIGLVIGSMIGGGAFNIQSDMGGHAGGLAIIIGWLITAIGMISLALVFQNLTNERSDLDGGIYSYAQAGFGDFIGFASAWGYWFSAFLGNVAYATLLMSSIGNFFPIFKGGNTFPSIIVASILLWSVHFLILKGVETAALINSIVTITKLIPILLVIICMIVAFNFNTFKIGFFGMDGYGSLSFHFANTMSQVKSTMLVTVWVFIGIEGAVVFSGRAKNKKDVGTATVIGLISVLLIYFLLTVLAQGIVIQNHISKLEAPSMAQILAYIVGDWGATFVNIGLIISVLGAWLGWTLLAGELPFIVAKDGLFPKWFAKENKNGAPMNALFITNVLVQIFLISMLFTKSAYHFAFSLAASAILYPYMFSAFYQVKYTIEHKLTATPKQWIIGILASIYAIWLVYASGIDYLLLTMLLYIPGIIVYVVVQKNNQKRLTQFDYIFFSLIVILALIGLLR

SEQ ID NO: 1408 - DNA, 1440 bp, Bradyrhizobium japonicum USDA 110
  CDS (1)..(1440): transl_table=11
atggcgcctccatcgagccaggccgatcaaaggctctcccggaatgcgctcatcgcgctcgtgatcgggtcgatggtcggttccggtatctttgcattgcctgcagcgttcgggcggaccacgggcgcgctcggagcgatgatcgcctgggccatcgcaggcacgggcatgctgatgctcgccttcgtgtttcagaccttgtcacagcgcaagccggacctcgatgccggcatctatgcctatgccagggccggatttggcgactatatcggctttgcttcggccgtcggatactggatcggttgctgccttgccgacgtcgcctgcctcgtcctgatcaaggcgacgctcggacagtttttcccggtcttcggcgacggcacgacgccggtggcgatcgcttcggcgtccgtcctgctctggggcgtgcacattctgctgctgcgcggcatcacgggggcggccgcgctcaatacgatcgcgacctacgctaaaatcatcccgatactattgttcatcgtcgtcgccgtcatcgccttcgacggctcgctcttctccattaatttctggggcacggagcagccggccgtttcgaaggtagtcgcgcaggttcgcggcacgatgctgctgacggtgttcgtgttcgtcggaattgaaggcgcgagtgtctactcccgttacgcccggagccgcgccgatgtcggattcgcaacccttgccggctttctgacggttctgtgcctcctcgtcctcgtgacgctcctgtcgtacggcgtgctgccacgagcggagctggcggatctcccgacaccatccatggccggcgtgatggaggcggtcgtcggccgctggggcagtgtgttcatcagcgtggcactcctgatctcggtcctcggcaactacctgtcctggtcgctgttggcggccgagatcctgcattccgccgcgatccaccgcaccatgccctcctttctcgccacggtgaacgtgtacaaggtccctgccggcgcgctctggctcaccaactgcgtcatccagatttttctgctcgtcacctggtttgcggaatacgcattcacgcttgccttgaagatgacgagcgcgatgacgctgatcccatatttctttgttgcggcgtacggcctgaagctcgcctggaccagcgaggcctatcacgccggcgagcacgcccggattgtcgactggatccgctcggccatcgcgacagtttacgcggccggcatgatctacgcaggcgggcccaagtttctcctgctgtcgtcgatcctctatgcgcccggcacgttgctgttccttctcgcaaaacgcgagcgcaaggaagcgatcttccggccgttcgaaatcatcctctttgcagcgatcacgatcgccgcatgcgccggcgtctacgcgctggccaccggagccatctcgatttga

SEQ ID NO: 1409 - protein, 479 aa, Bradyrhizobium japonicum USDA 110
MAPPSSQADQRLSRNALIALVIGSMVGSGIFALPAAFGRTTGALGAMIAWAIAGTGMLMLAFVFQTLSQRKPDLDAGIYAYARAGFGDYIGFASAVGYWIGCCLADVACLVLIKATLGQFFPVFGDGTTPVAIASASVLLWGVHILLLRGITGAAALNTIATYAKIIPILLFIVVAVIAFDGSLFSINFWGTEQPAVSKVVAQVRGTMLLTVFVFVGIEGASVYSRYARSRADVGFATLAGFLTVLCLLVLVTLLSYGVLPRAELADLPTPSMAGVMEAVVGRWGSVFISVALLISVLGNYLSWSLLAAEILHSAAIHRTMPSFLATVNVYKVPAGALWLTNCVIQIFLLVTWFAEYAFTLALKMTSAMTLIPYFFVAAYGLKLAWTSEAYHAGEHARIVDWIRSAIATVYAAGMIYAGGPKFLLLSSILYAPGTLLFLLAKRERKEAIFRPFEIILFAAITIAACAGVYALATGAISI

SEQ ID NO: 1410 - DNA, 1461 bp, Chlamydophila caviae GPIC
  CDS (1)..(1461): transl_table=11
atgtttttaaataggggtaaatctaagaaaaatcttggagccatagctttagcaggcatggtaattagctctatgattgggggaggaattttcagtcttccccaaaatatggcagcatctgcaggagcaggagctattatcttagcatggctcctaacaggcataggcatgtttttcattgccaatacttttaaaattctctccttagtacgccctgacttaacaacagggatttatatgtacagccgagaaggatttggcccttatgtagggtttactatcggttggggatactggttatgccaaatctttggtaatgtcggttatgccgtaatgaccatggatgcgttaaactatttcttccctccctattttaaaggtgggaatactatccctgcgattattggaggctctatccttatatgggtctttaattttatagtccttaaaggaatccgccaggcatcttttatcaatattatcggaacagtatgtaaacttgttcctcttattgtatttattatcatcacagcattcgcattcaaacttgctattttcaaaacggatttttggggagatgcggttacaaaaacacaaccggcactaggatccgtaactagccagttaaaaagtacaatgttagtcactctatgggctttcatcggaatcgaaggtgctgttgttatgtcagcacgtgctaaaagccctagcgctgtcgggaaagctactctcctaggtttcgtaggatgcttaaccgtgtatatccttttatctattctaccttttggatccctattccaatatcaacttgctggtattcccaatccttcaacagctggggtgttaggcatgcttgtaggaagatggggagaaattttaatgaacgtaggtctccttatagccatactctctagttggttatcttggactataattgttgctgaaatcccttatactgcagcaacaaatggtacatttcccgagatctttgctatagaaaatgcgcaacattcccctaaactctcgttatatatcaccagcgctcttatgcaaatcaccatgctttttgtatatttttcaacaaacgcatggaatacgatgttgagcattacaggagtgatggttttacctgcctatttagcaagtgccgctttcctttttcagtttagcaaaaacaaaaagtatccaaataaaggccccgtcaaatcttacatcgcaaaatatacaggattttttgctgttatttattccctttggttgatctatgctggaggcttaaattacctgcttatgtctgtcattctcttggctttaggcattcccttttacatagatgccggcaagaaaagtaaaagagagaagacattttttgcaaaaaaagaggttacaaaaattataataattgctttgttggcgttattagcgatttttcttttttctacggagaaaattcgtctataa

SEQ ID NO: 1411 - protein, 486 aa, Chlamydophila caviae GPIC
MFLNRGKSKKNLGAIALAGMVISSMIGGGIFSLPQNMAASAGAGAIILAWLLTGIGMFFIANTFKILSLVRPDLTTGIYMYSREGFGPYVGFTIGWGYWLCQIFGNVGYAVMTMDALNYFFPPYFKGGNTIPAIIGGSILIWVFNFIVLKGIRQASFINIIGTVCKLVPLIVFIIITAFAFKLAIFKTDFWGDAVTKTQPALGSVTSQLKSTMLVTLWAFIGIEGAVVMSARAKSPSAVGKATLLGFVGCLTVYILLSILPFGSLFQYQLAGIPNPSTAGVLGMLVGRWGEILMNVGLLIAILSSWLSWTIIVAEIPYTAATNGTFPEIFAIENAQHSPKLSLYITSALMQITMLFVYFSTNAWNTMLSITGVMVLPAYLASAAFLFQFSKNKKYPNKGPVKSYIAKYTGFFAVIYSLWLIYAGGLNYLLMSVILLALGIPFYIDAGKKSKREKTFFAKKEVTKIIIIALLALLAIFLFSTEKIRL

SEQ ID NO: 1412 - DNA, 1416 bp, Bacillus cereus ATCC 14579
  CDS (1)..(1416): transl_table=11
atgggtgaagataagaaattagggttgtttacactaacggctcttgtagttgggtctatgattggcggtggagcctttaatttagcgagtgatatggcaaaaggtgctggtgctggagccattattattggctgggttataacaggaattgggatgatcgcactcggattatcttttcaaaatctaactgtaaaacggccagatttagatggtggtatttttagctatgcaaaagcagggtttggtaattttatggggtttaatagtgcatggggatactggctatctgcttggcttgggaatgtagcttacggtacattattgttttcttcattaggatatttcttcccgatctttgaaggcggtcaaaatgtagaatccattattggtgcaagcgtattattatggtgtgttcacatgttaattttacgtggagttcaatcagcagcccttgtgaatttagtaactacaatcgcaaaattagtacctgtatttgtatttattgtcataggaatctttgcgtttcatattgatacgttcttagatggattttgggggcaaactggttctttttcatggggagcagttggcagccaagttaaaagtacaatgcttgtaactttatgggtatttattggggtagaaggggctgttgttttatccagtcgagcaaaaaatagaagtgatgtagggaaagcaaccgttattggcttaattggtacactcatcatttacattttaatcacattattgtctcttggacttatgcagcaagcagacattgcaggtttgaaaaatccggctatggcttatttgtttgaaagtgttgttggaaaatggggtgctatctttattaatttaggtttagtcatctctgtattaggtgcttggttaggttggactttgctcgcttctgaaattccatatttagcggctaaagatggagtatttccaaaatggttcgcaaaagaaaataaaaataaggctccagtaaattcattatggataacaaatggtttaatacaaatattcttgttaacattcgtcgtttctgatcaggcgtataactttgcattctctttagcatcttcagctattttaatcccatatgctttttcagcattttatcaactgaagcatagcttaaagtctgaagaagcagatcgaaataaaaatataataattggcttgatcgcaagtatttatggcgtgtggttagtttatgcagccggtttagagtatttattattaacaatgactttatatgcgccaggtatttttattttttacaatgttcaaaagcaaaagagttcgaagcaaatatttactcgagtggaattagcatcatccgtagcaattggtgctttagcattctttgcgatttatggattaattacaggcagtattactttataa

SEQ ID NO: 1413 - protein, 471 aa, Bacillus cereus ATCC 14579
MGEDKKLGLFTLTALVVGSMIGGGAFNLASDMAKGAGAGAIIIGWVITGIGMIALGLSFQNLTVKRPDLDGGIFSYAKAGFGNFMGFNSAWGYWLSAWLGNVAYGTLLFSSLGYFFPIFEGGQNVESIIGASVLLWCVHMLILRGVQSAALVNLVTTIAKLVPVFVFIVIGIFAFHIDTFLDGFWGQTGSFSWGAVGSQVKSTMLVTLWVFIGVEGAVVLSSRAKNRSDVGKATVIGLIGTLIIYILITLLSLGLMQQADIAGLKNPAMAYLFESVVGKWGAIFINLGLVISVLGAWLGWTLLASEIPYLAAKDGVFPKWFAKENKNKAPVNSLWITNGLIQIFLLTFVVSDQAYNFAFSLASSAILIPYAFSAFYQLKHSLKSEEADRNKNIIIGLIASIYGVWLVYAAGLEYLLLTMTLYAPGIFIFYNVQKQKSSKQIFTRVELASSVAIGALAFFAIYGLITGSITL

SEQ ID NO: 1414 - DNA, 1416 bp, Bacillus cereus ATCC 14579
  CDS (1)..(1416): transl_table=11
gtggtacaaatagaaaagaagttaggattttttccattaatcgcattagtagttggaacaatggttggtggcggtgtttttagtttaccgcatgatttagcagtaggagcaaacagtggtgcaataataattggctggtgtattacagcgatgggaatgattccacttgcgctcgtatatcaaacgttagcaagacaaaaaccggaacttgaaggtggaatttatagttatgcacgtgctggtttcggtgaatatattggatttaatagtgcttggggatattggctagcaggaatcttaggtaatgtcgcaacaattatgttactgtttagtacattaggttatttctttccaattttcaaaggaggaaataatgttgcgtctatcgttggggcatcacttttattatggacacttcattttttaattttatttggaatccgtgaagcttctattatgaatgtgatcgcaacaatagggaagttagttccaatcgttttatttattgttgtaatggtaacagcctttcgctgggacacatttacacatgatttttggggagaaggaacgatctcactttccgctatacttggtcaagtgaaaaatacaatgcttgtaacactttgggttttcattggagttgaaggagcggttgtattatctggaagagcgaagaatagtcgagatgttggtaaggcaacagtattgggacttattttagtaatgtccatttatattttaatttctgtcctgtcaatgggagctatgacaagaggcgaactttctgtgttagaaactccgtccatgggacatgtattagagcacgttgttggtccatggggtgcagttgcgattaacatcggattagttgcttcacttgtcggtacattaattggctggtttttacttgtttctgaaatttctcatgtagcaggaaaagatggcgtatttccgaaagtctttacgaaaacaaataagaagcaaacaccgcacatggcattatggatttcaaatggtgttgcccaaattatatttatcatcgttttgttttcggaatcaacatatcaaattatgtatttcattgcatcaacatcaattttattaccatatttattatcagcgttattccaatttaaattagtcattacaaacgaactaaaagacgctaaattaaaaaatggagcgttagctttaattgcttctatttactctgtatggcttctttatgcagctggtttaaagaatttactactcgtttcaattgtgtatggaattggaattattgtttacacgtttgcaagaaaagaacaagggaaccgttgctttgtaggtgcagagaagtatgtgatgtgggcaattattgttgcggctatcacatcaatatatatgttattaactggaaatataaaaatgtaa

SEQ ID NO: 1415 - protein, 471 aa, Bacillus cereus ATCC 14579
MVQIEKKLGFFPLIALVVGTMVGGGVFSLPHDLAVGANSGAIIIGWCITAMGMIPLALVYQTLARQKPELEGGIYSYARAGFGEYIGFNSAWGYWLAGILGNVATIMLLFSTLGYFFPIFKGGNNVASIVGASLLLWTLHFLILFGIREASIMNVIATIGKLVPIVLFIVVMVTAFRWDTFTHDFWGEGTISLSAILGQVKNTMLVTLWVFIGVEGAVVLSGRAKNSRDVGKATVLGLILVMSIYILISVLSMGAMTRGELSVLETPSMGHVLEHVVGPWGAVAINIGLVASLVGTLIGWFLLVSEISHVAGKDGVFPKVFTKTNKKQTPHMALWISNGVAQIIFIIVLFSESTYQIMYFIASTSILLPYLLSALFQFKLVITNELKDAKLKNGALALIASIYSVWLLYAAGLKNLLLVSIVYGIGIIVYTFARKEQGNRCFVGAEKYVMWAIIVAAITSIYMLLTGNIKM

SEQ ID NO: 1416 - DNA, 1428 bp, Bacillus anthracis str. Ames
  CDS (1)..(1428): transl_table=11
atgacagatggggtggtacaaatagaaaagaagttaggattttttccattaattgcattagtagtcggaacaatggttggtggcggtgtttttagtttaccgcatgatttagcagtaggagcaaatagtggctctatcataattggctggtgtattacagcgatgggaatgattccactcgcgctcgtatatcaaacgttagcaagaaagaaaccagagcttgagggcgggatttatagttatgcacgtgctggtttcggtgaatatattggatttaacagtgcttggggatactggttagcaggaattttaggaaacgttgcaacaatcatgttactgtttagtacattaggttatttcttcccaatttttaagggcggaaatagtgttgcgtctatcgtaggagcatcacttttattatggacacttcattttctaattttatttggcattcgtgaagcatctattatgaatgtgattgcaacgataggaaaattggttccaatcgtattatttattgttgtaatggtaacagcgtttcgctgggatacatttacacaggatttttggggggaaggaactatttcagtttcctctatactaggtcaagtgaaaaatacaatgcttgtaactctttgggttttcatcggggttgaaggagcggtagtattatctggaagagcaaaaaatagtcgagatgtcgggaaagcgacagtattaggacttattttagtaatgtctatttatattttaatttctgtcttgtcaatgggagcgatgacaagaggagaactttctgttttagaaactccgtcaatgggacatgtattagaacatgttgttgggacatggggggcagttgcgataaacatcgggttagttgcttcacttgtaggtacattaataggctggtttttacttgtttctgaaatttcccacgtagcaggaaaagatggcgtgtttccgaaagtctttacgaaaacaaataaaaaacaaacgccgcatatggcattatggatctcaaatggcgttgcccaagttatatttataatcgttctgttttcagaatcaacatatcaaattatgtatttcatagcgtcaacatcaattttagtaccatatttattatcagcgttattccaatttaaattagtaattacaaatgaactaaaagatgcaaaagtcaaaaatggttcgctagctttaattgcttcactttactctgtatggcttatttatgcagctggtttgaagaatttattgctcgtttcaatcgtatacgggattggaatcattgtttatgtgtatgcaagaaaagaaaaaggaaatcgttgttttactggtatagagagatatgtaatgtgggcaattgtagtagcagctgttacatctctatatatgttattgactggaaatataaaaatgtaa

SEQ ID NO: 1417 - protein, 475 aa, Bacillus anthracis str. Ames
MTDGVVQIEKKLGFFPLIALVVGTMVGGGVFSLPHDLAVGANSGSIIIGWCITAMGMIPLALVYQTLARKKPELEGGIYSYARAGFGEYIGFNSAWGYWLAGILGNVATIMLLFSTLGYFFPIFKGGNSVASIVGASLLLWTLHFLILFGIREASIMNVIATIGKLVPIVLFIVVMVTAFRWDTFTQDFWGEGTISVSSILGQVKNTMLVTLWVFIGVEGAVVLSGRAKNSRDVGKATVLGLILVMSIYILISVLSMGAMTRGELSVLETPSMGHVLEHVVGTWGAVAINIGLVASLVGTLIGWFLLVSEISHVAGKDGVFPKVFTKTNKKQTPHMALWISNGVAQVIFIIVLFSESTYQIMYFIASTSILVPYLLSALFQFKLVITNELKDAKVKNGSLALIASLYSVWLIYAAGLKNLLLVSIVYGIGIIVYVYARKEKGNRCFTGIERYVMWAIVVAAVTSLYMLLTGNIKM

SEQ ID NO: 1418 - DNA, 1401 bp, Haemophilus ducreyi 35000HP
  CDS (1)..(1401): transl_table=11
atgtcaaaacaaaaaattggcctattttcgctcaccgctttagtcttaagctcgatgatcggctctggtatttttagcctacctcaaaatatggctgaagtagctggtgcacaagcattattgatcggttgggctattactggcattggtatcctctttttaggtctatctttcttttttctctcgcgattaaaaccagaattagaagggggtgtatatacttatgctcgtgaaggctttggcgatttagtcggtggtttatccgcttggggctattggctttgtaccgctatcggcagtgtcggttacctagtggttgcctttgaaggtttgggaacctttgttgacagcgaacagttggttatttttgcacaagggaatactgttgttgccatattaggtgcgtcaattattgtttggctagtgcatcatttaatcgcacgaggtattcgtgaagcggcttacgtaaacttaattgctacgatcgtcaaaacattgccactgttattatttattgcattagctatttggttcttttcacctacacaatttttagctgattttagcggtcaaaaactagcaactaatacattatcccaagtcaaaaatacgatgctaattaccctttgggtatttgttggcgttgaaggggcttccgtactttcagcttatgctaaacgtaaaagcgatgtggggctagcaacattgttggggattttaattacattggtgctttatgttgccattacgttactttcattagggattttaccccgtgaagtgattgctgaaatggctaatccatcaatggcaggcttaatggaacaaatgattggtacaagcggtaaaattatcctgacattttgtttgatcatttcggttttagcttcatatatgagctggacaatgttttcctcagaaattcctttccaagcggccaaaaaacacgtatttcccaaattactcaatcgaactaatatcaatggcaccccaattgcagggctatggttaacgaatgttgctattcaaatctgtttgttattagtgttatttgctggcaaaggttacagtacactcattcagctttcaacaacgatgattttagtcccatattttttagttggtgcttatttattcaaaatatctatgcaacaaaatgccgtatggtacatcaagctgacaggcctaatggcttcgctgtatggtttatggatcgtctatgccgcaggcttagattatttattattatcagtagtattatatatccctggcattgtgctatatgcttactcacaacagcaaaaacacggctacattcctcttaaccaagcagaaaaaggcttattagttgtgattggcatattatgcattggcgcaatctatagccttattacaggttaa

SEQ ID NO: 1419 - protein, 466 aa, Haemophilus ducreyi 35000HP
MSKQKIGLFSLTALVLSSMIGSGIFSLPQNMAEVAGAQALLIGWAITGIGILFLGLSFFFLSRLKPELEGGVYTYAREGFGDLVGGLSAWGYWLCTAIGSVGYLVVAFEGLGTFVDSEQLVIFAQGNTVVAILGASIIVWLVHHLIARGIREAAYVNLIATIVKTLPLLLFIALAIWFFSPTQFLADFSGQKLATNTLSQVKNTMLITLWVFVGVEGASVLSAYAKRKSDVGLATLLGILITLVLYVAITLLSLGILPREVIAEMANPSMAGLMEQMIGTSGKIILTFCLIISVLASYMSWTMFSSEIPFQAAKKHVFPKLLNRTNINGTPIAGLWLTNVAIQICLLLVLFAGKGYSTLIQLSTTMILVPYFLVGAYLFKISMQQNAVWYIKLTGLMASLYGLWIVYAAGLDYLLLSVVLYIPGIVLYAYSQQQKHGYIPLNQAEKGLLVVIGILCIGAIYSLITG

SEQ ID NO: 1420 - DNA, 1458 bp, Chlamydophila pneumoniae TW-183
  CDS (1)..(1458): transl_table=11
atgacctcaaggactaaatcctcaaaaaatttagggaccatagcccttgcgggtatggtagtcagttccataattgggggagggattttcagcctcccccaaaacatggcagcgacagcaggagctggtgccgtaatcctatcttggatactcactggcttcggcatgttctttatcgcaaatacgtttaggatcctctctacaatacgtcccgaccttaaggaagggatctacatgtacagtagagaaggtttcggcccctacataggattcaccatcggctggggatattggctttgtcaaatcttcggtaatgtgggatatgccgtaattactatggatgctctaaactacttcttccctccctacttccaaggaggaaataccctacctgctattttaggaggctccattcttatctgggtgttcaacttcatagttctgaaaggaatccgtcaagcatcgataatcaacgtcatcggaactatatttaaaatcatccctctaatcatcttcattatcctgactgcgttcttcttcaagctcgctgttttcaaaacagatttttggggacatgccgtaacaaaagcccaaccgagtttaggatccgtaagttcacaacttaaagggactatgttggtcaccctatgggcatttataggaatcgaaggtgccgtggtgatgtctggacgagcaaaaaatcctctctctgtagggcaagctacagtcttaggatttttaggttgcctaacaatctacatcttattttctttattaccttttggctcgctcttccaacatcaactagcgaacatccccaatccctctacagctggtgtcctcgacatcctcgtagggaaatggggagaagtgctcatgaatgtcggcctgattattgctgttttatctagctggttatcctggacgatcatcgttgcagaaatccccttctcagcagctaaaaatggcaccttccctgagatcttcactatagaaaataaagagaaatctcccagcgtctccctatacattacgagctctgtgatgcagctcgccatgctccttgtttacttttcttcgaatgcttggaatactatgctcagcatcacgggggtcatggttctccctgcgtatctagcgagtgctgcctttctctttaaacttagcaaaagcaaaacatatcctaaaaaagggtctattaaagcccctttggcaatgataactggtatcctgggagtggtttactctctatggcttatctatgcaggaggtctaaaatacctctttatggccttagttcttttagctcttggcatccccttctatatagacgcagggaaaaagaagaaaaatgctaagacattctttgctaaaaaagaaattgtaggaatgactttcataggccttcttgcgctgacagcgatcttcctattctcaacaggaagaatcaaaatttaa

SEQ ID NO: 1421 - protein, 485 aa, Chlamydophila pneumoniae TW-183
MTSRTKSSKNLGTIALAGMVVSSIIGGGIFSLPQNMAATAGAGAVILSWILTGFGMFFIANTFRILSTIRPDLKEGIYMYSREGFGPYIGFTIGWGYWLCQIFGNVGYAVITMDALNYFFPPYFQGGNTLPAILGGSILIWVFNFIVLKGIRQASIINVIGTIFKIIPLIIFIILTAFFFKLAVFKTDFWGHAVTKAQPSLGSVSSQLKGTMLVTLWAFIGIEGAVVMSGRAKNPLSVGQATVLGFLGCLTIYILFSLLPFGSLFQHQLANIPNPSTAGVLDILVGKWGEVLMNVGLIIAVLSSWLSWTIIVAEIPFSAAKNGTFPEIFTIENKEKSPSVSLYITSSVMQLAMLLVYFSSNAWNTMLSITGVMVLPAYLASAAFLFKLSKSKTYPKKGSIKAPLAMITGILGVVYSLWLIYAGGLKYLFMALVLLALGIPFYIDAGKKKKNAKTFFAKKEIVGMTFIGLLALTAIFLFSTGRIKI

SEQ ID NO: 1422 - DNA, 1422 bp, Chromobacterium violaceum ATCC 12472
  CDS (1)..(1422): transl_table=11
gtggccgagggcggatcgcccaggctgaagctgggcgcgctgacggcgctggtcgtcggctccatgataggtggcggcatcttctcgttgccgcagaacatggcggcgggcgccggcgctggcgcgatcctgatcggttgggcgatcaccttcgtcggcatgctggcgctggccttcgtgttccagatgcttgcctcgcgcaagcctgaagtgtccggcggcgtgtacggttacgccaaggccggtttcggcgactacatgggcttcaactcggcctggggttactggatttcggcctggatcggcaacgtttcctatttcgtcgtgatgttctcggcgctgggcttctgggtgccggccttcggcgacggcaacacgccgatcgccatcgcctgcgcctcggtgctgctgtgggccctgcacttcctggtgctgcgcggcgtgcacggcgcggccttcatcaacaccatcaccaccatcgccaagctggtgccgctcgcgctgttcatcgcgctgatcgtgttcgccttcaaggtggataccttcagcctggacttctggggcagcgccaagctcggctccatcgtcgaccaggtgaagagcaccatgctggtgacggtatgggtgttcatcggcatcgagggcgcgtcgatgttctccggccgcgccgagagcatgaaggacgtgggcaaggccaccgtgatcggcttcctgctgaccatcgcgctgctggtcgccgtgtcggtgctgtcgctgggcgtgatgacccaggctgagctggccgcgctgaagaacccgtctaccgcctacgtgctgcagaaagccttcggcaccttcggcgccaacctgatgaacgcgggcctggtgatctccgtcggcggcgcgctcttggcctggaccctgctggccgccgaagcgccctacctcgccggcaaggacggcgtgatgcccaaggtgttcggcaccgtcaacggcaacgacaccccggccgcctcgctgtggctgaccaacggcctgatccagctgttcctgctgatcacgttgaagagctcggctggctacctggcgctgctgtcgctggccacctcgatgatcctgatcccctacctgctgtgcgccggctactcctggctggtggcgcaacgcggcgagggctatgcccaaggcgaggcccgcggcaaggagctgggcaccgccatcctggccaccgtttacggcgcgtggctgatctacgccgccggacccaagtacctgttcctgtccatggtgctgtacgcccccggcctgctgttctacctgtgggccaagaaggagcagggccagaaaccgttcaacctgatcgaagccgtgctggccgccatcgtggtggtgctggcggtgatcgcggtctacatgctggccaccggtcagatcggcctgtaa

SEQ ID NO: 1423 - protein, 473 aa, Chromobacterium violaceum ATCC 12472
MAEGGSPRLKLGALTALVVGSMIGGGIFSLPQNMAAGAGAGAILIGWAITFVGMLALAFVFQMLASRKPEVSGGVYGYAKAGFGDYMGFNSAWGYWISAWIGNVSYFVVMFSALGFWVPAFGDGNTPIAIACASVLLWALHFLVLRGVHGAAFINTITTIAKLVPLALFIALIVFAFKVDTFSLDFWGSAKLGSIVDQVKSTMLVTVWVFIGIEGASMFSGRAESMKDVGKATVIGFLLTIALLVAVSVLSLGVMTQAELAALKNPSTAYVLQKAFGTFGANLMNAGLVISVGGALLAWTLLAAEAPYLAGKDGVMPKVFGTVNGNDTPAASLWLTNGLIQLFLLITLKSSAGYLALLSLATSMILIPYLLCAGYSWLVAQRGEGYAQGEARGKELGTAILATVYGAWLIYAAGPKYLFLSMVLYAPGLLFYLWAKKEQGQKPFNLIEAVLAAIVVVLAVIAVYMLATGQIGL

SEQ ID NO: 1424 - DNA, 1392 bp, Photorhabdus luminescens subsp. laumondii TTO1
  CDS (1)..(1392): transl_table=11
ttggaaaagaaactaggtctcacagcgcttactgcgctggtactcagctctatggtcggtgcgggtgttttcagcttaccgcagaatatggctgaaatcgccagcccggcagcgttaatgatcggctggggaataacaagtgtcggtatcctgttcctggcgatcgcactgttactgctctctcgtcttcgtccggatcttgatggagggattttcacttatgccaaagagggctttggtgaactaataggcttctgttctgcctggggatattggttatgcgcagtcgttgccaatgtttcttatctggttatcgtttttgccgccctgagcttctttactgataaagggggcattgtcatctttggtgacggcaacacttggcagtccctattgggagaatctattctgctctggttcgtacattggttagtactccgcggcgttcaaaccgcagccggaatcaacaaattggcgacaatggcaaaattgctgcctttaggtgctttcatcatacttgccgccattgctttcaaaatggacatctttcatttcgactttaaaggcatcgatttaggggttcctgtctggcaacaagtaaaagataccatgttgattaccctttgggttttcattggtattgaaggtgctgttgtggtgtcagccagagcgaaaaaacggacagatgtgggtattgcaaccatgctggctgtcgttgcggcgttaacaatatacatcttggtcaccctactctcccttggattagtaccacgacctgagttagcagcaatgcgcaatccatcaatggccaacctgatggtggggcttgttggctccgccggtgaaatcattattgctgccggattgattgtctccgtctgtggggcttatctgagttggacaatcatggccgcagaagtgccatttatcgctgcccaacacggctcttttccaaaagtatttaaccggcaaaaccgcaataatgcgccatcatcttcattgtggttcactaatggcgctgtacaactctctctggttttgatctggttgagtggaagcaactacaattcattgctgacaattgcatccgaaatgattttagtgccctatttccttgtcggggcatttcttttaaaagtcgcttttgatcgtagcaataaggggttattactcattgctgttggagcatgcatttatggcatatggctgctttatgcatccggtttgatgaatttgctattgtctgttgttctctatgcaccaggtcttattgtttttttgtatgcacgccgccaaaacccgcagaaaaatagcttacatctggctgaaaagctcactattaccgcattgctgataacagcaatccctgccactgggttgctaatcaagtaa

SEQ ID NO: 1425 - protein, 463 aa, Photorhabdus luminescens subsp. laumondii TTO1
MEKKLGLTALTALVLSSMVGAGVFSLPQNMAEIASPAALMIGWGITSVGILFLAIALLLLSRLRPDLDGGIFTYAKEGFGELIGFCSAWGYWLCAVVANVSYLVIVFAALSFFTDKGGIVIFGDGNTWQSLLGESILLWFVHWLVLRGVQTAAGINKLATMAKLLPLGAFIILAAIAFKMDIFHFDFKGIDLGVPVWQQVKDTMLITLWVFIGIEGAVVVSARAKKRTDVGIATMLAVVAALTIYILVTLLSLGLVPRPELAAMRNPSMANLMVGLVGSAGEIIIAAGLIVSVCGAYLSWTIMAAEVPFIAAQHGSFPKVFNRQNRNNAPSSSLWFTNGAVQLSLVLIWLSGSNYNSLLTIASEMILVPYFLVGAFLLKVAFDRSNKGLLLIAVGACIYGIWLLYASGLMNLLLSVVLYAPGLIVFLYARRQNPQKNSLHLAEKLTITALLITAIPATGLLIK

SEQ ID NO: 1426 - DNA, 1416 bp, Bacillus cereus ATCC 10987
  CDS (1)..(1416): transl_table=11
atgggtgaagataagaaactagggttgtttacattaacggctcttgtagtggggtctatgattggcggtggagcctttaatttagcgagtgatatggcaaaaggtgctggtgctggagccattattattggctgggttataacaggaattgggatgattgcacttggattatcttttcaaaatctaactgtaaaacggccagatttagatggtggtatttttagctatgcaaaagcagggtttggtaattttatggggtttaatagtgcgtggggatactggctatctgcttggcttgggaatgtagcttacggcacattattgttttcttcattaggatatttcttcccgatctttgaaggcgggcaaaacgtagcgtccattgttggtgcaagcgtattattatggtgtgttcacatgttaattttacgtggagttcaatcagcagcacttgtgaatttagtaactacaatcgcaaaattagtacctgtatttgtatttattgtcataggaatcttcgcgtttcatattgatacgtttttagatggattttgggggcaaactggttctttttcatggggagcagttggcagccaagttaaaagtacaatgcttgtaactttatgggtatttattggggtagaaggtgctgttgttttatccagtcgagcaaaaaatagaagtgatgtagggaaagcaacggttattggcttaattggtacactcatcatttacattttaatcacattattgtctcttggacttatgcaacaagcagatattgctggtttgaaaaatccggctatggcttatttatttgaaagtgttgttggaaaatggggtgctatctttattaatttaggtttagtcatctctgtattaggtgcttggttagggtggactttgctcgcttctgaaattccatatttagcggctaaagatggagtatttccaaaatggttcgcaaaagaaaataaaaataaggctccagtaaattcattatggataacaaatggtttaattcaaatgttcttgttaacattcgtcgtttctgatcaggcgtataactttgcattctctttagcatcttcagctattttaattccatatgcgttttcagcattttatcaactgaagcatagcttaaagtctgaggaagtagatcgaaataaaaatatagtaattggcttgatagcaagtatttatggcgtttggttagtttatgcagctggtttagagtatctattattaacaatgactttatatgcgccaggtatttttattttttacaatgttcaaaagcaaaagagttcgaagcaaatatttactcgagtggaattagcatcatccgtagcaattggtgctttagcattttttgcgatttatggattaattacaggcagcattactttatag

SEQ ID NO: 1427 - protein, 471 aa, Bacillus cereus ATCC 10987
MGEDKKLGLFTLTALVVGSMIGGGAFNLASDMAKGAGAGAIIIGWVITGIGMIALGLSFQNLTVKRPDLDGGIFSYAKAGFGNFMGFNSAWGYWLSAWLGNVAYGTLLFSSLGYFFPIFEGGQNVASIVGASVLLWCVHMLILRGVQSAALVNLVTTIAKLVPVFVFIVIGIFAFHIDTFLDGFWGQTGSFSWGAVGSQVKSTMLVTLWVFIGVEGAVVLSSRAKNRSDVGKATVIGLIGTLIIYILITLLSLGLMQQADIAGLKNPAMAYLFESVVGKWGAIFINLGLVISVLGAWLGWTLLASEIPYLAAKDGVFPKWFAKENKNKAPVNSLWITNGLIQMFLLTFVVSDQAYNFAFSLASSAILIPYAFSAFYQLKHSLKSEEVDRNKNIVIGLIASIYGVWLVYAAGLEYLLLTMTLYAPGIFIFYNVQKQKSSKQIFTRVELASSVAIGALAFFAIYGLITGSITL

SEQ ID NO: 1428 - DNA, 1416 bp, Bacillus cereus ATCC 10987
  CDS (1)..(1416): transl_table=11
  misc_feature (752)..(752): k is g or t
gtggtacaaatagaaaagaagttaggtttttttccattaattgcattagtagttggaacaatggttggtggcggtgtttttagtttaccgcatgatttagcagtaggagcaaatagtggctctataataattggctggtgtattacagcgatgggaatgattccactcgcgctcgtatatcaaacgttagcaagaaaaaaaccagagcttgagggcggaatttatagttatgcacgtgctggtttcggtgaatatattggatttaacagtgcttggggatactggctagcaggaattttaggaaacgttgcaacaatcatgttactgtttagtacattaggctatttcttcccaatttttaaaggtggaaatagtgttgcgtctatcgtaggagcatcacttttattatggacacttcattttctaattttatttggaattcgtgaagcatctattatgaatgtgattgcaacaatagggaaattggtaccaatcgtattatttattgttgtaatggtaacagcgtttcgctgggatacatttacacatgatttttggggagaaggaactatttcagtttcctctatacttggtcaagtgaagaatacaatgcttgtaactctttgggttttcatcggggttgaaggagcggtagtattatctggaagagcgaaaaatagtcgagacgtcggtaaagcgacagtattaggacttattttagtaatgtctatttatattttaatttctgtctkgtcaatgggagcgatgacaagaggagagctttctgttttagaaacgccgtcaatgggacatgtattagaacatgttgttgggacgtggggcgcagtagcgattaacatcgggttagttgcttcacttgtaggtacattaataggttggtttttacttgtttctgaaatttcccatgtagcaggaaaagatggcgtgtttccgaaagtctttacgaaaacaaataaaaaacaaacgccgcatatggcattatggatctcaaatggcgttgcccaagttatatttataatcgttctgttttcagagtcaacatatcaaattatgtatttcatagcgtcaacatcaattttagtaccatatttattatcagcgttattccaattcaaattagtaattacaaatgaactaaaagatgcaaaagtgaaaaatggttcgctagctttaattgcttcactttactctatatggcttatttatgcagctggtttgaagaatttattgctcgtttcaatcgtatacgggattgggatcattgtttatgtgtatgcaagaaaagaaaaaggaaatcgttgttttactcgtatagagagatatgtaatgtgtgcaattgtcgtagcagctgttacatctctttatatgttattgactggaaatataaaaatgtaa

SEQ ID NO: 1429 - protein, 471 aa, Bacillus cereus ATCC 10987
  misc_feature (251)..(251): The Xaa at location 251 stands for Leu, or Trp.
MVQIEKKLGFFPLIALVVGTMVGGGVFSLPHDLAVGANSGSIIIGWCITAMGMIPLALVYQTLARKKPELEGGIYSYARAGFGEYIGFNSAWGYWLAGILGNVATIMLLFSTLGYFFPIFKGGNSVASIVGASLLLWTLHFLILFGIREASIMNVIATIGKLVPIVLFIVVMVTAFRWDTFTHDFWGEGTISVSSILGQVKNTMLVTLWVFIGVEGAVVLSGRAKNSRDVGKATVLGLILVMSIYILISVXSMGAMTRGELSVLETPSMGHVLEHVVGTWGAVAINIGLVASLVGTLIGWFLLVSEISHVAGKDGVFPKVFTKTNKKQTPHMALWISNGVAQVIFIIVLFSESTYQIMYFIASTSILVPYLLSALFQFKLVITNELKDAKVKNGSLALIASLYSIWLIYAAGLKNLLLVSIVYGIGIIVYVYARKEKGNRCFTRIERYVMCAIVVAAVTSLYMLLTGNIKM

SEQ ID NO: 1430 - DNA, 1416 bp, Bacillus thuringiensis serovar konkukian str. 97-27
  CDS (1)..(1416): transl_table=11
atgggtgaagataagaaattagggttgtttacattaacggctcttgtagttgggtctatgattggcggtggagcctttaatttagcgagtgatatggcaaaaggtgctggtgctggagccattattattggctgggttataacaggaattgggatgattgcacttggattatcttttcaaaatctaactgtaaaacggccagatttagatggtggtatttttagctatgcaaaagcagggtttggtaattttatgggatttaatagtgcgtggggatactggctatctgcttggcttgggaatgtagcttacggtacattattgttttcttcattaggatatttcttcccaatctttgaaggcgggcaaaatgtagcgtccattattggtgcaagcgtattattatggtgtgttcacatgttaattttacgtggagttcaatcagcagcacttgtgaatttagtaactacaatcgcaaaattagtacctgtatttgtatttattgtcataggaatcttcgcgtttcatattgatacgttcttagatggattttgggggcaaactggttctttttcatggggagcagttggcagccaagttaaaagtacgatgcttgtaactttatgggtatttattggggtagaaggagctgttgttttatcaagtcgagcaaaaaatagaagtgatgtagggaaagcaacggttattggcttaattggtacactcatcatttacattttaatcacattattgtctcttggacttatgcaacaagcagatattgcaggtttgaaaaatccggctatggcctatttatttgaaagtgttgttggaaaatggggtgctatctttattaatttaggtttagtcatctctgtattaggtgcttggttaggttggactttgctcgcttctgaaattccatatttagcggctaaagatggagtatttccaaaatggttcgcaaaagaaaataaaaataaagctccagtaaattcattatggataacaaatggtttaattcaaatgttcttgttaacatttgtcgtttctgatcaggcttataactttgcattttctttagcatcttcagctattttaatcccatatgctttttcagcattttatcaactgaagcatagcttaaagtctgaaggagcagatcgaaataaaaatataataattggcttaatagcaagtatttatggcgtgtggttagtttatgcagctggtttagagtatttattattaacaatgactttatatgcgccaggtatttttattttttacaatgttcaaaagcaaaagagttcgaagaaaatatttactcgagtggaattagcatcatccgtagcaattggtgctttagcattctttgcgatttatggattaattacaggcagtattactttataa

SEQ ID NO: 1431 - protein, 471 aa, Bacillus thuringiensis serovar konkukian str. 97-27
MGEDKKLGLFTLTALVVGSMIGGGAFNLASDMAKGAGAGAIIIGWVITGIGMIALGLSFQNLTVKRPDLDGGIFSYAKAGFGNFMGFNSAWGYWLSAWLGNVAYGTLLFSSLGYFFPIFEGGQNVASIIGASVLLWCVHMLILRGVQSAALVNLVTTIAKLVPVFVFIVIGIFAFHIDTFLDGFWGQTGSFSWGAVGSQVKSTMLVTLWVFIGVEGAVVLSSRAKNRSDVGKATVIGLIGTLIIYILITLLSLGLMQQADIAGLKNPAMAYLFESVVGKWGAIFINLGLVISVLGAWLGWTLLASEIPYLAAKDGVFPKWFAKENKNKAPVNSLWITNGLIQMFLLTFVVSDQAYNFAFSLASSAILIPYAFSAFYQLKHSLKSEGADRNKNIIIGLIASIYGVWLVYAAGLEYLLLTMTLYAPGIFIFYNVQKQKSSKKIFTRVELASSVAIGALAFFAIYGLITGSITL

SEQ ID NO: 1432 - DNA, 1428 bp, Bacillus thuringiensis serovar konkukian str. 97-27
  CDS (1)..(1428): transl_table=11
atgacagatggggtggtacaaatagaaaagaagttaggattttttccattaattgcattagtagtcggaacaatggttggtggcggtgtttttagtttaccgcatgatttagcagtaggagcaaatagtggctctatcataattggctggtgtattacagcgatgggaatgattccactcgcgctcgtatatcaaacgttagcaagaaagaaaccagagcttgagggcgggatttatagttatgcacgtgctggtttcggtgaatatattggatttaacagtgcttggggatactggttagcaggaattttaggaaacgttgcaacaatcatgttactgtttagtacattaggttatttcttcccaatttttaagggcggaaatagtgttgcgtctatcgtaggagcatcacttttattatggacacttcattttctaattttatttggcattcgtgaagcatctattatgaatgtgattgcaacgataggaaaattggttccaatcgtattatttattgttgtaatggtaacagcgtttcgctgggatacatttacacaggatttttgggggaaaggaactatttcagtttcctctatactaggtcaagtgaaaaatacaatgcttgtaactctttgggttttcatcggggttgaaggagcggtagtattatctggaagagcaaaaaatagtcgagatgtcgggaaagcgacagtattaggacttattttagtaatgtctatttatattttaatttctgtcttgtcaatgggagcgatgacaagaggagaactttctgttttagaaactccgtcaatgggacatgtattagaacatgttgttgggacatggggggcagttgcgataaacatcgggttagttgcttcacttgtaggtacattaataggctggtttttacttgtttctgaaatttcccacgtagcaggaaaagatggcgtgtttccgaaagtctttacgaaaacaaataaaaaacaaacgccgcatatggcattatggatctcaaatggcgttgcccaagttatatttataatcgttctgttttcagaatcaacatatcaaattatgtatttcatagcgtcaacatcaattttagtaccatatttattatcagcgttattccaatttaaattagtaattacaaatgaactaaaagatgcaaaagtcaaaaatggttcgctagctttaattgcttcactttactctgtatggcttatttatgcagctggtttgaagaatttattgctcgtttcaatcgtatacgggattggaatcattgtttatgtgtatgcaagaaaagaaaaaggaaatcgttgttttactggtatagagagatatgtaatgtgggcaattgtagtagcagctgttacatctctatatatgttattgactggaaatataaaaatgtaa

SEQ ID NO: 1433 - protein, 475 aa, Bacillus thuringiensis serovar konkukian str. 97-27
MTDGVVQIEKKLGFFPLIALVVGTMVGGGVFSLPHDLAVGANSGSIIIGWCITAMGMIPLALVYQTLARKKPELEGGIYSYARAGFGEYIGFNSAWGYWLAGILGNVATIMLLFSTLGYFFPIFKGGNSVASIVGASLLLWTLHFLILFGIREASIMNVIATIGKLVPIVLFIVVMVTAFRWDTFTQDFWGKGTISVSSILGQVKNTMLVTLWVFIGVEGAVVLSGRAKNSRDVGKATVLGLILVMSIYILISVLSMGAMTRGELSVLETPSMGHVLEHVVGTWGAVAINIGLVASLVGTLIGWFLLVSEISHVAGKDGVFPKVFTKTNKKQTPHMALWISNGVAQVIFIIVLFSESTYQIMYFIASTSILVPYLLSALFQFKLVITNELKDAKVKNGSLALIASLYSVWLIYAAGLKNLLLVSIVYGIGIIVYVYARKEKGNRCFTGIERYVMWAIVVAAVTSLYMLLTGNIKM

SEQ ID NO: 1434 - DNA, 1437 bp, Staphylococcus aureus subsp. aureus MRSA252
  CDS (1)..(1437): transl_table=11
atgaatatgaacgaatcaggagataacaaactcagtaaatcttctttaattggactagttataggatccatgattggtggcggtgcgttcaatataatgtctgatatgggtggtaaagccggtggattagccattattattggttggattattacagctataggaatgatttcattagcgttcgtatttcaaaatttaaccaatgaacggccggagctagacggtggtatttatagttatgctcaagcaggatttggcgattttgtaggctttatcagtgcttggggatattggttctcagcatttttaggcaatgttgcctatgcaacactattgatgtcagcagttggtaactttttcccgatttttaaaggaggcaacacattaccaagtattattgtcgcctcgttactactctggggtgtgcatttcctaattttaaaaggtgttgaaacagcagcctttatcaatagtattgttactgttgcaaagttaataccgattttacttgtaatcatatgcatgataattgcattcaattttgacacttttaaaacaggctttttcggtatgacgtcagagggtgtattgccatttagttgggcgagcacaatgagccaagttaaaagtacgatgctagtgacagtttgggtgtttatcggtatcgaaggtgcagtaattttttctagcagagctaaaaataaaaaagatgtaggtagtgccacggttataggacttatatcagttttaattatctatttcttattaactgtattagctcaaggcgtgattttgcaaaatcatatttctcaattagattcgccaagtatggcacaggtgcttgcatctattgtaggtggttggggatctacacttgtaaatattggtttaattatttcggtactaggtgcatggttaggatggacattgcttgctggtgaattacctttcattgttgcaaaagatggattatttccaaaatggtttgctaaagaaaataaaaatggagcacctgtaaatgcactgcttattaccaatatattagtacaattatttttaataagtatgctatttacacagagtgcgtatcaatttgcattttcactagcatcaagtgctattttatacccttacatgttcagtgcattttaccaagttaaatacactttagagcatcgacagcaagcaactactaaacaatggacgattggtatcatagcctcaatttatgctatatggcttatatatgcagcaggtatcaattacttattactgacgatgttactttatattccagctcttcttgtttattcaatcgttcaaaagaataatcagacacgtttgattaaatcagactatattctttttatgattattatcgtacttgcagttatcgggttaattaagttattgatgggaacgataaatgttttttaa

SEQ ID NO: 1435 - protein, 478 aa, Staphylococcus aureus subsp. aureus MRSA252
MNMNESGDNKLSKSSLIGLVIGSMIGGGAFNIMSDMGGKAGGLAIIIGWIITAIGMISLAFVFQNLTNERPELDGGIYSYAQAGFGDFVGFISAWGYWFSAFLGNVAYATLLMSAVGNFFPIFKGGNTLPSIIVASLLLWGVHFLILKGVETAAFINSIVTVAKLIPILLVIICMIIAFNFDTFKTGFFGMTSEGVLPFSWASTMSQVKSTMLVTVWVFIGIEGAVIFSSRAKNKKDVGSATVIGLISVLIIYFLLTVLAQGVILQNHISQLDSPSMAQVLASIVGGWGSTLVNIGLIISVLGAWLGWTLLAGELPFIVAKDGLFPKWFAKENKNGAPVNALLITNILVQLFLISMLFTQSAYQFAFSLASSAILYPYMFSAFYQVKYTLEHRQQATTKQWTIGIIASIYAIWLIYAAGINYLLLTMLLYIPALLVYSIVQKNNQTRLIKSDYILFMIIIVLAVIGLIKLLMGTINVF

SEQ ID NO: 1436 - DNA, 1437 bp, Staphylococcus aureus subsp. aureus MSSA476
  CDS (1)..(1437): transl_table=11
atgaatatgaacgaatcaggagataacaaactcagtaaatcttctttaattggactagttataggatccatgattggtggcggtgcgttcaatataatgtctgatatgggcggtaaagccggtggattagccattattattggttggattattacagctataggaatgatttcattagcgttcgtatttcaaaatttaaccaatgaacggccggagctagacggtggtatttatagttatgctcaagcaggatttggcgattttgtaggatttatcagtgcttggggatattggttctcagcgtttttaggcaatgttgcctatgcaacactattgatgtcagcagtaggtaactttttcccgatttttaaaggaggcaacacattaccaagtattattgtcgcctcgttactactctggggtgtccatttcttgattttaaaaggcgttgaaacagcagcatttatcaatagtattgttactgttgcaaagttaataccgattttacttgtaatcatatgcatgataattgcattcaattttgacacttttaaaacaggctttttcggtatgacgtcagagggtgtattgccatttagttgggcgagcacaatgagccaagttaaaagtacgatgctagtgacagtttgggtgtttatcggtatcgagggtgcagtaattttttctagtagagctaaaaataaaaaagatgtaggtagtgccacggttataggacttatatcagttttaattatctatttcttattaactgtattagctcaaggcgtgattttgcaaaatcatatttctcaattagattcgccaagtatggcacaggtgcttgcaactattgtaggtggttggggatctacacttgtaaatattggtttaattatttcggtactaggtgcatggttaggatggacattgcttgctggtgaattacctttcattgttgcaaaagatggattatttccaaagtggtttgctaaagaaaataaaaatggagcacctgtaaatgcactgcttattaccaatatattagtacaattatttttaataagtatgctatttacacagagtgcgtatcaatttgcattttcactagcatcaagtgctattttatacccttacatgttcagtgcattttaccaagttaaatacactttagagcatcgacagcaagcaactactaagcaatggacgattggcatcatagcctcaatttatgctatatggcttatatatgcagcaggtatcaattacttattattgacgatgttactttatattccagctcttcttgtttattcaatcgttcaaaagaataatcagacacgtttgattaaatcagactatattctttttatgattattatcgtacttgcagttatcggattaattaagttattgatgggaacgataaatgttttttaa

SEQ ID NO: 1437 - protein, 478 aa, Staphylococcus aureus subsp. aureus MSSA476
MNMNESGDNKLSKSSLIGLVIGSMIGGGAFNIMSDMGGKAGGLAIIIGWIITAIGMISLAFVFQNLTNERPELDGGIYSYAQAGFGDFVGFISAWGYWFSAFLGNVAYATLLMSAVGNFFPIFKGGNTLPSIIVASLLLWGVHFLILKGVETAAFINSIVTVAKLIPILLVIICMIIAFNFDTFKTGFFGMTSEGVLPFSWASTMSQVKSTMLVTVWVFIGIEGAVIFSSRAKNKKDVGSATVIGLISVLIIYFLLTVLAQGVILQNHISQLDSPSMAQVLATIVGGWGSTLVNIGLIISVLGAWLGWTLLAGELPFIVAKDGLFPKWFAKENKNGAPVNALLITNILVQLFLISMLFTQSAYQFAFSLASSAILYPYMFSAFYQVKYTLEHRQQATTKQWTIGIIASIYAIWLIYAAGINYLLLTMLLYIPALLVYSIVQKNNQTRLIKSDYILFMIIIVLAVIGLIKLLMGTINVF

SEQ ID NO: 1438 - DNA, 1341 bp, Acinetobacter sp. ADP1
  CDS (1)..(1341): transl_table=11
atgtcaacttctaaaattggcttgctatccttaaccgcactcgtgtttagctcgatggtcggttctggtgtgtttagtttgccacaaaatatggctgctgtagccaacgggtcagccttgctttttgcatggctgattacaggcattggtattatttttctggccttatccctgctttatttaacacgacagcgaccagatcttgacggtggaatttataactacgcccgtgaaggatttggtgatctgattggtttttgttccgcctggggttactggttatgtaccacaatcggtattgtcggctatgtggtcatcgcattttcagccgtaggtatgtttacagatacacctgaacacatctactttggcgaaggcaatacactttacgctctaattgggtcatctatatttgtctggctgatacactggctggtcagtcgaggtatcaaagaagctgcactggtcaatcttatggcaaccattgccaagattgttccattggtcgtttttattgttttttcatttgtcgcattcaaactcgaattattcaaactgaatttcctggatacttcccttcaaatgcccgtatggcaacaagtacgtgatgtcatgctgattacactctgggtatttacaggaattgaaggtgcggttgtactttcctctcgtgctaaaaagcgaaatgacattggaaaagcaacgctgcttggcgtattactggcactggctttttatgtaatggtgacagtactggcttatggtatcaatactcgtagtgaaatcgcaggtatgcataatccgtcaatggcaactattttagggcaactgattggtattcctggcactattgtgattacactgggtttgattatttcggtttcatcgtcatatttaagctggacgctctttgccacagagattccttatctggctgcaaaaaatggggcttttcctaaaatttttctgaaaaccaaccagaataatgtgccaatttcatcgctatggctgacttctatcgtggtgcagatttcactcattgcggtatgttttttcaataaaaactatactcagttattgttaatctcttcagttatgattttattgccatattttctggtgtctgcattttacttaaaagagtctactcgccataaacgtacaaaacatatcgtgatcgcaagtattgcaactgtatatgcaatctggttactgtacgccgcaggactttcattacttctgctatctggtattttttatgctttaggattattgatttttttctacagccgcttctcggtgagaggttcaggattaaacaaagaaaattctgcttcctga

SEQ ID NO: 1439 - protein, 446 aa, Acinetobacter sp. ADP1
MSTSKIGLLSLTALVFSSMVGSGVFSLPQNMAAVANGSALLFAWLITGIGIIFLALSLLYLTRQRPDLDGGIYNYAREGFGDLIGFCSAWGYWLCTTIGIVGYVVIAFSAVGMFTDTPEHIYFGEGNTLYALIGSSIFVWLIHWLVSRGIKEAALVNLMATIAKIVPLVVFIVFSFVAFKLELFKLNFLDTSLQMPVWQQVRDVMLITLWVFTGIEGAVVLSSRAKKRNDIGKATLLGVLLALAFYVMVTVLAYGINTRSEIAGMHNPSMATILGQLIGIPGTIVITLGLIISVSSSYLSWTLFATEIPYLAAKNGAFPKIFLKTNQNNVPISSLWLTSIVVQISLIAVCFFNKNYTQLLLISSVMILLPYFLVSAFYLKESTRHKRTKHIVIASIATVYAIWLLYAAGLSLLLLSGIFYALGLLIFFYSRFSVRGSGLNKENSAS

SEQ ID NO: 1440 - DNA, 1482 bp, Propionibacterium acnes KPA171202
  CDS (1)..(1482): transl_table=11
atggctgagcaagtcgttggacaggcgtctacagaagtatccatgggtgaagacgtcaatgttgggaagctgtcattccccgcaatgctttctcttgtcgtcggttccatgatcggcggcggtattttttcgcttccgcagaatattgctgctgccgctagtccaggtcctatggtgattggttggacgatcaccgggatcggaatgatctgtttggcgatggtctatcagaagttggctatccgtcgtcctgatctggataacggcatctatgcctatgccaaggcgggatttggtgatttcatcgggttcaactcggcgtggggctattggctctctgccctcattggcaacgtcgggtatttggtgctgcttttctcgaccgttggcaagtttgttcctgctttcgcgggtggtaacaccgtgtgggcggtgcttgcggcgtcagttctgctgtggttgacccacgctctcgttctggctggggttcgtactgctgcttttgtcaacacgatcgcgacaattgccaagattgtgccgttgataacattcattgccatttgtgctgttgcgttcgatgttggtgtgtttaccgaggacttctgggggagccacgcgggcttgggcagtgtctttgcccagaccaagagcatgatgctcgtcaccgtgtgggtgtttattgggatcgagggtgcgtcgatctactcgaagcgtgctcgcaaacgttctgatgtgggcaaggcgactgttggtggttttctcttcgtcctggttctcctcatcggtgtcaacctcctgagcatggggatcatgcatcgggccaagctggccggcttgcccgacgcgtctatgggtgatgttctgtcctctgtcgtcgggccgtggggctcggtgcttgtcagtgctggtgtcatcatttccctgcttggggctctactggcctggatcctactgtgcggtgagacgatgcaggtgccgggtgaggacggcaccatgccgaaactgttcggacggatcaacaaacatgaggctccagctcccgctttgtggatcaccaacatcgtctcccagatatgccttgtcatgacggtgttgtgggacggtgcttacttggcgatggcgaccctggctgccgccctcatcctggtgccgtacctgctgtcagccgcattcgccctgaagatggtgatcaagggcgaaacctatgagaacggtccccgatcacagcgagtgcgtgatgccgtggtcgcaactgtcgcaaccttgtacggcatctggctcgtcgttgccgcaggcgcggatgctctcatgcttgcggccctgctctacttgcctggtgctgcagtgttcgtctgggccaagcgtgagcagcgggccaaacggattttcaaaccctacgagatcggcgttcttgtcctgctggcgttgatttccgtggtatccatcatttccatagttaccgggaggctttccttgacgtga

SEQ ID NO: 1441 - protein, 493 aa, Propionibacterium acnes KPA171202
MAEQVVGQASTEVSMGEDVNVGKLSFPAMLSLVVGSMIGGGIFSLPQNIAAAASPGPMVIGWTITGIGMICLAMVYQKLAIRRPDLDNGIYAYAKAGFGDFIGFNSAWGYWLSALIGNVGYLVLLFSTVGKFVPAFAGGNTVWAVLAASVLLWLTHALVLAGVRTAAFVNTIATIAKIVPLITFIAICAVAFDVGVFTEDFWGSHAGLGSVFAQTKSMMLVTVWVFIGIEGASIYSKRARKRSDVGKATVGGFLFVLVLLIGVNLLSMGIMHRAKLAGLPDASMGDVLSSVVGPWGSVLVSAGVIISLLGALLAWILLCGETMQVPGEDGTMPKLFGRINKHEAPAPALWITNIVSQICLVMTVLWDGAYLAMATLAAALILVPYLLSAAFALKMVIKGETYENGPRSQRVRDAVVATVATLYGIWLVVAAGADALMLAALLYLPGAAVFVWAKREQRAKRIFKPYEIGVLVLLALISVVSIISIVTGRLSLT

SEQ ID NO: 1442 - DNA, 1407 bp, Bacillus licheniformis ATCC 14580
  CDS (1)..(1407): transl_table=11
atggcggaagaaaaaaaacttgggctgtttgcgctcatcgcgcttgtcatcggatcgatgatcggcgggggcgccttcaaccttgcaagcgacatggcttcaggggcgggggcgggagccattttaatcggctggatcatcaccggagtcggcatgattgccctggcattctctttccaaaacttgacgacgaaaaggcctgatttagacggcggtattttcacttatgcccgggaaggattcggccatttcatgggctttaacagcggctgggggtactggttcgcagcccttctcggcaatgtcgcatatggaacgctgctgttcagcgcaatcggatatttcatccctgcgtttggagacggacaaaacatcgcatcaattatcggtgcaagcgtgatcctctggtgcgtgcactttttgatcctccgcggtgttcagtccgctgccatgatcaacttaattacgaccatttcaaaacttgtaccgattttcgctttcattatcgccattatctttgtgtttcatcttgatttatttacgaacgatttctggggaaaagggctgtcgctcggttccatcggaacacaggtcaagagcacgatgctggtgaccgtctgggtgtttaccggaattgaaggggccgtcttattttcaagccgggccaagaaatcaagcgatgttggcaaagctactgtcatcggcttgatcagcgtactcgtgatttacgtcatgattacgatgctgtcgctcggcgtcatgaatcagcaaaacttggccgagcttccgaatccttcaatggccgcgatcatggagcatatcgtcggcaaatggggagccgtgctcatcaacctgggattgatcatttccgtattgggcgcctggctggcctggacattattcgcgggcgaactcccgctgatcgcggcacgcgaaggggtcttcccgaaatggttcggcaaagaaaataaaaacggtgcgccgacaaatgcgctgactttgacaaacgccattatccagctgtttttgctgacgtttctcatttcagatgcggcctaccagtttgcattttccttggcttcctcggccatcttgatcccgtatctgttttccgggctttatcagcttaaatacagctggctgcacaaagagcctaaccggggcaaaaatctcatcatcggcatcatcgcaagcatatacggcgtctggctcgtatatgccgcgggacttgattacctgcttttgaccatgattttatacgctcccggcattctcgtattccgggctgtgcgcaaaggaaaagaaggcccagtcttcaataaagccgagcttttgattgccgccctgattcttgtattggccgtgatcgccgtgatcagactggcttcgggaagcatttcaatttaa

SEQ ID NO: 1443 - protein, 468 aa, Bacillus licheniformis ATCC 14580
MAEEKKLGLFALIALVIGSMIGGGAFNLASDMASGAGAGAILIGWIITGVGMIALAFSFQNLTTKRPDLDGGIFTYAREGFGHFMGFNSGWGYWFAALLGNVAYGTLLFSAIGYFIPAFGDGQNIASIIGASVILWCVHFLILRGVQSAAMINLITTISKLVPIFAFIIAIIFVFHLDLFTNDFWGKGLSLGSIGTQVKSTMLVTVWVFTGIEGAVLFSSRAKKSSDVGKATVIGLISVLVIYVMITMLSLGVMNQQNLAELPNPSMAAIMEHIVGKWGAVLINLGLIISVLGAWLAWTLFAGELPLIAAREGVFPKWFGKENKNGAPTNALTLTNAIIQLFLLTFLISDAAYQFAFSLASSAILIPYLFSGLYQLKYSWLHKEPNRGKNLIIGIIASIYGVWLVYAAGLDYLLLTMILYAPGILVFRAVRKGKEGPVFNKAELLIAALILVLAVIAVIRLASGSISI

SEQ ID NO: 1444 - DNA, 1410 bp, Mannheimia succiniciproducens MBEL55E
  CDS (1)..(1410): transl_table=11
atgtcaaataaaaaaatcggacttctctctcttaccgcattagtgcttagttcaatgatcggatccggtattttcagcctgccgcaaaatatggccgccgtagccggtgcggaagcgatttctatcggctggctgattaccgggatcggaatcatcttcctcggtttatcctttttctttatctctcgccttcgccccgagctggacggcggaatctatacctacgcccgtgaaggtttcggcgatttgatgggatttatgtccgcttggggatattggctttgtgcgacaatcgggatcgtcggctatttaaccgtcgcctttgaaggcttgggcgtattcaccgattctgaaaataccgttattttcggacagggcaataccgttgcttcgtttatcggctcctccattatcgtttggttagtgcatgcgctgattgccggcgggataaaagaagcggcttcggtaaatctggtggcgacttttgtaaaagttgctcctttagtactctttatcttacttggtttttggttctttgatacggatattttcaattccgacgtaaaagcaagtgcactgaataacaatataggcgatcaggttaaagacaccatgcttatcacactttgggtcttcaccggggtagaaggcgcttccgtgctttccgctcatgcaaaaaaacggactgatgtggggctggcgacggttttaggtattcttatcgctctggcgttatatgttgccatcaccattcttgcgctcggtattctcccccgcgaaactatcgccgagatgccgaatccgtcaatgggtccgctgcttgacgccatgatgggaccgacgggcaaagttattatcaccgcctgtctgattgtctccgtgctggcttcttatatcagctggacaatgtattcggcggaaattccataccgaggagcccaaaagggtgcgttcccgaaaattttggataaattaaacgaaaacagtacgccgattaattcgttatggttcaccggatttattgttcaattctgtttaattctggtatttgtttttgaacaaagctataacaccttattgcttatctcaacttcaatgatcctgatcccatatttcttaatcggtgcctatttatttaaattagccatacaaaccaactccgcctggtatataaaattaaccggctttatggcttcaatttacggtttatggattgtttacgccgccggcttacaatatttgttgttatccgtggtgctgtatgtgccgggtattttgctctttttatattcccatcgcaaattccacggcaaatttaaattaaaaggatttgaacaaacaattctcgcaatgatttttatacttttctgctatgcggtttatcgcttgccggaattgcttgccgcctga

SEQ ID NO: 1445 - protein, 469 aa, Mannheimia succiniciproducens MBEL55E
MSNKKIGLLSLTALVLSSMIGSGIFSLPQNMAAVAGAEAISIGWLITGIGIIFLGLSFFFISRLRPELDGGIYTYAREGFGDLMGFMSAWGYWLCATIGIVGYLTVAFEGLGVFTDSENTVIFGQGNTVASFIGSSIIVWLVHALIAGGIKEAASVNLVATFVKVAPLVLFILLGFWFFDTDIFNSDVKASALNNNIGDQVKDTMLITLWVFTGVEGASVLSAHAKKRTDVGLATVLGILIALALYVAITILALGILPRETIAEMPNPSMGPLLDAMMGPTGKVIITACLIVSVLASYISWTMYSAEIPYRGAQKGAFPKILDKLNENSTPINSLWFTGFIVQFCLILVFVFEQSYNTLLLISTSMILIPYFLIGAYLFKLAIQTNSAWYIKLTGFMASIYGLWIVYAAGLQYLLLSVVLYVPGILLFLYSHRKFHGKFKLKGFEQTILAMIFILFCYAVYRLPELLAA

SEQ ID NO: 1446 - DNA, 1461 bp, Burkholderia mallei ATCC 23344
  CDS (1)..(1461): transl_table=11
atggctgaagtcacacaagaacaaggcgtcgcggcgaaatccgccgcgaacaagctgcggctcggcgcgctcaccgcgctcgtcgtcggctcgatgatcggcggcggcatcttctcgctgccgcagaacatggcggccaccgccgaagccggcgcgatcctgatcggctgggcgatcaccgcgatcggcatgctcacgctcgcgttcgtgttccagacgctcgcgaaccgcaagccgcagctcgacggcggcgtgtacgcctatgcgcaggcgggcttcggcgactacatgggcttctcgtccgcgtggggctactggatcagcgcatggctcggcaacgtcggctacttcgtgctgctgttctcgacgctcggctatttcttccccgtattcggcgaaggcaacacgcccgccgcgatcgcgggcgcatcggtgctgctgtgggccgtgcactttctcgtgctgcgcggcatccgggaggcggcgttcgtcaatctcgtcaccaccgtcgcgaagatcgtcccgctcgtcgtcttcatcctgatcggcttcttcgcgttcaagctcgacgtgttccgcaccgacatctggggccgcgcgaatccgtcgctcggctcggtgatgaaccaggtccgcaacatgatgctcgtcaccgtctgggtgttcatcggcatcgaaggcgcgagcatcttctcggcgcgcgcggaaaagcgcagcgacgtcggccgcgcgaccgtgatcggcttcgtcggcgtgctgctcgcgctcgtgctcgtcaacgtgctgtcgctcggcatcatgacgcagccgcagctcgcgaagctgcagaacccgtcgatggcggccgtgctcgagcacgtggtgggccactggggcgcggtgctcatcagcgtcggcctcgtcgtctcgctcgcgggcgcgctgctgtcctgggtgctgctctgcgcggaaatcatgttctcggccgcgaaggaccgcacgatgcccgcgttccttcgcaaggagaacgcgaaccatgtgccggcgaacgcgctctggctcacgaacgcgatggtccaggtgttcctgctgatcacgctcttctcgcaaagcacctatctgtcgctgatctatctggcgacgtcgatgatcctgatcccgtacttctggtcggccgcctacgcgctgctcatcgccgtgcgcggcgagacctacgagggcgacgcgcgcgcgcgccgcaaggacctcttcgtcgccgcgctcgccgtgctctacgcggtgtggctgctgtacgcgggcggcctcaagtatctgctgctgtccgcccttctctacgcgccgggcgcgctcttcttcgcgaaggcgaagcgcgagctcggcaagccggtcttcaccgccgccgaaaaactgatcttcgcggcagcggccgccgccgcactcgccgcggcctacgcgctccacagcgggctcatcacactttga

SEQ ID NO: 1447 - protein, 486 aa, Burkholderia mallei ATCC 23344
MAEVTQEQGVAAKSAANKLRLGALTALVVGSMIGGGIFSLPQNMAATAEAGAILIGWAITAIGMLTLAFVFQTLANRKPQLDGGVYAYAQAGFGDYMGFSSAWGYWISAWLGNVGYFVLLFSTLGYFFPVFGEGNTPAAIAGASVLLWAVHFLVLRGIREAAFVNLVTTVAKIVPLVVFILIGFFAFKLDVFRTDIWGRANPSLGSVMNQVRNMMLVTVWVFIGIEGASIFSARAEKRSDVGRATVIGFVGVLLALVLVNVLSLGIMTQPQLAKLQNPSMAAVLEHVVGHWGAVLISVGLVVSLAGALLSWVLLCAEIMFSAAKDRTMPAFLRKENANHVPANALWLTNAMVQVFLLITLFSQSTYLSLIYLATSMILIPYFWSAAYALLIAVRGETYEGDARARRKDLFVAALAVLYAVWLLYAGGLKYLLLSALLYAPGALFFAKAKRELGKPVFTAAEKLIFAAAAAAALAAAYALHSGLITL

SEQ ID NO: 1448 - DNA, 1356 bp, Burkholderia mallei ATCC 23344
  CDS (1)..(1356): transl_table=11
atgaagcattccgtcaggcatcctttccacccgtcgacaccgctgcccgcgagcgcctccgcgccgctgcgggcggccgcgccgcgccagttgccgtttgcgctgctcacggcgctcgtgatcggctcgatgatcggcagcggcatcttctcgctgccgcagaacatggcatccggcgcgggcgccggcgcgatcgtgatcggctgggcgatcacgggcgtcggcatgctgatgctcgcactcgtctaccagacgctcgcgcatcgcaagcccgagctcgacaacggcgtctacgcgtacgcgcacgcgagcgccggcgacttcgtcggcttcaactccgcatggggctactgggtcagcgcgtggatcggcaacgtcggctatttggtgatcgtgttcggcacgctcggctacgcgtttccggcgttcggcgacggcaacacgcgcgccgcgctcgcgttccagccgcaccgcttcacgaccgacttctggggcaacgtccacctgcccggcgtgctcgaccaggtgaagagcacgatgctgatcaccgtctgggtgttcatcggcatcgagggcgcgagcgtctattcggcccgcgcgaagaaccgcgacgacgtcggccgcgcgaccatcgtgggcttcgtcgtcgtgctgctgttgctgatggccgtctcgctgctctcgctcgggatcgtgtcgcagcccgagctcgcggcgatgaagaatccgtcgatggcgggcgtgctcgaaaaggcgatcggccgcacgggcgtcgcgatcgcgggcgtcgggctgctggtgtcggtgggcggcgcgctgctcgcatggacgctgctcgccgccgaggcgatgttcacgccggccaaggacggcgtgatgccggcgttcctgtcgcgcgagaacgcgcacggcgtgcccgccaacgcgctgtgggcgaccaacggcctcgtgcagctgttcctgctcgtcacgctcgtgtcgaacgcgacgtatcaggcgctgatctcgctcgcgacatcgatgatcctcgtgccgtacctgttctccgccgtctatgcgctcgtcatcgcgatcaagggcgaaggctatgcgcccggcgaggcggtgcgcgtgcgcgacgcgacgatcggcgcggtcgcgaccgtctactgcggctggctgctgtatgcggcgggcccgaaatacctgctgctgagcgccctcctctatgcgccgggcgcgctgctgtacgcatgggcgaagcgcgagcgcggcgagcggccgttcaagccgttcgaagcggcgatcctgatcgcgctcgtcgcgttcgcgtcgctcgcgggctggctcgtcgcggcgggccggatcagcctgtaa

SEQ ID NO: 1449 - protein, 451 aa, Burkholderia mallei ATCC 23344
MKHSVRHPFHPSTPLPASASAPLRAAAPRQLPFALLTALVIGSMIGSGIFSLPQNMASGAGAGAIVIGWAITGVGMLMLALVYQTLAHRKPELDNGVYAYAHASAGDFVGFNSAWGYWVSAWIGNVGYLVIVFGTLGYAFPAFGDGNTRAALAFQPHRFTTDFWGNVHLPGVLDQVKSTMLITVWVFIGIEGASVYSARAKNRDDVGRATIVGFVVVLLLLMAVSLLSLGIVSQPELAAMKNPSMAGVLEKAIGRTGVAIAGVGLLVSVGGALLAWTLLAAEAMFTPAKDGVMPAFLSRENAHGVPANALWATNGLVQLFLLVTLVSNATYQALISLATSMILVPYLFSAVYALVIAIKGEGYAPGEAVRVRDATIGAVATVYCGWLLYAAGPKYLLLSALLYAPGALLYAWAKRERGERPFKPFEAAILIALVAFASLAGWLVAAGRISL

SEQ ID NO: 1450 - DNA, 1491 bp, Burkholderia pseudomallei K96243
  CDS (1)..(1491): transl_table=11
atgaagcattccgtcaggcatcctttccacccgtcgacaccgctgcccgcgcgcgcctccgcgccgctgcgggcggccgcgccgcgccagttgccgtttgcgctgctcacggcgctcgtgatcggctcgatgatcggcagcggcatcttctcgctgccgcagaacatggcatccggcgcgggcgccggcgcgatcgtgatcggctgggcgatcacgggcgtcggcatgctgatgctcgcactcgtctaccagacgctcgcgcatcgcaagcccgagctcgacaacggcgtctacgcgtacgcgcacgcgagcgccggcgacttcgtcggcttcaactccgcatggggctactgggtcagcgcgtggatcggcaacgtcggctatttggtgatcgtgttcggcacgctcggctacgcgtttccggcgttcggcgacggcaacacgcgcgccgcggtgatcggcgcgtcgatcgtgctgtggatcatgcacgcggtgatcctgcgcggcgtgcgcggcgcggcgatcctcaacgcgctgacgacgatcgcgaagatcgtgccgctcgtgctgttcgtcgcgctcgccgcgctcgcgttccagccgcaccgcttcacgaccgatttctggggcaacgtccacctggccggcgtgctcgaccaggtgaagagcacgatgctgatcaccgtctgggtgttcatcggcatcgagggcgcgagcgtctattcggcccgcgcgaagaaccgcgacgacgtcggccgcgcgaccatcgtgggcttcgtcgtcgtgctgctgttgctgatggccgtctcgctgctctcgctcgggatcgtgtcgcagcccgagctcgcggcgatgaagaatccgtcgatggcgggcgtgctcgaaaaggcgatcggccgcacgggcgtcgcgatcgcgggcgtcgggctgctggtgtcggtgggcggcgcgctgctcgcatggacgctgctcgccgccgaggcgatgttcacgccggccaaggacggcgtgatgccggcgttcctgtcgcgcgagaacgcgcacggcgtgcccgccaacgcgctgtgggcgaccaacggcctcgtgcagctgttcctgctcgtcacgctcgtgtcgaacgcgacgtatcaggcgctgatctcgctcgcgacatcgatgatcctcgtgccgtacctgttctccgccgtctatgcgctcgtcatcgcgatcaagggcgaaggctatgcgcccggcgaggcggtgcgcgtgcgcgacgcgacgatcggcgcggtcgcgaccgtctactgcggctggctgctgtatgcggcgggcccgaaatacctgctgctgagcgccctcctctatgcgccgggcgcgctgctgtacgcatgggcgaagcgcgagcgcggcgagcggccgttcaagccgttcgaagcggcgatcctgatcgcgctcgtcgcgttcgcgtcgctcgcgggctggctcgtcgcggcgggccggatcagcctgtaa

SEQ ID NO: 1451 - protein, 496 aa, Burkholderia pseudomallei K96243
MKHSVRHPFHPSTPLPARASAPLRAAAPRQLPFALLTALVIGSMIGSGIFSLPQNMASGAGAGAIVIGWAITGVGMLMLALVYQTLAHRKPELDNGVYAYAHASAGDFVGFNSAWGYWVSAWIGNVGYLVIVFGTLGYAFPAFGDGNTRAAVIGASIVLWIMHAVILRGVRGAAILNALTTIAKIVPLVLFVALAALAFQPHRFTTDFWGNVHLAGVLDQVKSTMLITVWVFIGIEGASVYSARAKNRDDVGRATIVGFVVVLLLLMAVSLLSLGIVSQPELAAMKNPSMAGVLEKAIGRTGVAIAGVGLLVSVGGALLAWTLLAAEAMFTPAKDGVMPAFLSRENAHGVPANALWATNGLVQLFLLVTLVSNATYQALISLATSMILVPYLFSAVYALVIAIKGEGYAPGEAVRVRDATIGAVATVYCGWLLYAAGPKYLLLSALLYAPGALLYAWAKRERGERPFKPFEAAILIALVAFASLAGWLVAAGRISL

SEQ ID NO: 1452 - DNA, 1404 bp, Staphylococcus epidermidis RP62A
  CDS (1)..(1404): transl_table=11
atgaatgacacaggagataaaaaattaagtcgaacatcattaatcggtcttgttataggttcgatgattggtggcggtgctttcaatattcaatctgatatgggaggccacgctggaggattagcaattataattggatggttgattactgctataggaatgatttcattagcacttgtctttcaaaacctaactaatgaacgatctgatttagatggtggtatttatagttatgctcaagcaggttttggtgattttatagggtttgcaagtgcttggggatattggttctcagcttttttaggtaatgtcgcatatgcaacgttattaatgtcttctatagggaacttctttccaatatttaaagggggcaacacatttcctagtatcatagtggcatcaatattattgtggagtgtgcactttttaatattaaaaggagttgagacggctactttaatcaatagtattgtcactattacaaaattaattcctatcttattagtgattatatgtatgattgtagcctttaattttaatacattcaagataggtttctttggaatggatggatatggatcattatcatttcatttcgctaatacgatgtcacaagttaaaagtacgatgttagtgacagtttgggtatttattggtattgaaggtgctgttgtattctccggaagagctaaaaataaaaaagatgttggaactgccactgttatcggacttatttcagtattgctcatttacttcttgctgactgtattagcacaaggtattgtaattcaaaatcatatttctaaacttgaggcaccatcaatggcacaaattttagcttatattgttggtgattggggagcaacatttgtcaatattggtcttattatttcagtattaggtgcatggctaggttggacattacttgccggagagttgccttttattgtagctaaagatggtttgtttcctaagtggtttgcaaaagaaaataaaaatggggcacctatgaacgccttattcattactaatgtgttagttcaaatattccttattagtatgctgtttaccaaaagtgcttatcattttgcattttctctcgcggcaagtgctatactttatccatacatgttcagtgcgttttatcaggtgaaatatacaatagaacacaagttaactgcaacgcctaaacaatggattataggaattctagcatctatttatgcaatttggctggtatacgcgtcaggtatagattacttgttacttaccatgttgctctatattccggggattatcgtctatattgttgttcagaaaaataatcaaaagcgacttacacaatttgactatattttcttcagtcttatcgttattttagcattgatagggttattacgatga

SEQ ID NO: 1453 - protein, 467 aa, Staphylococcus epidermidis RP62A
MNDTGDKKLSRTSLIGLVIGSMIGGGAFNIQSDMGGHAGGLAIIIGWLITAIGMISLALVFQNLTNERSDLDGGIYSYAQAGFGDFIGFASAWGYWFSAFLGNVAYATLLMSSIGNFFPIFKGGNTFPSIIVASILLWSVHFLILKGVETATLINSIVTITKLIPILLVIICMIVAFNFNTFKIGFFGMDGYGSLSFHFANTMSQVKSTMLVTVWVFIGIEGAVVFSGRAKNKKDVGTATVIGLISVLLIYFLLTVLAQGIVIQNHISKLEAPSMAQILAYIVGDWGATFVNIGLIISVLGAWLGWTLLAGELPFIVAKDGLFPKWFAKENKNGAPMNALFITNVLVQIFLISMLFTKSAYHFAFSLAASAILYPYMFSAFYQVKYTIEHKLTATPKQWIIGILASIYAIWLVYASGIDYLLLTMLLYIPGIIVYIVVQKNNQKRLTQFDYIFFSLIVILALIGLLR

SEQ ID NO: 1454 - DNA, 1461 bp, Chlamydophila abortus S26/3
  CDS (1)..(1461): transl_table=11
atgatttctaatgggagtaaatccgggaaaaatctcggagccatagctttagcaggcatggtcattagctccatgattgggggagggattttcagccttccccaaaatatggcagcatctgcaggagtaggcgcaattatcttagcatggatcctaacaggcgtaggcatgtttttcattgccaatacttttaaaattctctcattagtacgcccggacttaacgacaggaatctatatgtacagccgagaaggatttggcccctacatagggtttactatcggctggggatattggttatgccagatctttgggaatgtcggttatgccgtgatgaccatggatgcattaaactattttttccctccctactttcaaggaggaaatactctacccgccattctagggggctccatactcatctgggttttcaatttcatcgtcttaaaaggaatccgtcaggcatcgttcattaacatcatcggcacagtaggcaaactcgttcctctgattgtattcattatcatcacagcctttctttttaaacttgcgattttcaaaacagatttttggggggatacggttacaaaaacacaaccgttattaggatctatgactagtcagctgaaaagcacaatgttagttaccttatgggctttcataggcatcgaaggcgccgtagtcatgtccgcacgtgcaaaaagtcctagtgctgttggaaaagcgacgattttaggttttactgggtgtctcactgtttacatacttttatctatcttaccttttggctccttatttcaacatcaactcgccggtattgccaacccttccaccgcgggagtattggatattctcgtaggaaaatggggagaaattttaatgaatgttggtctccttattgccgtactttctagttggttatcctggactatgatcgttgctgagatcccgtattctgcagcaaaaaatgggacattcccagagattttcgctatcgaaaatgcgcatcgctctcctaaagtttcattatatgttactagtgctctcatgcaaatcgctatgcttctggtatacttttcaaccgacgcatggaataccatgttgagcattacaggcgtaatggtcttacctgcctatttcgcaagtgccgcttttcttgtgaagtttagtaaaaacaaaaaatacccaaataagggacctatcaaagccttcactgcaaaaattacaggacttctgggtgccgtttattctatttggctcatctatgctggagggctgaaatatctacttatggctatcattctcttggcgttaggcattcctttttacatcgatgccgggaaaaaaggcagaaatgcaaaaacattttttgcaaaaaaagaggttacagaaattaccatcattgcttttctagccttattggctatattcctcttttcaacggaaaaaatccgtttataa

SEQ ID NO: 1455 - protein, 486 aa, Chlamydophila abortus S26/3
MISNGSKSGKNLGAIALAGMVISSMIGGGIFSLPQNMAASAGVGAIILAWILTGVGMFFIANTFKILSLVRPDLTTGIYMYSREGFGPYIGFTIGWGYWLCQIFGNVGYAVMTMDALNYFFPPYFQGGNTLPAILGGSILIWVFNFIVLKGIRQASFINIIGTVGKLVPLIVFIIITAFLFKLAIFKTDFWGDTVTKTQPLLGSMTSQLKSTMLVTLWAFIGIEGAVVMSARAKSPSAVGKATILGFTGCLTVYILLSILPFGSLFQHQLAGIANPSTAGVLDILVGKWGEILMNVGLLIAVLSSWLSWTMIVAEIPYSAAKNGTFPEIFAIENAHRSPKVSLYVTSALMQIAMLLVYFSTDAWNTMLSITGVMVLPAYFASAAFLVKFSKNKKYPNKGPIKAFTAKITGLLGAVYSIWLIYAGGLKYLLMAIILLALGIPFYIDAGKKGRNAKTFFAKKEVTEITIIAFLALLAIFLFSTEKIRL

SEQ ID NO: 1456 - DNA, 1428 bp, Pseudomonas syringae pv. syringae B728a
  CDS (1)..(1428): transl_table=11
atgtcgacgccccctggaaaactgagattgggtgctttagtcgctctggtggtcggctcaatgattggtggaggaatcttttccctgccacagaatatggccgccagtgcagaagtaggtgctgtgctggttggctgggccatcaccgcaattggcatgctgacgctggcattcgtttttcaaacgctggcgaatcgcaagcccgatctggacggtggtgtctacgtttacgccaaggctggtttcggcgactacatggggttctcgtccgcgtggggatactggatcagcgcgtggctcggcaatgtgggttacttcgtactgttgttcagtacgctgggttacttttttcctgtttttggagagggcaatacggttgcggcggtgatcggggcgtcagtgttgctctggggcgtgcattttttggtgttgcgcggcattcaggaagcagcatttatcaatctggtgacgaccgttgccaaagtggtgccgctcattttattcgttttgatagcggtctttgcattcaagctggatatttttacgactgacatctggggcttggaaaaaccggacatgggcagcgtgatgaaccaggttcgccatatgatgctggtgacggtatgggtattcatcggtattgaaggtgccagtatcttttctgctcgggccagcaaacgcagtgatgtcggcaaggcgacggtcatcggtttcattaccgtattgctgttgctggtcctggtgaacgtattatcactgggggtcatgacccaaccggaactggccaaactgcaaaacccgtcaatggcggctgtgctcgaacatatagtgggtccgtggggggctgcgctgatcagtgtagggctgatcatttcgctgcttggggctttgctgtcatgggtgttgctctgcgccgaaataatgttcgctgccgctaaagaccatacaatgcccgagtttctaagccgcgaaaatgccaatcatgtgcctgccaatgcgctgtggctgactaacgcgatggtgcaggttttcctggtcatcaccctcttctcgtccagtacttacctgtcgctgatctacctggccacgtcgatgatcctgattccttatctgtggtctgccgcgtatgccctgcgcctggcgataggaggtgaaggttatgaaaacgccagacgcgagcgccggaaagatctgttcatcgcggccgtcgcgcttctttatgccatttggttgatatacgccggcggcgtcaaatacctgttgctctctgccctcctctacgcccccggtgtgatccttttcgcgaaggcaaaactcgaggcaaaaaaaccggtgttcacccacctggaaaacatgatgttcgttgccgttcttataggcgctcttatagcggcgtatgggctatatgacggcttccttaccctctaa

SEQ ID NO: 1457 - protein, 475 aa, Pseudomonas syringae pv. syringae B728a
MSTPPGKLRLGALVALVVGSMIGGGIFSLPQNMAASAEVGAVLVGWAITAIGMLTLAFVFQTLANRKPDLDGGVYVYAKAGFGDYMGFSSAWGYWISAWLGNVGYFVLLFSTLGYFFPVFGEGNTVAAVIGASVLLWGVHFLVLRGIQEAAFINLVTTVAKVVPLILFVLIAVFAFKLDIFTTDIWGLEKPDMGSVMNQVRHMMLVTVWVFIGIEGASIFSARASKRSDVGKATVIGFITVLLLLVLVNVLSLGVMTQPELAKLQNPSMAAVLEHIVGPWGAALISVGLIISLLGALLSWVLLCAEIMFAAAKDHTMPEFLSRENANHVPANALWLTNAMVQVFLVITLFSSSTYLSLIYLATSMILIPYLWSAAYALRLAIGGEGYENARRERRKDLFIAAVALLYAIWLIYAGGVKYLLLSALLYAPGVILFAKAKLEAKKPVFTHLENMMFVAVLIGALIAAYGLYDGFLTL

SEQ ID NO: 1458 - DNA, 1428 bp, Pseudomonas fluorescens Pf-5
  CDS (1)..(1428): transl_table=11
atgtcacaaccggcgcagaagctgcaactcggtgcattgatcgccctggtggtgggttccatgattggcggcgggatcttctcgctgccgcagaatatggcggcccgggccgatgccggagcggtgctgatcggctgggccatcaccgcggtggggatgctgaccctggccttcgtcttccagaccctggccaaccgcaagccggagctcgattccggggtctacgcctatgccaaggccgggttcggcgactacatgggcttttcatcggcctggggttactggatcagtgcctggctgggcaacgtcggctatttcgtcctgctgttcagcaccctgggctatttctttccggtgttcggccagggcaataccccggtggccatcggctgtgcctcggtcctgctgtgggccgtgcatttcctggtgttgcgggggatcaaggaggcggcgttcatcaaccagctgaccacggtggcgaagatcgtgccgctggtgatgttcatcgtcatcgctgccgtggcattcaaggcggatatcttcacccgggatatctggggccgcagcaacccgaacttcggcggggtgatggaccaggtgcgcaacatgatgctggtgacggtgttcgtgttcatcggtatcgagggcgccagcgtgtattcggcccgggcgcagaagcgcgccgatgtcgggcgggccacggtgatcggttttctcggggtgctggcgctgctggtactggtcaacgtgctgtcgttggggatcatgagccagccggagctggcgcaattgcagaacccttccctggcggcagtgctggagcatatcgtcggcccctggggcgccttgctgatcagcatcggcttggcggtttccctgctgggggccttgctgtcctgggccttgctgtgcgccgagatcctctacgccaccgctcgggaccggaccatgccggctttcctgaagaaggaaaacgccaaccatgtgccggtcaatgccttgtggctgaccaacgtgatgatccagatctttctgctgatcaccctgttctccgccggcacctacaccagcctgatctacctggcgtcgtcgatgatcctggtgccctacctgtggtcggcggcctatgcggtgctgctcagcggtcgcggggaaacctacgagcaggcctcccgggaacgcaagaaggacctgttcatcgccaccgtggccctgagctacgccatctggctgctgtacgccggcggcttgaagtacctgctgctgtcggccttgttgtatgcgccgggggtgatcctgttcgccaaggccaagcatgagcagggcgagccgttgttcaccccgctggaaaaactgatcttcgcggccgtggtcatcggcgcctcattggcggcctatggcttgtacagcggcctgctggcgctgtga

SEQ ID NO: 1459 - protein, 475 aa, Pseudomonas fluorescens Pf-5
MSQPAQKLQLGALIALVVGSMIGGGIFSLPQNMAARADAGAVLIGWAITAVGMLTLAFVFQTLANRKPELDSGVYAYAKAGFGDYMGFSSAWGYWISAWLGNVGYFVLLFSTLGYFFPVFGQGNTPVAIGCASVLLWAVHFLVLRGIKEAAFINQLTTVAKIVPLVMFIVIAAVAFKADIFTRDIWGRSNPNFGGVMDQVRNMMLVTVFVFIGIEGASVYSARAQKRADVGRATVIGFLGVLALLVLVNVLSLGIMSQPELAQLQNPSLAAVLEHIVGPWGALLISIGLAVSLLGALLSWALLCAEILYATARDRTMPAFLKKENANHVPVNALWLTNVMIQIFLLITLFSAGTYTSLIYLASSMILVPYLWSAAYAVLLSGRGETYEQASRERKKDLFIATVALSYAIWLLYAGGLKYLLLSALLYAPGVILFAKAKHEQGEPLFTPLEKLIFAAVVIGASLAAYGLYSGLLAL

SEQ ID NO: 1460 - DNA, 1428 bp, Pseudomonas fluorescens Pf-5
  CDS (1)..(1428): transl_table=11
atgtctgaatcccccggtaaactaagactgggcgccttagtcgccctggtagtgggttccatgattggcggcgggatcttctccttaccgcaaaacatggccgccagcgccgatgttggtgctgttcttattggttgggcaattaccgctgtcggcatgttgaccctggccttcgtcttccaaactctagccaatcgcaaacctgacctggatggcggcgtctacgcctacgccaaggccgggttcggtgactacatgggcttttcatcggcctggggttactggatcagcgcctggctgggcaacgtcggctacttcgtcctgctgttcagcaccctgggctatttcttcccgatcttcggcgagggcaacaccccggcggccgtgatcggcgcctctgttttgctctgggccgtgcacttcctggtgctgcgcggcatcaaggaagcggccttcatcaacctggtgaccacggttgccaaggtggtgccgctgctgctgttcgtgctgatcgccctgttcgccttcaagctggatatcttcaccgccgacatctggggcgtgaagaatccggacctgggcagcgtgatgaaccaggtgcgcaacatgatgctggtcaccgtgtgggtgttcatcggcatcgagggcgcgagcatcttctcgtcccgggcggagaaacgctcggatgtgggcaaggccaccgtcatcggcttcatcaccgtgctgctgttcctggtgctggtgaacgtgctgtccctggggatcatgacccagccggaactggccaagctgcagaacccgtccatggcggcagtgctggagcatgtggtgggccactggggcgcggtactgatcagcgtcggcctgatcatctcgctgctgggggcgctgctgtcctgggtgctgctgtgcgcggaaatcatgttcgccgccgccaaggaccacaccatgccggagttcctgcgccgcgagaacgccaaccacgtaccggccaacgccctgtggctgaccaatgccatggtgcagatcttcctggtcatcaccctgttctcggccagtacctacctgtcgctgatctacctcgccacctcgatgatcctggtgccctacctgtggtcggcggcctacgcagtactgctggcggtgcgcggcgaaagctatgaacaggccctggccgaacgcaagaaggacctgatcatcggcagcatcgccctgctctacgcgatctggctgctgtatgccggcggggtcaagtacctgctgctctcggccctgctctacgcccccggcgtggtgctgttcgccaaggccaagatggaactgcacaaaccgattttcaccaacgtcgagaagctgatttttgccgcagtggtcataggcgccctggtggcggcctacggactctacgacggcttcctgaccctatag

SEQ ID NO: 1461 - protein, 475 aa, Pseudomonas fluorescens Pf-5
MSESPGKLRLGALVALVVGSMIGGGIFSLPQNMAASADVGAVLIGWAITAVGMLTLAFVFQTLANRKPDLDGGVYAYAKAGFGDYMGFSSAWGYWISAWLGNVGYFVLLFSTLGYFFPIFGEGNTPAAVIGASVLLWAVHFLVLRGIKEAAFINLVTTVAKVVPLLLFVLIALFAFKLDIFTADIWGVKNPDLGSVMNQVRNMMLVTVWVFIGIEGASIFSSRAEKRSDVGKATVIGFITVLLFLVLVNVLSLGIMTQPELAKLQNPSMAAVLEHVVGHWGAVLISVGLIISLLGALLSWVLLCAEIMFAAAKDHTMPEFLRRENANHVPANALWLTNAMVQIFLVITLFSASTYLSLIYLATSMILVPYLWSAAYAVLLAVRGESYEQALAERKKDLIIGSIALLYAIWLLYAGGVKYLLLSALLYAPGVVLFAKAKMELHKPIFTNVEKLIFAAVVIGALVAAYGLYDGFLTL

SEQ ID NO: 1462 - DNA, 1428 bp, Streptococcus agalactiae A909
  CDS (1)..(1428): transl_table=11
atggaaaaagaaaaaaaattaggtcttttaccactaacaatgcttgtcattggctctcttatcggtggcggaatctttgatttaatgcaaaatatgagttccagagccggtttggtaccaatgcttattgcttgggtaattactgctatcgggatgggaactttcgttttaagttttcaaaatttatctgaaaaaaggccggacctaacagctggaatctttagttacgctaaagaggggtttggaaactttatgggatttaactctgcatggggttattggttatcagcttggcttggaaacgttgcctacgctgcactcttattcagttcactcggttatttctttaaattctttggtaatggaaataatatcatttcaattattggagcaagtatagttatttgggttgtccatttcttaattttaagaggtgttaatacagctgcatttattaataccatagttacctttgcaaaattagtacctgttattattttcttaatttcagcgttattagctttcaaatttaacatttttagtcttgatatctggggaaatggattacatcaatcaatttttaaccaagtcaattcaactatgaaaaccgctgtttgggtatttattggtattgagggcgccgttgtcttctcaggtcgtgctaaaaaacactctgatattggtaaagcaagtatcctagcattattcactatgatttcactttatgtattgatttctgttttatcacttggtatcatgtcacatccagaacttgcaaacttaaaaacaccagctatggcttacgttctagaaaaggctgttggtcactggggcgctatcttagttaaccttggtgttatcatttcagtatttggcgctattcttgcttggactttatttgcagcagaattaccatatcaagctgctaaagaaggtgcttttcctaaattctttgcaaaagaaaataaaaacaaagctccaatcaactcactcttagtcactaatctttgtgtacaagcattcttaatcacgttcttattcacacaaagtgcttatcgttttggtttcgcattagcatcatctgctatcttaattccttatgcttttacagcactatatcaattacaattcacactccgtgaggataaggcaactccaggacatcaaaagaatttaattatcggtatcctcgctacaatctatgctgtttaccttatctatgctggtggttttgattacttacttttgacaatgattgcttacactctaggtatgattctctatattaaaatgagaaaagatgacaagcttcctatctttgtgggatatgaaaaaattagtgccattgtcattctagcgctttgcttactatgtattattgaaattatgactggacaaattgacattgctgcaatcctagcaggttag

SEQ ID NO: 1463 - protein, 475 aa, Streptococcus agalactiae A909
MEKEKKLGLLPLTMLVIGSLIGGGIFDLMQNMSSRAGLVPMLIAWVITAIGMGTFVLSFQNLSEKRPDLTAGIFSYAKEGFGNFMGFNSAWGYWLSAWLGNVAYAALLFSSLGYFFKFFGNGNNIISIIGASIVIWVVHFLILRGVNTAAFINTIVTFAKLVPVIIFLISALLAFKFNIFSLDIWGNGLHQSIFNQVNSTMKTAVWVFIGIEGAVVFSGRAKKHSDIGKASILALFTMISLYVLISVLSLGIMSHPELANLKTPAMAYVLEKAVGHWGAILVNLGVIISVFGAILAWTLFAAELPYQAAKEGAFPKFFAKENKNKAPINSLLVTNLCVQAFLITFLFTQSAYRFGFALASSAILIPYAFTALYQLQFTLREDKATPGHQKNLIIGILATIYAVYLIYAGGFDYLLLTMIAYTLGMILYIKMRKDDKLPIFVGYEKISAIVILALCLLCIIEIMTGQIDIAAILAG

SEQ ID NO: 1464 - DNA, 1428 bp, Pseudomonas fluorescens PfO-1
  CDS (1)..(1428): transl_table=11
atgtcgcaaccgacgcaaaaactgcgccttggcgcactgatcgccctggtggtgggttcgatgattggcggggggattttttccttgccgcaaaacatggcagcccgggccgatgccggcgccatcctgatcggctggggcatcacggcgatcggcatgctcaccctggcgttcgtgttccagactttggccaatcgcaagccggaactggactccggcgtgtatgcctacgccaaggccgggttcggcgattacatgggcttttcttccgcgtggggttactggatcagcgcctggctgggcaacgtcgggtatttcgtgttgctgttcagcaccctcggctacttctttccggtattcggccagggcaatacgccgattgcgattggctgcgcttcggtgttgctgtgggccgtgcactttctggtgatgcgcgggatcaaggaagccgcgctgatcaatcagttgaccaccgtggccaagatcattccgctgatcatgttcgtggtcatcgccgccgtggcgttcaaggctgacgtgtttacccgcgacatctggggccgcagcaacccgaatttcggcggtgtgatggatcaggtgcgcaacatgatgctggtcaccgtgttcgtgttcatcggtatcgaaggcgccagcgtttactcggcccgggcggagaagcgcaccgacgtgggccgtgccacggtgatcggtttcctcggtgtgctggcgctgctggtgctggtcaatgtgttgtcgctggggatcatgagccaaccggaactggcgaccttgcagaacccgtcgctggccgccgtgctggaacacatcgtcgggccctggggcgcgctgctgatcagcgtgggcctggccatttcattgctcggtgcgttgctgtcgtgggcgctgttgtgcgccgagatcctgttcgccactgccaaggacaacacgatgccggcgttcctgaaaaaggaaaacgccaaccatgtgccggtcaatgcgttgtggctgaccaacgtgatgatccagattttcctgctgatcacgctgttttccgccggtacttacaccagcctgatttacctcgcctcgtcgatgattctggtgccgtatctgtggtcggcagcctacgccgtgttactcagcggacggggtgagacctatgaacatgcctccgccgaacgtaccaaggatctgctgatcggcggtatcgcgctgtgctacgcggtgtggctgttgtatgccggcggggtgaaatacctgctgctgtcggcgctgttgtatgcgccgggcgtgatcctgttcgccaaggccaagcatgagcagggcgagccgttgttcaccacgctcgagaaggggattttcacctgcgtcatcgccggggccgggcttgcggcctacgggttgtacagcggcgtgttgtccctgtga

SEQ ID NO: 1465 - protein, 475 aa, Pseudomonas fluorescens PfO-1
MSQPTQKLRLGALIALVVGSMIGGGIFSLPQNMAARADAGAILIGWGITAIGMLTLAFVFQTLANRKPELDSGVYAYAKAGFGDYMGFSSAWGYWISAWLGNVGYFVLLFSTLGYFFPVFGQGNTPIAIGCASVLLWAVHFLVMRGIKEAALINQLTTVAKIIPLIMFVVIAAVAFKADVFTRDIWGRSNPNFGGVMDQVRNMMLVTVFVFIGIEGASVYSARAEKRTDVGRATVIGFLGVLALLVLVNVLSLGIMSQPELATLQNPSLAAVLEHIVGPWGALLISVGLAISLLGALLSWALLCAEILFATAKDNTMPAFLKKENANHVPVNALWLTNVMIQIFLLITLFSAGTYTSLIYLASSMILVPYLWSAAYAVLLSGRGETYEHASAERTKDLLIGGIALCYAVWLLYAGGVKYLLLSALLYAPGVILFAKAKHEQGEPLFTTLEKGIFTCVIAGAGLAAYGLYSGVLSL

SEQ ID NO: 1466 - DNA, 1428 bp, Pseudomonas fluorescens PfO-1
  CDS (1)..(1428): transl_table=11
atgtctgaagctcccggaaaactacgactaggtgcactggtcgcgttggtagtcggctcaatgatcggtggcgggatattctctttgccacaaaacatggccgccagtgccgatgtcggcgcggtactgattggctgggccatcaccgctgtcggcatgctcaccctcgctttcgtcttccaaaccctggccaatcgcaagcctgacctggacggcggtgtctacgcctacgccaaggccggtttcggcgattacatgggtttctcttcggcctggggttactggatcagtgcctggctgggcaacgtcggttacttcgttctgctgttcagcactctcgggtatttttttccgatttttggggagggcaacaccgttgcagccgtgatcggcgcctctgtcctgctgtggggcgtgcactttctggtactgcgcgggatcaaggaagcggcgttcatcaacctcgtgaccaccgtcgccaaggtcgtgccgctgctgctgttcgtattgatcgcgatcttcgccttcaaactggacatcttcaccgccgatatctggggcgtgaaaaacccggatctgggcagcgtgatgaaccaggtgcgcaacatgatgctggtcaccgtgtgggtgttcatcggcatcgaaggcgcgagcatcttctcggcccgggcggaaaaacgttcggacgtcggcaaggcgaccgtgatcggtttcatcaccgtgctgctgttcctggtgctggtgaacgtgctgtcgctgggcatcatgactcagccggaactggcaaaactgcagaacccgtcgatggccgccgtgctggaacacgtggtcggtcactggggcgcggtgctgatcagcgtcggtctgatcatctcgctgctgggggcgttgctgtcgtgggtgctgctgtgtgcggagatcatgttcgccgctgccaaagaccacaccatgccggagttcctgcgcaaggaaaacgccaaccacgtgccggtcaacgccctgtggctgaccaacgcgatggtgcagctgttcctgatcatcactctgttttcggccagcacttacctgtcgctgatctacctcgccacttcgatgattctggtgccgtacctgtggtcggcggcctacgccctgctgctggcggtgcgcggcgaaagctacgaaggcttcgcggccgaacggcgcaaggacctgatcatcggcgccatcgccctgatctatgcggtgtggctgctctacgccggtggcgtgaagtacctgctgctctcggccctgctctatgcccccggcgcgatcctgttcgccaaggccaagctcgaactcaaacaaccggttttcaccaacgtcgagaagctgattttcgccgcagtggtcgtgggcgccctggtggctgcctacggactgtatgacggcttcctgactctgtaa

SEQ ID NO: 1467 - protein, 475 aa, Pseudomonas fluorescens PfO-1
MSEAPGKLRLGALVALVVGSMIGGGIFSLPQNMAASADVGAVLIGWAITAVGMLTLAFVFQTLANRKPDLDGGVYAYAKAGFGDYMGFSSAWGYWISAWLGNVGYFVLLFSTLGYFFPIFGEGNTVAAVIGASVLLWGVHFLVLRGIKEAAFINLVTTVAKVVPLLLFVLIAIFAFKLDIFTADIWGVKNPDLGSVMNQVRNMMLVTVWVFIGIEGASIFSARAEKRSDVGKATVIGFITVLLFLVLVNVLSLGIMTQPELAKLQNPSMAAVLEHVVGHWGAVLISVGLIISLLGALLSWVLLCAEIMFAAAKDHTMPEFLRKENANHVPVNALWLTNAMVQLFLIITLFSASTYLSLIYLATSMILVPYLWSAAYALLLAVRGESYEGFAAERRKDLIIGAIALIYAVWLLYAGGVKYLLLSALLYAPGAILFAKAKLELKQPVFTNVEKLIFAAVVVGALVAAYGLYDGFLTL

SEQ ID NO: 1468 - DNA, 1461 bp, Burkholderia thailandensis E264
  CDS (1)..(1461): transl_table=11
atggctgaagtgacacaagaacgagacgtcgcgacgacatccgcgacgaacaagttgcagctcggcgcgctcaccgcgctcgtcgtcggatcgatgatcggcggaggcatcttctcgctgccgcagaacatggcggccaccgccgacgcgggggcgatcctgatcggctgggcgatcaccgcagtcggcatgctcacgctcgcgttcgtgttccagacgctcgcgaaccgcaagccgcagctcgacggcggcgtctacgcgtatgcgcaggcgggcttcggcgactacatgggcttctcgtccgcatggggctactggatcagcgcgtggctcggcaacgtcggctacttcgtgctgctgttctcgacgctcggctacttcttcccggtgttcggcgaaggcaacacgcccgcctcgatcgcgggcgcatcggtgctgctgtgggccgtgcacttcctcgtgctgcgtgggatcaaggaggcggcattcgtcaatctcgtcacgaccgtcgcgaagatcgtcccgctcgccgtcttcatcctgatctgcttcttcgcgttcaggctcgacgtgttccgcaccgacatctggggccgcgcgaatccgtcgctcggctcggtgatgaaccaggttcgcaacatgatgctcgtgaccgtctgggtgttcatcggcatcgagggcgcgagcatcttctcggcgcgcgcgcaaaggcgcagcgacgtcggccgcgcgaccgtgatcggtttcgccggcgtgctgctcgtgctcgtgctcgtcaacgtgctgtcgctcggcatcatgacgcagccgcagctcgcgaagctgcagaacccttcgatggcggccgtgctcgagcatgtcgtcggccactggggcgcggtgctcatcagcgtcggcctcgtcgtgtcgctcgcgggcgcgctgctgtcgtgggtgctgctgtgcgcggaaatcatgttctcggccgcgaaggaccacacgatgcccgcgttcctgcgcaaggagaacgcgaaccacgtgccggcgaacgcgctctggctcacgaacgcgatggtccaggtgttcctgctgatcacgctgttctcgcagagcacctatctgtcgctgatctatctcgcgacgtcgatgatcctgattccgtacttctggtcggccgcctatgcgctcctcatcgccgtgcgcggcgagacctacgagggcgacgcgcgcgcgcgccgcaaggaccttttcgtcgccgcgctcgccgtgctgtatgcggtgtggctgctgtacgcgggcggcgtcaagtatctgctgctgtccgcccttctctacgcgccgggcgcgctcttcttcgcgaaggcgaagcgcgagctcggcaagccggtcttcaccgccgccgaaaagctgatcttcgcggcggcggccgccgccgcactcgccgcggcctacgcgctccacagcgggctcatcaccctttga

SEQ ID NO: 1469 - protein, 486 aa, Burkholderia thailandensis E264
MAEVTQERDVATTSATNKLQLGALTALVVGSMIGGGIFSLPQNMAATADAGAILIGWAITAVGMLTLAFVFQTLANRKPQLDGGVYAYAQAGFGDYMGFSSAWGYWISAWLGNVGYFVLLFSTLGYFFPVFGEGNTPASIAGASVLLWAVHFLVLRGIKEAAFVNLVTTVAKIVPLAVFILICFFAFRLDVFRTDIWGRANPSLGSVMNQVRNMMLVTVWVFIGIEGASIFSARAQRRSDVGRATVIGFAGVLLVLVLVNVLSLGIMTQPQLAKLQNPSMAAVLEHVVGHWGAVLISVGLVVSLAGALLSWVLLCAEIMFSAAKDHTMPAFLRKENANHVPANALWLTNAMVQVFLLITLFSQSTYLSLIYLATSMILIPYFWSAAYALLIAVRGETYEGDARARRKDLFVAALAVLYAVWLLYAGGVKYLLLSALLYAPGALFFAKAKRELGKPVFTAAEKLIFAAAAAAALAAAYALHSGLITL

SEQ ID NO: 1470 - DNA, 1431 bp, Staphylococcus aureus subsp. aureus NCTC 8325
  CDS (1)..(1431): transl_table=11
atgaacgaatcaggagataacaaactcagtaaatcttctttaattggactagttataggatccatgattggtggcggtgcgttcaatataatgtctgatatgggcggtaaagccggtggattagccattattattggttggattattacagctataggaatgatttcattagcgttcgtatttcaaaatttaaccaatgaacggccggagctagacggtggtatttatagttatgctcaagcaggatttggcgattttgtaggatttatcagtgcttggggatattggttctcagcgtttttaggcaatgttgcctatgcaacactattgatgtcagcagtaggtaactttttcccgatttttaaaggaggcaacacattaccaagtgttattgtcgcctcgttactactctggggtgtccatttcttgattttaaaaggcgttgaaacagcagcatttatcaatagtattgttactgttgcaaagttaataccgattttacttgtaatcatatgcatgataattgcattcaattttgacacttttaaaacaggctttttcagtatgacgtcagagggtgtattgccatttagttgggcgagcacaatgagccaagttaaaagtacgatgctagtgacagtttgggtgtttatcggtatcgaaggtgcagtaattttttctagtagagctaaaaataaaaaagatgtaggtagtgccacggttataggacttatatcagttttaattatctatttcttattaactgtattagctcaaggcgtgattttgcaaaatcatatttcgcaattagattcgccaagtatggcacaggtgcttgcaactattgtaggtggttggggatctacacttgtaaatattggtttaattatttcggtactaggtgcatggttaggatggacactgcttgctggtgaattacctttcattgttgcaaaagatggattatttccaaaatggtttgctaaagaaaataaaaatggagcacctgtaaatgcactgcttattaccaatatattagtacaattatttttaataagtatgctatttacacagagtgcgtatcaatttgcattttcactagcatcaagtgctattttatacccttacatgttcagtgcattttaccaagttaaatacactttagagcatcgacagcaagcaactactaaacaatggacgattggtatcatagcctcaatttatgctatatggcttatatatgcagcaggtatcaattacttattattgacgatgttactttatattccagctcttcttgtttatacaatcgttcaaaagaataatcagacacgtttgattaaatcagactatattctttttatgattattatcgtacttgcagttatcgggttaattaagttattgatgggaacgataaatgttttttaa

SEQ ID NO: 1471 - protein, 476 aa, Staphylococcus aureus subsp. aureus NCTC 8325
MNESGDNKLSKSSLIGLVIGSMIGGGAFNIMSDMGGKAGGLAIIIGWIITAIGMISLAFVFQNLTNERPELDGGIYSYAQAGFGDFVGFISAWGYWFSAFLGNVAYATLLMSAVGNFFPIFKGGNTLPSVIVASLLLWGVHFLILKGVETAAFINSIVTVAKLIPILLVIICMIIAFNFDTFKTGFFSMTSEGVLPFSWASTMSQVKSTMLVTVWVFIGIEGAVIFSSRAKNKKDVGSATVIGLISVLIIYFLLTVLAQGVILQNHISQLDSPSMAQVLATIVGGWGSTLVNIGLIISVLGAWLGWTLLAGELPFIVAKDGLFPKWFAKENKNGAPVNALLITNILVQLFLISMLFTQSAYQFAFSLASSAILYPYMFSAFYQVKYTLEHRQQATTKQWTIGIIASIYAIWLIYAAGINYLLLTMLLYIPALLVYTIVQKNNQTRLIKSDYILFMIIIVLAVIGLIKLLMGTINVF

SEQ ID NO: 1472 - DNA, 1482 bp, Burkholderia xenovorans LB400
  CDS (1)..(1482): transl_table=11
atgaagaacctggcagattcattttcggcaccatccgttccaacgccggccggccagactggcagcgcggtagcgaagccattgcggctcggcctgctcaccgcgctggtgatcggttcgatgatcggcagcggcgtcttctccctgccgcagaacatggcatccggcgcgggcgccgccgccgtgctgatcggctggctgatcaccggcgtcggcatgttgatgcttgcgtttgtctatcagacgctgacaacccgcaagcctgaactcgacaacggcatctacgcttatgcgcgcgccagtgccggcgagttcgtcggcttcaattcggcctggggctactgggtcagcgcgtggatcggcaatgtcggctatctcgtcatcgtgttcggcacgctcggctacttctttcccatattcggcgacggcaacacgcccgcggccgtgctgggcgcgtccatcgcgctatggatcatgcatgccgtgatcctgcgcggcgtgcgcagcgcagcggtgctcaacgcgatcaccacggtcgccaaggtgatcccgctgctgctgttcatcgtgctcgcggccatcgccttcagaagccatgtgatcgctcaggacttctggggcaacgcgaagctcggcagcgtcttcacgcaagtcaaaagcaccatgctgatcaccgtgtgggtgttcatcggtatcgaaggcgccagcgtgttctcggcccgcgcgcagcggcgcgaggatatcgggcgcgccacgctgctcggcttcgtggtggtcctgctcctgctgatggcggtctccctgctgtcgctcggtatcgtgccgcaaggcgagctcgccgcgatgaagaacccctcgatggccggcgtgctcgacaaggccgtcggtgcctggggcgcggtgctcatcagtatcggcctgctggtctcggtgggcggtgcgttgctggcgtggaccctgctggcggcggaaacactcttcacgccggcgaacggcggcgtcatgccgaagtttctggcgcgcgaaaacagtcacggcgtaccggccaatgcactctgggtgaccaacggactggtgcaactgttcctgatcatcacgctcgtctccaacgcgacctatcaggcgctgatttcgcttgcgacttcgatgatcctgatcccgtatctgttctccgctgtctacgcgactggcatcgccatgcgcggcgaaggttacgcgccggcggaaggcgcgcgcacccgcgacatgctgatcggcgcggccgcaaccgtttattgctgctggctgctgtatgccgccggccccaagtatctgctgctctccgctctgctctacgcgcccggcgtgctgctgtacggctgggcgaaacgcgaacgcggcgcacgtctgttcaagccgttcgaagcggtgatcctcgcggctctgctcatcctcgccgccgtggcggcatggctgctttccaccggcgcgctcggtttgtaa

SEQ ID NO: 1473 - protein, 493 aa, Burkholderia xenovorans LB400
MKNLADSFSAPSVPTPAGQTGSAVAKPLRLGLLTALVIGSMIGSGVFSLPQNMASGAGAAAVLIGWLITGVGMLMLAFVYQTLTTRKPELDNGIYAYARASAGEFVGFNSAWGYWVSAWIGNVGYLVIVFGTLGYFFPIFGDGNTPAAVLGASIALWIMHAVILRGVRSAAVLNAITTVAKVIPLLLFIVLAAIAFRSHVIAQDFWGNAKLGSVFTQVKSTMLITVWVFIGIEGASVFSARAQRREDIGRATLLGFVVVLLLLMAVSLLSLGIVPQGELAAMKNPSMAGVLDKAVGAWGAVLISIGLLVSVGGALLAWTLLAAETLFTPANGGVMPKFLARENSHGVPANALWVTNGLVQLFLIITLVSNATYQALISLATSMILIPYLFSAVYATGIAMRGEGYAPAEGARTRDMLIGAAATVYCCWLLYAAGPKYLLLSALLYAPGVLLYGWAKRERGARLFKPFEAVILAALLILAAVAAWLLSTGALGL

SEQ ID NO: 1474 - DNA, 1416 bp, Actinobacillus pleuropneumoniae serovar 1 str. 4074
  CDS (1)..(1416)
atgtcaaacaaaaaaattgggttactttctttaactgctctggttctcagttcgatgattggttccggtattttcagtctgccgcaaaatatggcggcggtcgccggcggtgaagcgttaattctcggctggatcattaccggtatcggaattattttcctcgggctttctttcttctttatttctcgcttacgtccggatttagacggcggtatttatacttatgcacgtgaaggctttggcgatttagtcggtttcctctctgcttggggttactggctgtgtgcaaccatcggaattgtcggctatttagtggtagcgtttgagggaatcggttcatttaccgatacggaatcgaatattattttcggacaaggcaatacgcttgcttcatttatcggcgcttcaattatcgtgtggttagttcacgctttagtagctagcggtgtaaaagaagcggcaacggtaaacttgattgcaacttttgtgaaagtatttccgctcgtgctatttatcggtttggcaatttggtatttcaaaggcgaaacctttaatcaagatctgcaaggtacggctctcaataacagcgtatcggaacaagttaaaaacacgatgttaattaccctttgggtatttaccggtgtggaaggcgcttctgtattatccgctcacgctaaaaagaaaagtgatgtcggtttagcgaccgttctcgggattctgattgcattagttttatatattgcaattaccgtgctttcactcggcattttaccgcgtgaaaccattgcggagatgtcaaacccgtcaatggcaggtttattagaaacaatgatcggttcaagcggtaagattttaattactttttgcttaattgtatcggtgttggcttcttatgtgagctggacaatgtattcggcggaagtaccttatcgtggtgcgaaaaacggtgcattccctaaaattttagataagcttaacgcaaatgaagtgccgattaattcgctttggtttaccggttttgtggtgcaattctgtttattccttgtattattaaccggtaaaagctacaacgctttattattaatttcgacttcaatgatccttgtgccttatttcttaatcggtgcatatttattgaagttatcattccaacaaaattcagcgaggtatatcaaactgaccggttttatcgcatcaatttacggtttatggattgtctatgcggcgggtttagattacttattattgtcggtattactttatgcgcctggcattggcttattcctttactcacgctatcaacatcaaggaaaagcattaaacctttcgacttttgagaaaactttattagtgcttatcggtttcttgtttatttgggcggtttataatagttttaccaacgttgattggagctaa

SEQ ID NO: 1475 - protein, 471 aa, Actinobacillus pleuropneumoniae serovar 1 str. 4074
MSNKKIGLLSLTALVLSSMIGSGIFSLPQNMAAVAGGEALILGWIITGIGIIFLGLSFFFISRLRPDLDGGIYTYAREGFGDLVGFLSAWGYWLCATIGIVGYLVVAFEGIGSFTDTESNIIFGQGNTLASFIGASIIVWLVHALVASGVKEAATVNLIATFVKVFPLVLFIGLAIWYFKGETFNQDLQGTALNNSVSEQVKNTMLITLWVFTGVEGASVLSAHAKKKSDVGLATVLGILIALVLYIAITVLSLGILPRETIAEMSNPSMAGLLETMIGSSGKILITFCLIVSVLASYVSWTMYSAEVPYRGAKNGAFPKILDKLNANEVPINSLWFTGFVVQFCLFLVLLTGKSYNALLLISTSMILVPYFLIGAYLLKLSFQQNSARYIKLTGFIASIYGLWIVYAAGLDYLLLSVLLYAPGIGLFLYSRYQHQGKALNLSTFEKTLLVLIGFLFIWAVYNSFTNVDWS

SEQ ID NO: 1476 - DNA, 1407 bp, Actinobacillus pleuropneumoniae serovar 1 str. 4074
  CDS (1)..(1407)
atgtcaaaaggtaaaatcgggcttttctctttaaccgcattagtacttagctccatgatcggttccggtattttcagtttgcctcaaaatatggcggaagtcgccggtgccgaggcattactcagcggttggcttattaccggtatcggtattattttcttaggtctatctttcttttttctttcacgcattaaaccggaattggaaggcggcgtctatacttacgctcgcgaaggcttcggcgatttggtcggaggattatccgcttggggctattggctctgtaccgctatcggcagtgtcggctacctagtggttgcctttgaaggactgggcgcatttgttgatagtgaaaatcatacgattttcggacaaggtaatacgttagccgctattttgggagcttcagttattgtttgggctgtacattatctgattgcacgaggtattcgtgaagcggcgtatgtaaacctgatcgcaactatcgtaaaaaccttaccgctctttttatttatcggcttagccgtttggtttttctcaccggagcaattcgtacaggattttagcggcgttaaactcggcacaacccaattagaacaagtaaaaggcacaatgttgattaccctttgggtgtttgtcggagtggaaggggcttccgtactctccgctcatgccaaaaagaaaagtgatgtcggcttagccaccattttaggtattctgattaccctggtgctatatgtggcgattaccgtgctttcactcggtattttgcctcgtgaagtgattgccgaaatgccgaatccctctatggcagggttaatggaacagatgattggtacaagcggtaagattattattactttctgcttgattgtatcggtattggcttcttatatgagttggacgatgttttcatcggaaatcccttaccaagcggcgaaaactaaagttttcccgaaagtactaaatcgcaccaatattaacggcacaccgattgccggtttatggctaaccaatatcacgattcaaattagtctgttgctcgtattatttaccggcaaaggttacagtatgctgattcagctttcgactacaatgattctggtaccttatttcttagtcggcgcttatttattcaaagtcgcaatgaaacaaaacgaagcgtggtatatcaaactgaccggtgcgatggcgtccgtttacggtttatggattgtttatgcggcgggactagattatttgttgctctccgttgtactctacgtaccgggacttgctctgtttttctattctcgtaaacaaaacggcgaaaacatccatttaactcgctttgaaaaaagtttattagcggtgattagtgtgctttttatcggagcggtttatactctgttcactaattcattctag

SEQ ID NO: 1477 - protein, 468 aa, Actinobacillus pleuropneumoniae serovar 1 str. 4074
MSKGKIGLFSLTALVLSSMIGSGIFSLPQNMAEVAGAEALLSGWLITGIGIIFLGLSFFFLSRIKPELEGGVYTYAREGFGDLVGGLSAWGYWLCTAIGSVGYLVVAFEGLGAFVDSENHTIFGQGNTLAAILGASVIVWAVHYLIARGIREAAYVNLIATIVKTLPLFLFIGLAVWFFSPEQFVQDFSGVKLGTTQLEQVKGTMLITLWVFVGVEGASVLSAHAKKKSDVGLATILGILITLVLYVAITVLSLGILPREVIAEMPNPSMAGLMEQMIGTSGKIIITFCLIVSVLASYMSWTMFSSEIPYQAAKTKVFPKVLNRTNINGTPIAGLWLTNITIQISLLLVLFTGKGYSMLIQLSTTMILVPYFLVGAYLFKVAMKQNEAWYIKLTGAMASVYGLWIVYAAGLDYLLLSVVLYVPGLALFFYSRKQNGENIHLTRFEKSLLAVISVLFIGAVYTLFTNSF

SEQ ID NO: 1478 - DNA, 1419 bp, Pseudomonas aeruginosa UCBPP-PA14
  CDS (1)..(1419)
atggccgattcggacaagggaaaactggggctgccggcgctgaccgcgctggtggtaggcggcatcatcggcagcggtatcttcagcctgccgcagaacatggccgaaggcgcaggcgccggcgcgatcctgatcgcctgggcgatcaccttcgtcggcatgctgaccctgacgcggatattccagtggctgtcgaccacccgccccgaactggacgacggcgtctacggctacgcccgcgaaggcttcggcgaatacctggggttcaatgctgcctggggctactggatttccgcctgggtcggcaacgccggctacctggtggtgctgttcagcgccctcggctcgttcggcgcgctggccttcttcggcgacggaaccacctggccggcgctgctcggcgaattgacggtgctctggctgatgcatgccttcgtcctccacggcgtgcacaacgcggcgatcaccaacgccatcgtgaccctcgccaaggtggtgccgatcgccctgttcatcctctgcgtagccctggccttccgcatcgagacctttcacctggacttctggggcagcccggccctgggcagcgtcacccgccaggtggaaaccaccatgctctacaccgtctgggtattcctcggcatcgagagcgccacggtctatgccagccacgcgcggcacgcggccgatgtcagccgtgcaaccctgctcggcttcgtggtcaccctgctgttgctggtctgcgtctcggtgctgtcgctgggcgtggtgccgcagcacgaactggcgcagatgaagaacccctcgatggcccaggtgatggccgcggcggtgggcccctggggcgccacgctgatcaacgtcgggctgatcgtttcggtcggcggcgcgctgctggcctggaccatgctcgcggtggaaatgctctacctggccagccgtggcccaacgcacaccgcgccggcactgttcggccgcaccaatgcggtggaaaccccagcgccggcactgtggctgaccagcacgctgatctctgcgctgctgctggtggccttcctcaacgcctcgggctacaacgcactgatccagttggccacctcgatggcgctgatcccctacctgctctgcgccggcttctgcctgaagctggtggcgcgccgcccgcactcgggcgcgatgctggcgctggcgctgttggggacgctctacggggtctggctgatctacgccgccgggctgaaatacctgctgctgtcgatgatcctctacgcgccgggcctcggcttcttcctgcatgcccgtcgccagcgcgacctgccggcgttcggcaatcgcgccgaaggcagcgtcgcggcgctggtgctggtcctcgcgctggcggcgctgtggatgatcggcagcggtcggctgagcctctag

SEQ ID NO: 1479 - protein, 472 aa, Pseudomonas aeruginosa UCBPP-PA14
MADSDKGKLGLPALTALVVGGIIGSGIFSLPQNMAEGAGAGAILIAWAITFVGMLTLTRIFQWLSTTRPELDDGVYGYAREGFGEYLGFNAAWGYWISAWVGNAGYLVVLFSALGSFGALAFFGDGTTWPALLGELTVLWLMHAFVLHGVHNAAITNAIVTLAKVVPIALFILCVALAFRIETFHLDFWGSPALGSVTRQVETTMLYTVWVFLGIESATVYASHARHAADVSRATLLGFVVTLLLLVCVSVLSLGVVPQHELAQMKNPSMAQVMAAAVGPWGATLINVGLIVSVGGALLAWTMLAVEMLYLASRGPTHTAPALFGRTNAVETPAPALWLTSTLISALLLVAFLNASGYNALIQLATSMALIPYLLCAGFCLKLVARRPHSGAMLALALLGTLYGVWLIYAAGLKYLLLSMILYAPGLGFFLHARRQRDLPAFGNRAEGSVAALVLVLALAALWMIGSGRLSL

SEQ ID NO: 1480 - DNA, 1350 bp, Pseudomonas aeruginosa UCBPP-PA14
  CDS (1)..(1350)
atggcagccagcgccgacgtcggcgccgtcctgatcggatgggcgatcaccgccgtcggcatgctcaccctcgctttcgtcttccagaccctcgccaaccgcaagcccgaactcgacggcggcgtgtacgcctacgccaaggccggcttcggcgactacatgggtttctcctcggcctggggctactggatcagcgcctggctgggcaacgtcggctacttcgtcctgttgttcagcaccctcggctacttcttcccgatcttcggcaagggcgacaccgtcgccgcgatcgtctgcgcctcggtcctgctctgggccctgcatttcctggtgctgcgcgggatcaaggaggcggcgttcatcaacaccgtcaccaccgtggccaagatcgtgccgctgttcctgttcatcctgatctgcctgttcgccttcaagctggacatcttcaccgccgacatctggggcaagagcaacccggacctgggcagcgtgatgaaccaggtgcgcaacatgatgctggtcaccgtctgggtgttcatcggcatcgagggcgcgagcatcttctcctcccgcgcggaaaaacgttccgacgtcggcaaggccaccgtgatcggcttcatcaccgtcctgctcctgctggtgctggtcaacgtgctgtccatgggcgtgatgacccagccggaactggccaagctgcagaacccgtcgatggcgctggtactcgagcatgtggtcggccactggggcgccgtgctgatcagcgtcggcctgctgatctcgctgctgggcgcgctgctctcctgggtgctgctgtgcgccgagatcatgttcgccgcggccaaggaccacaccatgccggagttcctgcgccgcgagaacgccaaccaggtgccggccaacgccctgtggctgaccaacatctgcgtacaggtgttcctggtggtggtgttcttcacctcgggcgacccggacggcatggacccgtacaccaagatgctgctcctggccacctcgatgatcctgattccgtacttctggtccgccgcctatggcctgctgttgaccctgaagggcgagacctacgagaacgatgcccgcgaacgcagcaaggacctggtcatcgccggcatcgctgtggtctacgcggtctggctgctctacgccggtggcctgaagtacctgctgctgtccgccctgctgtatgcgcccggcgcgatcctcttcgccaaggccaagcacgaggtcggccagccgatcttcaccggaatcgaaaaactgatcttcgccgcagtcgtcattggcgccctggtggctgcctacggcctctacgacggtttcctcaccctctga

SEQ ID NO: 1481 - protein, 449 aa, Pseudomonas aeruginosa UCBPP-PA14
MAASADVGAVLIGWAITAVGMLTLAFVFQTLANRKPELDGGVYAYAKAGFGDYMGFSSAWGYWISAWLGNVGYFVLLFSTLGYFFPIFGKGDTVAAIVCASVLLWALHFLVLRGIKEAAFINTVTTVAKIVPLFLFILICLFAFKLDIFTADIWGKSNPDLGSVMNQVRNMMLVTVWVFIGIEGASIFSSRAEKRSDVGKATVIGFITVLLLLVLVNVLSMGVMTQPELAKLQNPSMALVLEHVVGHWGAVLISVGLLISLLGALLSWVLLCAEIMFAAAKDHTMPEFLRRENANQVPANALWLTNICVQVFLVVVFFTSGDPDGMDPYTKMLLLATSMILIPYFWSAAYGLLLTLKGETYENDARERSKDLVIAGIAVVYAVWLLYAGGLKYLLLSALLYAPGAILFAKAKHEVGQPIFTGIEKLIFAAVVIGALVAAYGLYDGFLTL

SEQ ID NO: 1482 - DNA, 1428 bp, Bacillus anthracis str. A2012
  CDS (1)..(1428)
  misc_feature (894)..(894): m is a or c
  misc_feature (895)..(895): s is g or c
atgacagatggggtggtacaaatagaaaagaagttaggattttttccattaattgcattagtagtcggaacaatggttggtggcggtgtttttagtttaccgcatgatttagcagtaggagcaaatagtggctctatcataattggctggtgtattacagcgatgggaatgattccactcgcgctcgtatatcaaacgttagcaagaaagaaaccagagcttgagggcgggatttatagttatgcacgtgctggtttcggtgaatatattggatttaacagtgcttggggatactggttagcaggaattttaggaaacgttgcaacaatcatgttactgtttagtacattaggttatttcttcccaatttttaagggcggaaatagtgttgcgtctatcgtaggagcatcacttttattatggacacttcattttctaattttatttggcattcgtgaagcatctattatgaatgtgattgcaacgataggaaaattggttccaatcgtattatttattgttgtaatggtaacagcgtttcgctgggatacatttacacaggatttttggggggaaggaactatttcagtttcctctatactaggtcaagtgaaaaatacaatgcttgtaactctttgggttttcatcggggttgaaggagcggtagtattatctggaagagcaaaaaatagtcgagatgtcgggaaagcgacagtattaggacttattttagtaatgtctatttatattttaatttctgtcttgtcaatgggagcgatgacaagaggagaactttctgttttagaaactccgtcaatgggacatgtattagaacatgttgttgggacatggggggcagttgcgataaacatcgggttagttgcttcacttgtmsgtacattaataggctggtttttacttgtttctgaaatttcccacgtagcaggaaaagatggcgtgtttccgaaagtctttacgaaaacaaataaaaaacaaacgccgcatatggcattatggatctcaaatggcgttgcccaagttatatttataatcgttctgttttcagaatcaacatatcaaattatgtatttcatagcgtcaacatcaattttagtaccatatttattatcagcgttattccaatttaaattagtaattacaaatgaactaaaagatgcaaaagtcaaaaatggttcgctagctttaattgcttcactttactctgtatggcttatttatgcagctggtttgaagaatttattgctcgtttcaatcgtatacgggattggaatcattgtttatgtgtatgcaagaaaagaaaaaggaaatcgttgttttactggtatagagagatatgtaatgtgggcaattgtagtagcagctgttacatctctatatatgttattgactggaaatataaaaatgtaa

SEQ ID NO: 1483 - protein, 475 aa, Bacillus anthracis str. A2012
  misc_feature (299)..(299): The Xaa at location 299 stands for Arg, or Gly.
MTDGVVQIEKKLGFFPLIALVVGTMVGGGVFSLPHDLAVGANSGSIIIGWCITAMGMIPLALVYQTLARKKPELEGGIYSYARAGFGEYIGFNSAWGYWLAGILGNVATIMLLFSTLGYFFPIFKGGNSVASIVGASLLLWTLHFLILFGIREASIMNVIATIGKLVPIVLFIVVMVTAFRWDTFTQDFWGEGTISVSSILGQVKNTMLVTLWVFIGVEGAVVLSGRAKNSRDVGKATVLGLILVMSIYILISVLSMGAMTRGELSVLETPSMGHVLEHVVGTWGAVAINIGLVASLVXTLIGWFLLVSEISHVAGKDGVFPKVFTKTNKKQTPHMALWISNGVAQVIFIIVLFSESTYQIMYFIASTSILVPYLLSALFQFKLVITNELKDAKVKNGSLALIASLYSVWLIYAAGLKNLLLVSIVYGIGIIVYVYARKEKGNRCFTGIERYVMWAIVVAAVTSLYMLLTGNIKM

SEQ ID NO: 1484 - DNA, 1431 bp, Solibacter usitatus Ellin6076
  CDS (1)..(1431): transl_table=11
atgaccacatcagcgacccagaagttctccctaccggtattgaccgccatggtcgtgggctctatggtgggcgccggtatcttttcgctgccccaaacctttggcagggtgaccggtgtatacggcgccctggtggcctggattatcgctggcgtaggcatgttgatgctggccttggtattccagactttggcacaacgcaagcctgatctggacgccggcgtttatgcctatgcgaaggccggcttcgggaattactggggcttcctctcggcgctcggttactgggcggggagttgcatcggcaacgtatcttactttgtgctgatcaagtcaaccctgggcgcgttcttcccagtattcggcgatggcaataccattcaggctgtcctggtttcgtcggtcatcttgtggaccttccatttcatgattctgcgcggcatcaaacaggctgcggtgttgaacacgattgcgaccgtcgccaagctcataccgatcctgatcttcatcgtcatcctggcgttcaacttcaacgcggacatcttccgcgataacctttggggcggcgcgggggcagaactcggcggccttttcagccaggtccgcgggacgatgctggtaaccgtattcgtgtttctgggaatcgaaggcgccagcgtctattcgcgctacgccaagaagcggagcgatgtcggcgtggccacggtgatgggatttctcggcgtgctctgcatcctggtcctggtcacgatgctctcgtacggcgtgctgccgcgggcggacctggcggggctgcggaatccgtcgatggcgggcgtgttggagtccgtggtgggccgctggggagcgatctttgtgagcgccggcctgattatttccgtgttgggcgcgtacctttcgtggacgctgctgtgcgcggaggttttgttctcagccgcggaaaacgagaccatgcccaccatgcttgcccaccagaacgcgaactcggtgccctcggcggctctgtggctgaccaacagtgtggtgcagctctttcttatccttaccttgtttgcgcaatatgcttttacccttgccctggaacttaccagctccatgaccctcattccgttcttcctggttgcggcatatgcggttcaactggcctggaaaggcgagacgtatgaagcagaacccgaccggcgccggcgggatctgaccctcgccagcctcgcactgttctatacggcctggctactattggcggcgggattgaaattccttctgctatccgccgtgatctacggtcccggcacggtgctgttcttcctagcgcgccgcgagcaaaacacctatgtattcacacccagggagcgaatcgcgtttgccgccgctgttatagccgcgattgtcgccatcatcaagctggcgtccggttccatttctatttag

SEQ ID NO: 1485 - protein, 476 aa, Solibacter usitatus Ellin6076
MTTSATQKFSLPVLTAMVVGSMVGAGIFSLPQTFGRVTGVYGALVAWIIAGVGMLMLALVFQTLAQRKPDLDAGVYAYAKAGFGNYWGFLSALGYWAGSCIGNVSYFVLIKSTLGAFFPVFGDGNTIQAVLVSSVILWTFHFMILRGIKQAAVLNTIATVAKLIPILIFIVILAFNFNADIFRDNLWGGAGAELGGLFSQVRGTMLVTVFVFLGIEGASVYSRYAKKRSDVGVATVMGFLGVLCILVLVTMLSYGVLPRADLAGLRNPSMAGVLESVVGRWGAIFVSAGLIISVLGAYLSWTLLCAEVLFSAAENETMPTMLAHQNANSVPSAALWLTNSVVQLFLILTLFAQYAFTLALELTSSMTLIPFFLVAAYAVQLAWKGETYEAEPDRRRRDLTLASLALFYTAWLLLAAGLKFLLLSAVIYGPGTVLFFLARREQNTYVFTPRERIAFAAAVIAAIVAIIKLASGSISI

SEQ ID NO: 1486 - DNA, 1470 bp, Nocardioides sp. JS614
  CDS (1)..(1470): transl_table=11
atgactcagcagatggtccgaccaccgtcgggcccgagccctgagcagtccgcgagaggcgccggcaccctggcgctgcccgccctgatcgccctcgtcgtggggtccatgatcggtagcggcatcttcgcgctgccctcgcagatggccgggagcgctgctcccgggccgctgctcatcggctggctggtgaccggcgtcggcatgctgatgctggcgttcgtgttccagaccctgtcgcgccgcaagcccgacgtggacggcggcgtctacggatacgcccgcgccggcttcggcaactacctcggcttcacctcggcctggggctactggatcagtgcctggatcggcaacgtgggctacctcgtcctgctgatgtcgacgctgggctacttcgtgccggcgttcgagggcggcaacaccgtggcggccatcatcggggcctccgtcgtgctgtgggtcgtccaggcgctgacgctgcgcggcgtccagagcgccgcgttcgtcaacaccctcgtgacgatcgccaagatcgtgccgctcctgaccttcatcgcgatcgcagccgtcggcttcaaggccggtatcttcaccgccgacgtgtggggcgacagtgcgggcctcggctccaccctggaccaggtcaagaacatgatgctggtcaccgtctgggtgttcatcggcatcgagggtgccgcggtctacagccagcgcgccacccggcgcagcgacgtcggccgggcgaccgtgatcggcttcgtcggcgtactggcgctgctgctcgccgtcaacgtgctctcctacggcctgatgagccaggccaagctggccgggctcgaagacccgtcgatggcgggcctgatgcggcaggaggtcggcgcctggggcaccggcttcatctcgatcgggctcgcggtctcggtggccggcgcgctcctcgcctgggtgctcctgagcgtggagatcctgcggctgcccgcccgggagggcgtgctcccgcgccagctcggcacggagaaccggtacggcgcaccatcggtcgccctgtggctgaccagcggttgcgtccagctgatgctgctgtggaccctggtcaacgagaacacctacaccgacctgatctacctggcgacctccctgatcctgctgccgtacctctggtcggcgctctaccaggtcaagctggcgatcagcggtgagtcctacgcccagggcgagagccggacgcgcgacctcctggtcggactggtggccctcgcctacgccgtgtggctggtctacgcgggtggctgggagtacgtgctggtcgccggcatcttctacctggtcggcaccgcgctctacgtctgggcacgctcgcaggcccgggccgcgatcttcacggtcgccgagcgcgcggtcgtggccgtggtcgtcggcctctccatcgccggcgtcatcggcctggtccagggcttcgtctcgatctga

SEQ ID NO: 1487 - protein, 489 aa, Nocardioides sp. JS614
MTQQMVRPPSGPSPEQSARGAGTLALPALIALVVGSMIGSGIFALPSQMAGSAAPGPLLIGWLVTGVGMLMLAFVFQTLSRRKPDVDGGVYGYARAGFGNYLGFTSAWGYWISAWIGNVGYLVLLMSTLGYFVPAFEGGNTVAAIIGASVVLWVVQALTLRGVQSAAFVNTLVTIAKIVPLLTFIAIAAVGFKAGIFTADVWGDSAGLGSTLDQVKNMMLVTVWVFIGIEGAAVYSQRATRRSDVGRATVIGFVGVLALLLAVNVLSYGLMSQAKLAGLEDPSMAGLMRQEVGAWGTGFISIGLAVSVAGALLAWVLLSVEILRLPAREGVLPRQLGTENRYGAPSVALWLTSGCVQLMLLWTLVNENTYTDLIYLATSLILLPYLWSALYQVKLAISGESYAQGESRTRDLLVGLVALAYAVWLVYAGGWEYVLVAGIFYLVGTALYVWARSQARAAIFTVAERAVVAVVVGLSIAGVIGLVQGFVSI

SEQ ID NO: 1488 - DNA, 1428 bp, Oenococcus oeni
  CDS (1)..(1428): transl_table=11
atgaacaattcaaagggcaaattaaacctaatagaattaatcggtcttgtggtgggctcaattattggtggtggaatttttaacttaatgcatgatatggctgctggagctggagctggagccataattattgggtggataattaccgctatcggaatgattatgttggcatttacattccagaatttgacaatgaagcggccagatcttgatgctggaatttatagttatgcgaaagctggttttggaagttatatgggatttgattcagcttgggcttattggctttctgcttggttaggaaatgttggttatgcaacgcttttaatgagtgctgcagcgtatttttttccagtttttggaaatggacaaaatctcgcttctatagttatggcctcggttattctttggggatgccattttatgattttgcatggtgcaaaatcagcatcatttgtgaataccattataacgattgcaaagttaattccaatttttatctttacggtcatcatgattatatcttttaaaatgggtattttcacgcatggtttctggtacactccaaatggaaaatttcagtttacagacgttatgagccaagttcgttcaacgatgcttgttacggtgtgggtgtttattggaattgaaggagctgttgttttctcaagcagagcaaatcgtcgcaaagatgttggcagagcaactgtcttaggcattattattgttactttaatttacatgctagtcacgttgctatctttaggtgttatgcgtcgtagcggtttagctaatctaagccaaccagcaatggcttatctattaaagagcgttgttggttcttggggagcaatgattgttaatttaggattaattgtttcggttgtaagagcctggctttcttggaccatgtttgccggtcaattaccatacgaagctgcgaaaaagggttcatttcctagactcttcgcaaaagaaaataaaaatggtgctccaataaattcacttatttttacgaatgtttgtgtagaactttttatgttttcctttttaattactgcttcagcttataatttcttttactcaatttctagtgctggaattttaattccatatgctttttcagcattttatcaacttaaatattcgcttaatgaaaataaagatgatccaggacgtagcaggaacgtcgtaattggagtaattgccagtatatatgcttgttggcttgtgtttgcagctggtgaaaattatcttcttttactaatgcttttatttgcagctggaattcctgtttattgttatctacagaagcacgacaatcatactaaagtttttggtcctattgaattagctgttgcgggtttgacagttctagctgccatctatgctatttatggtttaattgttggttcgattactttttaa

SEQ ID NO: 1489 - protein, 475 aa, Oenococcus oeni
MNNSKGKLNLIELIGLVVGSIIGGGIFNLMHDMAAGAGAGAIIIGWIITAIGMIMLAFTFQNLTMKRPDLDAGIYSYAKAGFGSYMGFDSAWAYWLSAWLGNVGYATLLMSAAAYFFPVFGNGQNLASIVMASVILWGCHFMILHGAKSASFVNTIITIAKLIPIFIFTVIMIISFKMGIFTHGFWYTPNGKFQFTDVMSQVRSTMLVTVWVFIGIEGAVVFSSRANRRKDVGRATVLGIIIVTLIYMLVTLLSLGVMRRSGLANLSQPAMAYLLKSVVGSWGAMIVNLGLIVSVVRAWLSWTMFAGQLPYEAAKKGSFPRLFAKENKNGAPINSLIFTNVCVELFMFSFLITASAYNFFYSISSAGILIPYAFSAFYQLKYSLNENKDDPGRSRNVVIGVIASIYACWLVFAAGENYLLLLMLLFAAGIPVYCYLQKHDNHTKVFGPIELAVAGLTVLAAIYAIYGLIVGSITF

SEQ ID NO: 1490 - DNA, 1437 bp, Clostridium perfringens
  CDS (1)..(1437): transl_table=11
atggcagagcaacataatgaaccaaaaaaattaggatttgctcaattagcagccttaatagttggttctatgattggtggcggagctttcaaccttccatcagatatggcaaggggagctggtactggagcagttataataggatggattataacaggtattggtatgatagctttagcatttgtttatcaatcattagctaacagaaagcctgaattaacaggtggtgtttatagctatgcgaaagcagggtttggagagtacataggatttaattcagcttggggatattggttaagtgcatggataggaaatgtatcttattcagtacttctatttggagcagtaggttacttcctacctatgtttggtgcaggaaataacgtagcatctattattggtgcatcagtattactttgggcatttacattactaatattaaatggggtaagtggagcagcacttataaatcttataactactatagctaagttggttccaatattcttatttatagttatctcattatttatgtttaattttgataaatttactttccaattttggggtacaagtgatttaggcggaattgtaacacaggtaaagagtactatgctagtaacattatggtgcttcataggaattgagggagctgtagttgtttcaggaagagctaagaaacaaagcgacgtaggtaaggcaacagtacttggtcttataggaacattaataatatatatgttaataacattaatggcacttggagttatggacagagttaaactttcaggtcttgaaaacccatcaatggcatatgttcttgaatttgcagttggtaaatggggagcagttcttataaatttaggattgataatttcattatttggatcacttcttggatgggcattacttgcagcagaaattccttatgtagcagctaaggatggggtattacctaaagtctttgctaaattaaataaaaagggaacaccaagtggttcattaataataactaatttattagtacaagcatttttaatattaactttagtagcaagcagtacttatcaagctttatactctgtagctagtacagctatattggtaccttatcttttaagtgctatgtatggatttaagttagcactaacaggtgaaacttacgataaaaatcctacagggagaactcgagataaaatttttggtggaatagcaaccgtttacgctatatggctatgctatgcagcaggacttaaatatttattattatgtttcatattatatgcagtaggaattatattcttctacattggtaagaaacagaataataaagatgcagaagtatttgtaggaaaagaaaaaatactagcaataattgttttagttatagcaattatagcaatagtaatgttatttaacggaacaataactatttag

SEQ ID NO: 1491 - protein, 478 aa, Clostridium perfringens
MAEQHNEPKKLGFAQLAALIVGSMIGGGAFNLPSDMARGAGTGAVIIGWIITGIGMIALAFVYQSLANRKPELTGGVYSYAKAGFGEYIGFNSAWGYWLSAWIGNVSYSVLLFGAVGYFLPMFGAGNNVASIIGASVLLWAFTLLILNGVSGAALINLITTIAKLVPIFLFIVISLFMFNFDKFTFQFWGTSDLGGIVTQVKSTMLVTLWCFIGIEGAVVVSGRAKKQSDVGKATVLGLIGTLIIYMLITLMALGVMDRVKLSGLENPSMAYVLEFAVGKWGAVLINLGLIISLFGSLLGWALLAAEIPYVAAKDGVLPKVFAKLNKKGTPSGSLIITNLLVQAFLILTLVASSTYQALYSVASTAILVPYLLSAMYGFKLALTGETYDKNPTGRTRDKIFGGIATVYAIWLCYAAGLKYLLLCFILYAVGIIFFYIGKKQNNKDAEVFVGKEKILAIIVLVIAIIAIVMLFNGTITI

SEQ ID NO: 1492 - DNA, 1449 bp, Pseudomonas aeruginosa
  CDS (1)..(1449): transl_table=11
atgtcccaagaatccagccaaaaactccgactaggagcgctaacggctctggttgtcggctcgatgatcggagggggcatcttctccctcccgcaaaacatggcagccagcgccgatgtcggcgccgtcctgatcggatgggcgatcaccgccgtcggcatgctcaccctcgctttcgtcttccagaccctcgccaaccgcaagcccgaactcgacggcggcgtgtacgcctacgccaaggccggcttcggcgactacatgggtttctcctcggcctggggctactggatcagcgcctggctgggcaacgtcggctacttcgtcctgttgttcagcaccctcggctacttcttcccgatcttcggcaagggcgacaccgtcgcggcgatcgtctgcgcctcggtcctgctctgggccctgcacttcctggtgctgcgcgggatcaaggaggcggcgttcatcaacaccgtcaccaccgtggccaaggtcgtgccgctgttcctgttcatcctgatctgcctgttcgccttcaagctggacatcttcaccgccgacatctggggcaagagcaacccggacctgggcagcgtgatgaaccaggtgcgcaacatgatgctggtcaccgtctgggtgttcatcggcatcgagggcgcgagcatcttctcctcccgcgcggaaaaacgttccgacgtcggcaaggccaccgtgatcggcttcatcaccgtcctgctcctgctggtgctggtcaacgtgctgtccatgggcgtgatgacccagccggaactggccaagctgcagaacccgtcgatggcgctggtactcgagcatgtggtcggccactggggcgccgtgctgatcagcgtcggcctgctgatctcgctgctgggcgcgctgctctcctgggtgctgctgtgcgccgagatcatgttcgccgccgccaaggaccacaccatgccggagttcctgcgccgcgagaacgccaaccaggtgccggccaacgccctgtggctgaccaacatctgcgtacaggtgttcctggtggtggtgttcttcacctcgggcgacccggacggcatggacccgtacaccaagatgctgctcctggccacctcgatgatcctgatcccgtacttctggtccgccgcctatggcctgctgctgaccctgaagggcgagacctacgagaacgatgcccgcgaacgcagcaaggacctggtcatcgccggcatcgccgtggcctacgcggtctggctgctctacgcggggggcctgaagtacctgctgctgtccgccctgctgtatgcgcccggcgcgatccttttcgccaaggccaagcacgaggtcggccagccgatcttcaccggaatcgaaaaactgatcttcgccgcagtcgtcattggcgccctggtggctgcctacggcctctacgacggtttcctcaccctctga

SEQ ID NO: 1493 - protein, 482 aa, Pseudomonas aeruginosa
MSQESSQKLRLGALTALVVGSMIGGGIFSLPQNMAASADVGAVLIGWAITAVGMLTLAFVFQTLANRKPELDGGVYAYAKAGFGDYMGFSSAWGYWISAWLGNVGYFVLLFSTLGYFFPIFGKGDTVAAIVCASVLLWALHFLVLRGIKEAAFINTVTTVAKVVPLFLFILICLFAFKLDIFTADIWGKSNPDLGSVMNQVRNMMLVTVWVFIGIEGASIFSSRAEKRSDVGKATVIGFITVLLLLVLVNVLSMGVMTQPELAKLQNPSMALVLEHVVGHWGAVLISVGLLISLLGALLSWVLLCAEIMFAAAKDHTMPEFLRRENANQVPANALWLTNICVQVFLVVVFFTSGDPDGMDPYTKMLLLATSMILIPYFWSAAYGLLLTLKGETYENDARERSKDLVIAGIAVAYAVWLLYAGGLKYLLLSALLYAPGAILFAKAKHEVGQPIFTGIEKLIFAAVVIGALVAAYGLYDGFLTL

SEQ ID NO: 1494 - DNA, 1446 bp, Clostridium perfringens
  CDS (1)..(1446): transl_table=11
atgaatgataataaaaaattaggcgtaattgctcttgctggagtagtaattagtgctatgcttggtggaggtgtttataaccttccccaaaacatggcccaatccgcttctgcaggtgcaatattaatatcttggataataactgggataggaatttggttcatagctaacacctttagaatccttgctgctgcaagacctgatgctacaacaggtatatatacctatggtgaacttggttttgggaaatttacaggatttttaatggcctggggatattggatatgtaactcttttgcaaatgttggctatgccgtacttttaatggattcactaaactactttttcccaccttactttaaaggcggtaataactggctttcaatagcctgtggatctcttgtcctttggattatattctttatagtattggctggtgttaaacaagcaagtgctttaaatgtaataggaacaataggaaaattattacctttagcaattttcttactagttttattattctcatttagattttctacattctttactgacttctggggattaaaaaccgttgcaaaagttcatgatacaaacttaggaggaatattgcctcaagtaaaaagcacaatgcttgtaaccttatgggtatttactggtattgaaggtgccgttgttgtttctggaagagctaaatctcaaaaagatgttagtaaagcaacatttttaggatttattacttgtcttttaatttatacactactttcattattaccacttggtgtatattcacaaggagaaatttctaaaatggctccaccatcaacagctgcagtattaatggatttaataggaaactggggaagtgtaataatgaaccttggtgtaattatagcaatattaagttcttggcttatttggactgtaatgctttcagaattaccttttgcagcagcccaaagcggaacattcccaaaaatatttgctaaagaaaataaaaatgaatcaccttcattttctttattagcatcaacaatcattatgcaaataatattaatacttgttcattttgcaggtaatgcatggaatatgatgcttagtataacaagtgttatggcacttccttgttatcttgtttctaccttatatttatttaagataacatataaaaacgaaaactatccaacagatatctttgccaaaagaaaatatgcaatgattactgcaatattaggatcaatttatggtgtttggttaatttacgctgctggaatcaactatatgcttatagctatagttatatatgctttaggaattcctgtattcataaaagctagacgtgaaactagtcctaatgaaaaagaatttactaaagttgaacgttactttgcaatagttttgataatacttgccttaataggcttagtatatttatttaaatttatgtaa

SEQ ID NO: 1495 - protein, 481 aa, Clostridium perfringens
MNDNKKLGVIALAGVVISAMLGGGVYNLPQNMAQSASAGAILISWIITGIGIWFIANTFRILAAARPDATTGIYTYGELGFGKFTGFLMAWGYWICNSFANVGYAVLLMDSLNYFFPPYFKGGNNWLSIACGSLVLWIIFFIVLAGVKQASALNVIGTIGKLLPLAIFLLVLLFSFRFSTFFTDFWGLKTVAKVHDTNLGGILPQVKSTMLVTLWVFTGIEGAVVVSGRAKSQKDVSKATFLGFITCLLIYTLLSLLPLGVYSQGEISKMAPPSTAAVLMDLIGNWGSVIMNLGVIIAILSSWLIWTVMLSELPFAAAQSGTFPKIFAKENKNESPSFSLLASTIIMQIILILVHFAGNAWNMMLSITSVMALPCYLVSTLYLFKITYKNENYPTDIFAKRKYAMITAILGSIYGVWLIYAAGINYMLIAIVIYALGIPVFIKARRETSPNEKEFTKVERYFAIVLIILALIGLVYLFKFM

SEQ ID NO: 1496 - DNA, 24 bp, Artificial sequence
  primer
atggaaaagaaactgggactgagc

SEQ ID NO: 1497 - DNA, 20 bp, Artificial sequence
  primer
ttatcccaccagcatccagg

SEQ ID NO: 1498 - protein, 466 aa, Artificial sequence
  consensus sequence
  Variant (2)..(5): Xaa in position 2 to 5 is any amino acid
  Variant (7)..(8): Xaa in position 7 to 8 is any amino acid
  Variant (11)..(12): Xaa in position 11 to 12 is any amino acid
  Variant (15)..(15): Xaa in position 15 is any amino acid
  Variant (17)..(17): Xaa in position 17 is any amino acid
  Variant (19)..(19): Xaa in position 19 is any amino acid
  Variant (21)..(21): Xaa in position 21 is any amino acid
  Variant (23)..(25): Xaa in position 23 to 25 is any amino acid
  Variant (27)..(29): Xaa in position 27 to 29 is any amino acid
  Variant (31)..(33): Xaa in position 31 to 33 is any amino acid
  Variant (35)..(36): Xaa in position 35 to 36 is any amino acid
  Variant (38)..(38): Xaa in position 38 is any amino acid
  Variant (40)..(40): Xaa in position 40 is any amino acid
  Variant (43)..(44): Xaa in position 43 to 44 is any amino acid
  Variant (46)..(48): Xaa in position 46 to 48 is any amino acid
  Variant (51)..(55): Xaa in position 51 to 55 is any amino acid
  Variant (57)..(60): Xaa in position 57 to 60 is any amino acid
  Variant (62)..(62): Xaa in position 62 is any amino acid
  Variant (64)..(65): Xaa in position 64 to 65 is any amino acid
  Variant (67)..(67): Xaa in position 67 is any amino acid
  Variant (69)..(69): Xaa in position 69 is any amino acid
  Variant (72)..(73): Xaa in position 72 to 73 is any amino acid
  Variant (77)..(79): Xaa in position 77 to 79 is any amino acid
  Variant (82)..(82): Xaa in position 82 is any amino acid
  Variant (89)..(93): Xaa in position 89 to 93 is any amino acid
  Variant (97)..(97): Xaa in position 97 is any amino acid
  Variant (99)..(108): Xaa in position 99 to 108 is any amino acid
  Variant (110)..(112): Xaa in position 110 to 112 is any amino acid
  Variant (113)..(117): Xaa in position 113 to 117 is any or no amino acid
  Variant (119)..(120): Xaa in position 119 to 120 is any amino acid
  Variant (123)..(124): Xaa in position 123 to 124 is any amino acid
  Variant (125)..(130): Xaa in position 125 to 130 is any or no amino acid
  Variant (132)..(134): Xaa in position 132 to 134 is any amino acid
  Variant (136)..(137): Xaa in position 136 to 137 is any amino acid
  Variant (139)..(141): Xaa in position 139 to 141 is any amino acid
  Variant (143)..(143): Xaa in position 143 is any amino acid
  Variant (145)..(147): Xaa in position 145 to 147 is any amino acid
  Variant (149)..(151): Xaa in position 149 to 151 is any amino acid
  Variant (153)..(155): Xaa in position 153 to 155 is any amino acid
  Variant (157)..(158): Xaa in position 157 to 158 is any amino acid
  Variant (160)..(161): Xaa in position 160 to 161 is any amino acid
  Variant (163)..(165): Xaa in position 163 to 165 is any amino acid
  Variant (167)..(170): Xaa in position 167 to 170 is any amino acid
  Variant (171)..(173): Xaa in position 171 to 173 is any or no amino acid
  Variant (175)..(178): Xaa in position 175 to 178 is any amino acid
  Variant (180)..(184): Xaa in position 180 to 184 is any amino acid
  Variant (186)..(194): Xaa in position 186 to 194 is any amino acid
  Variant (195)..(202): Xaa in position 195 to 202 is any or no amino acid
  Variant (205)..(207): Xaa in position 205 to 207 is any amino acid
  Variant (210)..(210): Xaa in position 210 is any amino acid
  Variant (212)..(212): Xaa in position 212 is any amino acid
  Variant (216)..(216): Xaa in position 216 is any amino acid
  Variant (218)..(218): Xaa in position 218 is any amino acid
  Variant (222)..(224): Xaa in position 222 to 224 is any amino acid
  Variant (226)..(226): Xaa in position 226 is any amino acid
  Variant (229)..(232): Xaa in position 229 to 232 is any amino acid
  Variant (236)..(236): Xaa in position 236 is any amino acid
  Variant (239)..(240): Xaa in position 239 to 240 is any amino acid
  Variant (242)..(245): Xaa in position 242 to 245 is any amino acid
  Variant (247)..(254): Xaa in position 247 to 254 is any amino acid
  Variant (256)..(257): Xaa in position 256 to 257 is any amino acid
  Variant (259)..(270): Xaa in position 259 to 270 is any amino acid
  Variant (275)..(281): Xaa in position 275 to 281 is any amino acid
  Variant (283)..(283): Xaa in position 283 is any amino acid
  Variant (286)..(291): Xaa in position 286 to 291 is any amino acid
  Variant (294)..(295): Xaa in position 294 to 295 is any amino acid
  Variant (297)..(301): Xaa in position 297 to 301 is any amino acid
  Variant (303)..(303): Xaa in position 303 is any amino acid
  Variant (305)..(309): Xaa in position 305 to 309 is any amino acid
  Variant (311)..(315): Xaa in position 311 to 315 is any amino acid
  Variant (317)..(321): Xaa in position 317 to 321 is any amino acid
  Variant (322)..(323): Xaa in position 322 to 323 is any or no amino acid
  Variant (325)..(330): Xaa in position 325 to 330 is any amino acid
  Variant (332)..(335): Xaa in position 332 to 335 is any amino acid
  Variant (337)..(339): Xaa in position 337 to 339 is any amino acid
  Variant (341)..(342): Xaa in position 341 to 342 is any amino acid
  Variant (344)..(347): Xaa in position 344 to 347 is any amino acid
  Variant (349)..(360): Xaa in position 349 to 360 is any amino acid
  Variant (361)..(366): Xaa in position 361 to 366 is any or no amino acid
  Variant (368)..(378): Xaa in position 368 to 378 is any amino acid
  Variant (380)..(380): Xaa in position 380 is any amino acid
  Variant (383)..(404): Xaa in position 383 to 404 is any amino acid
  Variant (405)..(416): Xaa in position 405 to 416 is any or no amino acid
  Variant (418)..(419): Xaa in position 418 to 419 is any amino acid
  Variant (421)..(422): Xaa in position 421 to 422 is any amino acid
  Variant (425)..(425): Xaa in position 425 is any amino acid
  Variant (428)..(428): Xaa in position 428 is any amino acid
  Variant (430)..(432): Xaa in position 430 to 432 is any amino acid
  Variant (436)..(438): Xaa in position 436 to 438 is any amino acid
  Variant (441)..(442): Xaa in position 441 to 442 is any amino acid
  Variant (444)..(461): Xaa in position 444 to 461 is any amino acid
  Variant (462)..(465): Xaa in position 462 to 465 is any or no amino acid
LXXXXLXXLVXXSMXGXGXFXLXXXMXXXAXXXAXXIXWXITXXGXXXLAXXXXXLXXXXPXLXXGXYXYAXXGFGXXXGFXSAWGYWXXXXXGNVXYXXXXXXXXXXFXXXXXXXXFXXGNXXXXXXXXSXXXWXXHXXXLXGXXXAXXXNXXXTXXKXXPXXXFXXXXXXXFXXXXFXXXXXGXXXXXXXXXXXXXXXXXQVXXXMLXTXWVFXGXEGAXXXSXRAXXXXDVGXATXXGXXXXLXXXXXXXXLXXGXXXXXXXXXXXXPSMAXXXXXXXGXWGXXXXXXGLXXSXXXXXLXWXXXXXEXXXXXAXXXXXXXPXXXXXXNXXXXPXXXLXXTXXXXQXXXXXXXXXXXXXXXXXXYXXXXXXXXXXXLXPYXXXXXXXXXXXXXXXXXXXXXXXXXXXXXXXXXXAXXYXXWLXYAXGXXXLLLXXXLYXXGXXXXXXXXXXXXXXXXXXXXXXE

SEQ ID NO: 1499 - protein, 59 aa, Artificial sequence
  protein pattern
  Variant (2)..(3): Xaa in position 2 to 3 is any amino acid
  Variant (5)..(6): Xaa in position 5 to 6 is any amino acid
  Variant (8)..(8): Xaa in position 8 is Ile or Met
  Variant (9)..(10): Xaa in position 9 to 10 is any amino acid
  Variant (11)..(11): Xaa in position 11 is Phe, Ile or Leu
  Variant (12)..(12): Xaa in position 12 is Ala, Gly, Thr or Val
  Variant (13)..(17): Xaa in position 13 to 17 is any amino acid
  Variant (19)..(19): Xaa in position 19 is Ala, Ser or Thr
  Variant (20)..(21): Xaa in position 20 to 21 is any amino acid
  Variant (22)..(22): Xaa in position 22 is Lys or Arg
  Variant (24)..(24): Xaa in position 24 is Asp, Glu or Gln
  Variant (25)..(25): Xaa in position 25 is Ala, Leu or Val
  Variant (26)..(26): Xaa in position 26 is any amino acid
  Variant (27)..(27): Xaa in position 27 is Ala, Asp, Glu, Gly, Asn, Ser or Thr
  Variant (29)..(29): Xaa in position 29 is Ile or Val
  Variant (30)..(30): Xaa in position 30 is Phe or Tyr
  Variant (31)..(31): Xaa in position 31 is any amino acid
  Variant (33)..(33): Xaa in position 33 is Ala, Gly or Ser
  Variant (34)..(35): Xaa in position 34 to 35 is any amino acid
  Variant (36)..(36): Xaa in position 36 is Gly or Ser
  Variant (37)..(37): Xaa in position 37 is any amino acid
  Variant (39)..(41): Xaa in position 39 to 41 is any amino acid
  Variant (43)..(45): Xaa in position 43 to 45 is any amino acid
  Variant (46)..(46): Xaa in position 46 is Ala or Gly
  Variant (48)..(48): Xaa in position 48 is Ala or Gly
  Variant (51)..(51): Xaa in position 51 is Phe, Ile, Leu or Val
  Variant (52)..(52): Xaa in position 52 is Ala, Cys or Ser
  Variant (53)..(53): Xaa in position 53 is Ala, Gly, Asn, Gln or Thr
  Variant (54)..(54): Xaa in position 54 is any amino acid
  Variant (55)..(55): Xaa in position 55 is Phe, Ile, Leu or Val
  Variant (56)..(56): Xaa in position 56 is Ala or Gly
  Variant (57)..(57): Xaa in position 57 is any amino acid
  Variant (58)..(58): Xaa in position 58 is Ala or Val
  Variant (59)..(59): Xaa in position 59 is Ala, Gly or Ser
WXXTXXGXXXXXXXXXXLXXXXPXXXXGXXXYXXXXXGXXXGXXXXWXYWXXXXXXXXX

SEQ ID NO: 1500 - protein, 41 aa, Artificial sequence
  protein pattern
  Variant (2)..(4): Xaa in position 2 to 4 is any amino acid
  Variant (5)..(5): Xaa in position 5 is any or no amino acid
  Variant (7)..(7): Xaa in position 7 is any or no amino acid
  Variant (9)..(9): Xaa in position 9 is Ile or Val
  Variant (11)..(11): Xaa in position 11 is Leu or Val
  Variant (13)..(13): Xaa in position 13 is Ala or Val
  Variant (15)..(15): Xaa in position 15 is any amino acid
  Variant (17)..(17): Xaa in position 17 is Ile or Val
  Variant (21)..(21): Xaa in position 21 is Ala, Ser or Val
  Variant (22)..(22): Xaa in position 22 is Ile, Leu, Met or Val
  Variant (23)..(23): Xaa in position 23 is any amino acid
  Variant (25)..(26): Xaa in position 25 to 26 is any amino acid
  Variant (28)..(31): Xaa in position 28 to 31 is any amino acid
  Variant (32)..(32): Xaa in position 32 is Ala, Asp or Ser
  Variant (33)..(33): Xaa in position 33 is Ile or Val
  Variant (35)..(35): Xaa in position 35 is any amino acid
  Variant (38)..(38): Xaa in position 38 is Ile, Leu, Met or Val
  Variant (39)..(39): Xaa in position 39 is Gly, Ile, Leu or Val
  Variant (40)..(40): Xaa in position 40 is Ala or Gly
  Variant (41)..(41): Xaa in position 41 is Phe, Ile, Leu or Val
QXXXXMXLXTXWXFXGXEGAXXXSXXAXXXXXXGXATXXXX

SEQ ID NO: 1501 - protein, 53 aa, Artificial sequence
  protein pattern
  Variant (2)..(3): Xaa in position 2 to 3 is any amino acid
  Variant (4)..(4): Xaa in position 4 is any or no amino acid
  Variant (6)..(6): Xaa in position 6 is any amino acid
  Variant (7)..(7): Xaa in position 7 is any or no amino acid
  Variant (9)..(12): Xaa in position 9 to 12 is any amino acid
  Variant (13)..(13): Xaa in position 13 is any or no amino acid
  Variant (15)..(16): Xaa in position 15 to 16 is any amino acid
  Variant (18)..(19): Xaa in position 18 to 19 is any amino acid
  Variant (20)..(20): Xaa in position 20 is Phe, Ile, Leu or Val
  Variant (21)..(21): Xaa in position 21 is any amino acid
  Variant (22)..(22): Xaa in position 22 is Ala, Gly, Asn, Ser or Thr
  Variant (23)..(23): Xaa in position 23 is any amino acid
  Variant (24)..(24): Xaa in position 24 is Cys or Gly
  Variant (25)..(25): Xaa in position 25 is Leu or Val
  Variant (26)..(26): Xaa in position 26 is Ala, Ile, Leu or Val
  Variant (27)..(27): Xaa in position 27 is Ile or Val
  Variant (28)..(28): Xaa in position 28 is Ala or Ser
  Variant (29)..(29): Xaa in position 29 is Ile, Leu or Val
  Variant (30)..(31): Xaa in position 30 to 31 is any amino acid
  Variant (32)..(32): Xaa in position 32 is Ala or Ser
  Variant (33)..(33): Xaa in position 33 is any amino acid
  Variant (34)..(34): Xaa in position 34 is Ile, Leu, Met or Val
  Variant (35)..(35): Xaa in position 35 is any amino acid
  Variant (37)..(37): Xaa in position 37 is Ala, Ser, Thr or Val
  Variant (38)..(38): Xaa in position 38 is Ile, Leu, Met or Val
  Variant (39)..(40): Xaa in position 39 to 40 is any amino acid
  Variant (41)..(41): Xaa in position 41 is Ala, Gly, Ser, Thr or Val
  Variant (42)..(42): Xaa in position 42 is Glu or Gln
  Variant (43)..(46): Xaa in position 43 to 46 is any amino acid
  Variant (47)..(47): Xaa in position 47 is Ala, Gly, Pro, Thr or Val
  Variant (48)..(48): Xaa in position 48 is Ala or Gly
  Variant (49)..(52): Xaa in position 49 to 52 is any amino acid
  Variant (53)..(53): Xaa in position 53 is Phe, Leu or Met
PXXXAXXLXXXXXGXXGXXXXXXXXXXXXXXXXXXWXXXXXXXXXXXXXXXXX

SEQ ID NO: 1502 - protein, 29 aa, Artificial sequence
  protein pattern
  Variant (2)..(6): Xaa in position 2 to 6 is any amino acid
  Variant (7)..(7): Xaa in position 7 is any or no amino acid
  Variant (9)..(10): Xaa in position 9 to 10 is any amino acid
  Variant (11)..(11): Xaa in position 11 is Leu or Met
  Variant (13)..(13): Xaa in position 13 is Ile, Leu or Val
  Variant (14)..(14): Xaa in position 14 is Gly or Ser
  Variant (15)..(15): Xaa in position 15 is Gly, Ser or Thr
  Variant (16)..(16): Xaa in position 16 is Ile, Leu or Met
  Variant (17)..(17): Xaa in position 17 is Ile, Leu or Val
  Variant (19)..(19): Xaa in position 19 is Ala, Gly or Ser
  Variant (21)..(21): Xaa in position 21 is Ala, Ile or Val
  Variant (23)..(23): Xaa in position 23 is Asp, Asn or Ser
  Variant (24)..(24): Xaa in position 24 is Ile or Leu
  Variant (25)..(26): Xaa in position 25 to 26 is any amino acid
  Variant (27)..(27): Xaa in position 27 is Asp, Asn or Thr
  Variant (28)..(28): Xaa in position 28 is Phe, Leu or Met
  Variant (29)..(29): Xaa in position 29 is Ala, Gly or Ser
KXXXXXXLXXXVXXXXXGXGXFXXXXXXX

SEQ ID NO: 1503 - protein, 22 aa, Artificial sequence
  protein pattern
  Variant (2)..(2): Xaa in position 2 is any amino acid
  Variant (3)..(3): Xaa in position 3 is any or no amino acid
  Variant (5)..(7): Xaa in position 5 to 7 is any amino acid
  Variant (8)..(8): Xaa in position 8 is any or no amino acid
  Variant (10)..(12): Xaa in position 10 to 12 is any amino acid
  Variant (13)..(13): Xaa in position 13 is Ala, Ser, Thr or Val
  Variant (15)..(16): Xaa in position 15 to 16 is any amino acid
  Variant (17)..(17): Xaa in position 17 is Ala or Ser
  Variant (19)..(19): Xaa in position 19 is any amino acid
  Variant (20)..(20): Xaa in position 20 is Ala, Ile, Leu or Val
  Variant (21)..(21): Xaa in position 21 is Ser or Thr
  Variant (22)..(22): Xaa in position 22 is Asn, Ser or Thr
PXXFXXXXNXXXXPXXXLXXXX

SEQ ID NO: 1504 - protein, 50 aa, Artificial sequence
  protein pattern
  Variant (2)..(2): Xaa in position 2 is any or no amino acid
  Variant (4)..(4): Xaa in position 4 is any or no amino acid
  Variant (6)..(6): Xaa in position 6 is Asn, Gln or Thr
  Variant (7)..(7): Xaa in position 7 is Asn, Ser or Thr
  Variant (8)..(9): Xaa in position 8 to 9 is any amino acid
  Variant (10)..(10): Xaa in position 10 is Ala or Ser
  Variant (11)..(11): Xaa in position 11 is Ile, Leu or Val
  Variant (12)..(12): Xaa in position 12 is Ala, Gly, Ile, Leu or Val
  Variant (13)..(13): Xaa in position 13 is any amino acid
  Variant (14)..(14): Xaa in position 14 is Ala, Glu, Gly or Ser
  Variant (16)..(16): Xaa in position 16 is any amino acid
  Variant (17)..(17): Xaa in position 17 is Ala, Ile, Leu or Val
  Variant (18)..(18): Xaa in position 18 is Ile or Leu
  Variant (20)..(23): Xaa in position 20 to 23 is any amino acid
  Variant (24)..(24): Xaa in position 24 is Ile, Leu, Met or Val
  Variant (25)..(25): Xaa in position 25 is any amino acid
  Variant (27)..(27): Xaa in position 27 is any amino acid
  Variant (29)..(29): Xaa in position 29 is Ala, Ile or Val
  Variant (30)..(30): Xaa in position 30 is any amino acid
  Variant (31)..(31): Xaa in position 31 is Glu, Gly, Gln, Ser or Thr
  Variant (33)..(33): Xaa in position 33 is Ala, Ser or Thr
  Variant (34)..(34): Xaa in position 34 is any amino acid
  Variant (35)..(35): Xaa in position 35 is Ile, Leu, Met or Val
  Variant (37)..(37): Xaa in position 37 is any amino acid
  Variant (38)..(38): Xaa in position 38 is Ala, Ile, Leu or Val
  Variant (39)..(39): Xaa in position 39 is any amino acid
  Variant (40)..(40): Xaa in position 40 is Ala, Thr or Val
  Variant (41)..(43): Xaa in position 41 to 43 is any amino acid
  Variant (44)..(44): Xaa in position 44 is Ile, Leu, Met or Val
  Variant (45)..(45): Xaa in position 45 is Ile, Leu or Val
  Variant (47)..(47): Xaa in position 47 is Ile, Leu or Val
  Variant (48)..(49): Xaa in position 48 to 49 is any amino acid
  Variant (50)..(50): Xaa in position 50 is Phe or Val
FXGXGXXXXXXXXXSXXXWXXXXXXLXGXXXAXXXNXXXXXXXXXPXXXX

SEQ ID NO: 1505 - protein, 17 aa, Artificial sequence
  protein pattern
  Variant (2)..(2): Xaa in position 2 is Ile or Leu
  Variant (3)..(3): Xaa in position 3 is Ile, Leu or Val
  Variant (6)..(6): Xaa in position 6 is any or no amino acid
  Variant (8)..(8): Xaa in position 8 is any amino acid
  Variant (9)..(10): Xaa in position 9 to 10 is any or no amino acid
  Variant (12)..(12): Xaa in position 12 is Phe, Leu or Met
  Variant (13)..(13): Xaa in position 13 is Leu or Met
  Variant (14)..(14): Xaa in position 14 is Ala, Ser, Thr or Val
  Variant (15)..(16): Xaa in position 15 to 16 is any amino acid
  Variant (17)..(17): Xaa in position 17 is Phe, Leu or Val
WXXYAXGXXXLXXXXXX

SEQ ID NO: 1506 - protein, 20 aa, Artificial sequence
  protein pattern
  Variant (2)..(4): Xaa in position 2 to 4 is any amino acid
  Variant (5)..(6): Xaa in position 5 to 6 is any or no amino acid
  Variant (8)..(8): Xaa in position 8 is Ala, Pro or Ser
  Variant (9)..(9): Xaa in position 9 is any amino acid
  Variant (11)..(11): Xaa in position 11 is any amino acid
  Variant (12)..(12): Xaa in position 12 is Ile, Leu, Met or Val
  Variant (13)..(13): Xaa in position 13 is any amino acid
  Variant (14)..(14): Xaa in position 14 is Gln or Arg
  Variant (15)..(16): Xaa in position 15 to 16 is any amino acid
  Variant (17)..(17): Xaa in position 17 is Ile or Leu
  Variant (18)..(18): Xaa in position 18 is Ala or Ser
  Variant (19)..(19): Xaa in position 19 is any amino acid
  Variant (20)..(20): Xaa in position 20 is Ile, Leu or Met
LXXXXXLXXGXXXXXXXXXX

SEQ ID NO: 1507 - DNA, 1047 bp, Escherichia coli K12
  CDS (1)..(1047): transl_table=11
atgaacagaactgacgaactccgtactgcgcgtattgagagcctggtaacgcccgccgaactcgcgctacggtatcccgtaacgcctggcgtcgccacccatgtcaccgactcccgccgcagaattgaaaaaatactgaatggtgaagataagcgactgttggtcattattggcccctgctcgatccacgatctcaccgctgcaatggagtacgccacccgtctgcagtcgctgcgcaaccagtaccagtcacggctggaaatcgtaatgcgcacctattttgaaaaaccacgaactgttgtcggctggaaaggactaatctccgatccagatttaaacggcagctatcgggtaaatcacggtctggagctggcgcgcaaattacttttacaggtaaatgagctgggcgtcccaaccgcgaccgagttcctcgatatggtgaccggtcagtttattgctgatttaatcagttggggcgcgattggcgcacgtactaccgaaagtcagatccaccgcgaaatggcttcggcactctcctgtccggtaggttttaaaaatggtaccgatggcaatacgcggattgctgtggatgctatccgcgcagcccgcgccagccatatgttcctctcgccagacaaaaatggtcagatgaccatctatcagaccagcggcaacccgtatggccacattattatgcgtggcggcaaaaaaccgaattatcatgccgatgatatcgccgcagcctgcgatacgctgcacgagtttgatttacctgaacatctggtggtggatttcagccacggtaactgccagaagcagcaccgtcgccagttagaagtttgtgaggatatttgtcagcaaatccgcaatggctctacggcgattgctggaattatggcggaaagtttcctgcgcgaaggaacgcaaaaaatcgtcggcagtcagccgctcacttacggtcaatccattaccgacccgtgtctgggctgggaggataccgaacgcctggtcgaaaaactcgcctctgcggtagatacccgcttctga

SEQ ID NO: 1508 - protein, 348 aa, Escherichia coli K12
MNRTDELRTARIESLVTPAELALRYPVTPGVATHVTDSRRRIEKILNGEDKRLLVIIGPCSIHDLTAAMEYATRLQSLRNQYQSRLEIVMRTYFEKPRTVVGWKGLISDPDLNGSYRVNHGLELARKLLLQVNELGVPTATEFLDMVTGQFIADLISWGAIGARTTESQIHREMASALSCPVGFKNGTDGNTRIAVDAIRAARASHMFLSPDKNGQMTIYQTSGNPYGHIIMRGGKKPNYHADDIAAACDTLHEFDLPEHLVVDFSHGNCQKQHRRQLEVCEDICQQIRNGSTAIAGIMAESFLREGTQKIVGSQPLTYGQSITDPCLGWEDTERLVEKLASAVDTRF

SEQ ID NO: 1509 - DNA, 1083 bp, Methylophilus methylotrophus; AS-1
  CDS (1)..(1083)
atgactgcatacgaaaaattagccaccgatgatgtgcgcgtgcttgaaatcaagccgctggtaaagcccgcggagctattgtctcgcctgcaggaaagtacagtcagtacccaaaacatccttaaaacgcggtcagcgattcatcatattctccatcagggcgacgaccggttgctggtgattgttggcccttgttccatccatgacacggaagctggcatggagtacgcgcgacgcctgctcgatgtgcgtcagcgactgggtggcgaattgctcattgtcatgcgcgtctattttgagaaaccccgtaccacggtagggtggaaaggcctgatcaacgacccgcatctggatgggacttatgatatcaatcttggattggagaaggcccgccgtttcctgctggatgtgaatgaaattggcatgcctgcagccacagaattcctcgatgtggtctccccgcaatatactgctgacctggtcagctggggagctattggcgctcggacgacagagtctcagattcaccgcgaattggcctctggcctgtcttgtccggttggctttaaaaatgggaccgatggcggcgtcaaagttgccattgatgcgattaaggcagcagccagtccgcatcactttttgtccgtgaccaaagaaggcgaatccgctatttttgccaccaagggtaatgaagactgccatgtgattttacgtggcggtaaagcgccgaactttgatgcgcctagtgtggcagcagtatgcgaccaattggcagacgctggcctggcaccggtattgatggtggattgcagtcatggcaatagccagaagcaatataaaaaccaaatttcggtggtgaatgatgtggctagccaaatagcgggtggagatgctcgcataatcgggatcatgctagagtcgcatttgaacgaagggcgacaggatcattcgccaggctgcagccttaattatgggcaatccatcaccgatgcctgtttgggatgggaggactcagtggctgtgctggaaacgctggctgctgcagtcaaggcccgccgtgacaagcatgccgctgctgaataa

SEQ ID NO: 1510 - protein, 360 aa, Methylophilus methylotrophus; AS-1
MTAYEKLATDDVRVLEIKPLVKPAELLSRLQESTVSTQNILKTRSAIHHILHQGDDRLLVIVGPCSIHDTEAGMEYARRLLDVRQRLGGELLIVMRVYFEKPRTTVGWKGLINDPHLDGTYDINLGLEKARRFLLDVNEIGMPAATEFLDVVSPQYTADLVSWGAIGARTTESQIHRELASGLSCPVGFKNGTDGGVKVAIDAIKAAASPHHFLSVTKEGESAIFATKGNEDCHVILRGGKAPNFDAPSVAAVCDQLADAGLAPVLMVDCSHGNSQKQYKNQISVVNDVASQIAGGDARIIGIMLESHLNEGRQDHSPGCSLNYGQSITDACLGWEDSVAVLETLAAAVKARRDKHAAAE

SEQ ID NO: 1511 - DNA, 1050 bp, Escherichia coli
  CDS (1)..(1050)
atgaattatcagaacgacgatttacgcatcaaagaaatcaaagagttacttcctcctgtcgcattgctggaaaaattccccgctactgaaaatgccgcgaatacggttgcccatgcccgaaaagcgatccataagatcctgaaaggtaatgatgatcgcctgttggttgtgattggcccatgctcaattcatgatcctgtcgcggcaaaagagtatgccactcgcgttctggcgctgcgtgaagagctgaaagatgagctggaaatcgtaatgcgcgtctattttgaaaagccgcgtaccacggtgggctggaaagggttgattaacgatccgcatatggataatagcttccagatcaacgacggtttgcgtatagcccgtaaattgctgcttgatattaacgacagcggtctgccagcggcaggtgagtttctcgatatgatcaccccacaatatctcgctgacctgatgagctggggcgcaattggcgcacgtaccaccgaatcgcaggtgcaccgcgaactggcatcagggctttcttgtccggtcggcttcaaaaatggcaccgacggtacgattaaagtggctatcgatgccattaatgccgccggtgcgccgcactgcttcctgttcgtaacgaaatgggggcattcggcgattgtgaataccagcggtaacggcgattgccatatcattctgcgcggcggtaaagagcctaactacagcgcgaagcacgttgctgaagtgaaagaagggctgaacaaagcaggcctgccagcacaggtgatgatcgatttcagccatgctaactcgtccaaacaattcaaaaagcagatggatgtttgtgctgacgtttgccagcagattgccggtggcgaaaaggccattattggcgtgatggtggaaagccatctggtggaaggcaatcagagcctcgagagcggggagccgctggcctacggtaagagcatcaccgatgcctgcatcggctgggaagataccgatgctctgttacgtcaactggcgaatgcagtaaaagcgcgtcgcggg

SEQ ID NO: 1512 - protein, 350 aa, Escherichia coli
MNYQNDDLRIKEIKELLPPVALLEKFPATENAANTVAHARKAIHKILKGNDDRLLVVIGPCSIHDPVAAKEYATRVLALREELKDELEIVMRVYFEKPRTTVGWKGLINDPHMDNSFQINDGLRIARKLLLDINDSGLPAAGEFLDMITPQYLADLMSWGAIGARTTESQVHRELASGLSCPVGFKNGTDGTIKVAIDAINAAGAPHCFLFVTKWGHSAIVNTSGNGDCHIILRGGKEPNYSAKHVAEVKEGLNKAGLPAQVMIDFSHANSSKQFKKQMDVCADVCQQIAGGEKAIIGVMVESHLVEGNQSLESGEPLAYGKSITDACIGWEDTDALLRQLANAVKARRG

SEQ ID NO: 1513 - DNA, 1052 bp, Neisseria meningitidis
  CDS (1)..(1050)
atgacacaccattaccccacagacgatattaagattaaagaagttaaagagttgttgccgccgattgcccatctttacgagctgccgatttccaaagaggcttcgggcttggttcaccgcacccgtcaggaaatttccgatttggttcacggcagggacaagcggctgttggttattatcgggccgtgttcgattcacgatccgaaagcggcgttggaatatgcggagcgtttgttgaaactccgcaagcagtatgaaaacgagcttttgattgtgatgcgcgtttatttcgagaagccgaggacgacggtgggttggaaaggtttgattaacgacccgcatttggacggtacgtttgacatcaatttcggtttgcgtcaggcacgcagcctgttgttgtcgctgaacaatatgggtatgcctgcctctaccgagtttttggatatgattacgccgcaatattatgcggacttgatttcttggggggcaatcggcgcgcggacgaccgaaagccaagttcaccgcgaattggcaagcgggctgtcctgccccgtcggctttaaaaacggtacggatggcaatttgaagattgccatcgacgcaatcggtgcggcgagccattcgcatcatttcctgtctgtaaccaaggccgggcattccgccattgtccataccggcggcaatcctgactgtcatgtcattttgcgcggcggaaaagagccgaattatgatgcgggacacgtcagcgaggcggcggaacaactgcgtgcggcaggcgtaaccgacaagctgatgattgattgcagccacgccaacagccgcaaggattacacccgacagatggaagtggcgcaagacattgccgcccaattggaacaggacggcggcaatattatgggcgtgatggtggaaagccatttggtcgaaggcaggcaggacaagccggaagtgtacggcaaaagcattaccgatgcgtgtattggttgggacgcgactgaagaactgttggcattgttggcaggtgcaaacaaaaaacgtatggcgcgcgccgg

SEQ ID NO: 1514 - protein, 350 aa, Neisseria meningitidis
MTHHYPTDDIKIKEVKELLPPIAHLYELPISKEASGLVHRTRQEISDLVHGRDKRLLVIIGPCSIHDPKAALEYAERLLKLRKQYENELLIVMRVYFEKPRTTVGWKGLINDPHLDGTFDINFGLRQARSLLLSLNNMGMPASTEFLDMITPQYYADLISWGAIGARTTESQVHRELASGLSCPVGFKNGTDGNLKIAIDAIGAASHSHHFLSVTKAGHSAIVHTGGNPDCHVILRGGKEPNYDAGHVSEAAEQLRAAGVTDKLMIDCSHANSRKDYTRQMEVAQDIAAQLEQDGGNIMGVMVESHLVEGRQDKPEVYGKSITDACIGWDATEELLALLAGANKKRMARA

SEQ ID NO: 1515 - DNA, 1059 bp, Photorhabdus luminescens
ttgagaaaatatatgtacaaaacagatggtttaaggactcaccgtgtcgatagtttagtcacacctcaaactcttgcaattcaatttcctgtatccgaaaaaatcgtcaataatgtgacagcgtcacggaaacgtattgccgatattctcagcgggaatgatccacggcttatggtaatcatcggtccttgttctattcatgatattgatgctgctttagattatgctcagcgactgaacaggttacgtgaaaaataccagcacagactggaaattattatgcgcacctattttgagaaaccacgcacagtggtgggctggaaaggtttaatttcagacccctatctcgacggttcttgccaggtaaatcggggtattactttggcccggaaattattggttgatgtcaatgagttgggtttacccacagcaaccgaatttctggatatggtgaccggccaatatattgccgatctgatcagttggggcgcgatcggagccagaacaacagaaagccagattcaccgagaaatggcatctgccctctcctgtccagttggctttaaaaatggaacggatggcaacatccgtatcgccatagatgcaatccgcgcagccggggtctgtcacacattcctctcgccggataagcgcggtcagatgaccatctatcaaaccgaaggcaacccatacggccacattattatgcgtggaggcaaacagcctaattacagtgccaaagatattgctacagcttgtactcaactacgtgaatttaatttaccagaacatttagttatcgatttcagtcatggtaattgtcaaaaaattcataaacgccaactgactatagcaaaagaggtgggtcaccagattcaagagggttctaccgctattgtcggtgtaatggttgaaagttttctggttgaaggcacccagcaagtcattcagggacaaccgctaaattacggtcaatcgatcaccgatccttgtctaaactggcaagatacagaacagcttattgacattctcgccgaagcagtaagttaccgtttctga

SEQ ID NO: 1516 - protein, 353 aa, Photorhabdus luminescens
LRKYMYKTDGLRTHRVDSLVTPQTLAIQFPVSEKIVNNVTASRKRIADILSGNDPRLMVIIGPCSIHDIDAALDYAQRLNRLREKYQHRLEIIMRTYFEKPRTVVGWKGLISDPYLDGSCQVNRGITLARKLLVDVNELGLPTATEFLDMVTGQYIADLISWGAIGARTTESQIHREMASALSCPVGFKNGTDGNIRIAIDAIRAAGVCHTFLSPDKRGQMTIYQTEGNPYGHIIMRGGKQPNYSAKDIATACTQLREFNLPEHLVIDFSHGNCQKIHKRQLTIAKEVGHQIQEGSTAIVGVMVESFLVEGTQQVIQGQPLNYGQSITDPCLNWQDTEQLIDILAEAVSYRFZ

SEQ ID NO: 1517 - DNA, 1053 bp, Photorhabdus luminescens
atgaattaccagaatgacgatataagaattaaagagataaaagaattattacctcctgtggcactacttgaaaaatttccagcaactgaaaaggctgcattgacagtatgtaaggcgcgtaaaacgattcatcaaattctgacgggtgaagatgagcgtctgttggtggtgattgggccatgttctattcatgatcctaaagcagcaatggaatatgccgggcggttgaatgaattgcgtgaagagctgaaagaggatctggaagttgtcatgcgagtttattttgaaaaaccgcgcacaactattggctggaaagggttaattaatgaccctcatatgaatcacagttttgatattaatgatggtttgcgtttagctcgtcagttgttacgggatattaatgatatggggctaccggctgcgggtgaatatctggatatgatttctccacagtatttagccgatttgatgagttggggagcaattggcgctcgtacaacggaatctcaggtccatcgtgagttggcttctggtctttcctgtccggttggttttaaaaatggtactgatggtgcgataaaagttgccattgatgcgattaatgcagcgggttcccctcacagtttcctttctgtcactaagtggggacattctgcgattgtaaataccagcggaaacaacgattgtcatattatcctgcgtggcggtaaagagccgaattacagttctgaacatgttgctgtcgtgaagcaaaacttggaaaaagcaggtttaccggcaagaattatgattgatttcagtcatgccaatagttctaagcaatttaaaaagcagatggatgtgtgttcagatgtgagccggcagcttattgctggggagaaagcgattattggtgtcatggtagaaagtcatttggaagagggaaatcagaacccggatagcggtctgccattggtatatggcaaaagtattactgatgcttgcattggttgggctgacactgaaattttgttacgtcaattgtcgtcggcaataaaagcgcgtcgtggctga

SEQ ID NO: 1518 - protein, 351 aa, Photorhabdus luminescens
MNYQNDDIRIKEIKELLPPVALLEKFPATEKAALTVCKARKTIHQILTGEDERLLVVIGPCSIHDPKAAMEYAGRLNELREELKEDLEVVMRVYFEKPRTTIGWKGLINDPHMNHSFDINDGLRLARQLLRDINDMGLPAAGEYLDMISPQYLADLMSWGAIGARTTESQVHRELASGLSCPVGFKNGTDGAIKVAIDAINAAGSPHSFLSVTKWGHSAIVNTSGNNDCHIILRGGKEPNYSSEHVAVVKQNLEKAGLPARIMIDFSHANSSKQFKKQMDVCSDVSRQLIAGEKAIIGVMVESHLEEGNQNPDSGLPLVYGKSITDACIGWADTEILLRQLSSAIKARRGZ

SEQ ID NO: 1519 - DNA, 1182 bp, Klebsiella pneumoniae
  CDS (1)..(1182)
aaatttgtttatgctatcacccgtggcctatacaggatcatgccctgctcttgcaataagcagggattggtttatcgtgatgcgcatcacttcccggcattttcgccgcggaagaaacagatttttgagaccccaatgaataaaacagacgaattgcgtaccgcgcgcattgagagcctggtaacgcccgcggagctggcccagcgccatcccgtgacggccgacgtggctgcccacgtctcggcctcccgccgccgaattgaaaaaatcctcaacggcgaagaccgccgactgctggtgattatcggcccctgctccattcacgacaccgacgcggcgctggagtatgcccgccgcctgctgggcatgcgcgagcgctaccagccgcagctggagatcgtgatgcgcacctactttgaaaaaccgcgtaccgtggtgggctggaaaggcttaatctccgatcccgacctcaacggcagctaccgggtcaaccacggaattgagctggcgcggcgcctgctgctgcaggttaatgagctgggggtaccgacggccaccgagtttctcgatatggtgaccggtcagtttatcgccgatctcatcagctggggggccatcggggcgcgcaccactgaaagccagatccaccgtgaaatggcctcagcgctctcctgcccggttggatttaaaaacggcaccgacggcaatacgcgcatcgcggtggacgccatccgcgcctcccgcgccagccatatgttcctctctccggacaagcaggggcagatgacgatttaccagaccagcggcaatccgtatgggcatattattatgcgcggcggcaaacggccaaactatcacgccgaggatatcgccgccgccggcgaggcgctgcgtgaattcgatctgccggaacagctggtcgttgatttcagccatggcaactgccagaagcagcaccgccgtcagctggaggtgtgcgccgatatctgtcagcaaattcgcgcgggctccaccgccatcgccgggattatggccgaaagcttcctgcaggaaggcactcagaaagtggtccccggccagccgttgacctggggccagtcgatcaccgacccctgcctgagctgggaagacagcgaaagattattgagcgagctggctgcggccaccgccacccgcctgtaa

SEQ ID NO: 1520 - protein, 393 aa, Klebsiella pneumoniae
KFVYAITRGLYRIMPCSCNKQGLVYRDAHHFPAFSPRKKQIFETPMNKTDELRTARIESLVTPAELAQRHPVTADVAAHVSASRRRIEKILNGEDRRLLVIIGPCSIHDTDAALEYARRLLGMRERYQPQLEIVMRTYFEKPRTVVGWKGLISDPDLNGSYRVNHGIELARRLLLQVNELGVPTATEFLDMVTGQFIADLISWGAIGARTTESQIHREMASALSCPVGFKNGTDGNTRIAVDAIRASRASHMFLSPDKQGQMTIYQTSGNPYGHIIMRGGKRPNYHAEDIAAAGEALREFDLPEQLVVDFSHGNCQKQHRRQLEVCADICQQIRAGSTAIAGIMAESFLQEGTQKVVPGQPLTWGQSITDPCLSWEDSERLLSELAAATATRL

SEQ ID NO: 1521 - DNA, 1224 bp, Klebsiella pneumoniae
  CDS (1)..(1224)
cagttaaatattgtagttcatgagcctggtttcgctactttatggcgtatttttgcctatttccaggattattccatcactactgtaaaatcacgtttacactatttcagcgaagagatagattggagggattgcatttcattgaataagtatggcaacgctggaaagaagatgaattatcagaacgacgatttacgcattaaagagatcaacgaattattacctcccgttgcgctcctggaaaaattccctgctaccgaaaatgctgcaaacaccgttgcacatgctcgcaaagcgatccatcagatcctcaaaggcgacgatgaccgtctgctggtggtgattgggccttgttctattcacgatccggcagcggcgaaagagtatgccgcccgcctgctgaccctgcgcgaggcgctgaagggcgagctcgagatcgtcatgcgggtctattttgaaaaaccgcgcaccaccgtcggctggaaagggctcatcaacgatccccatatggataacagcttccgcatcaacgacgggttgcgcatcgcgcgcaaactgctgctggacattaacgacagcggcctgccggcggcgggggaattcctcgatatgatcaccccgcagtatgtcgccgatctgatgagctggggcgccattggcgcgcgtaccaccgaatcccaggtgcaccgtgagctcgcctccggactctcctgcccggtgggctttaaaaacggtaccgatggcaccatcaaggtggctatcgatgcgattaacgccgccggcgcgccgcactgtttcctgtcggtcaccaagtggggccactccgccatcgtgaataccagcggtaacggcgactgccatattattttgcgcggcggcaaagagcctaactacagcgcgaagcacgtggcggaggtgaaaatcggtctggcgaaagcgggtcttccggcccaggtgatgatcgacttcagccatgccaactccagcaagcagttcaagaagcagatggaagtgggcgccgacgtatgccagcagatcgccggcggcgagcgcgccattatgggcgtgatgattgaaagccatctggtggaaggcaaccagagcctcgagagcggtgaaccgctgacctacggcaagagcgtcaccgacgcctgcatcggctgggaggatactgaaacgatcctgcgtcagctggcggaagcggtgaaaacccgccgcggctaa

SEQ ID NO: 1522 - protein, 407 aa, Klebsiella pneumoniae
QLNIVVHEPGFATLWRIFAYFQDYSITTVKSRLHYFSEEIDWRDCISLNKYGNAGKKMNYQNDDLRIKEINELLPPVALLEKFPATENAANTVAHARKAIHQILKGDDDRLLVVIGPCSIHDPAAAKEYAARLLTLREALKGELEIVMRVYFEKPRTTVGWKGLINDPHMDNSFRINDGLRIARKLLLDINDSGLPAAGEFLDMITPQYVADLMSWGAIGARTTESQVHRELASGLSCPVGFKNGTDGTIKVAIDAINAAGAPHCFLSVTKWGHSAIVNTSGNGDCHIILRGGKEPNYSAKHVAEVKIGLAKAGLPAQVMIDFSHANSSKQFKKQMEVGADVCQQIAGGERAIMGVMIESHLVEGNQSLESGEPLTYGKSVTDACIGWEDTETILRQLAEAVKTRRG

SEQ ID NO: 1523 - DNA, 1053 bp, Neisseria gonorrhoeae
  CDS (1)..(1053)
atgacacaccattaccccacagacgatattaagattaaagaagttaaagagttgttgccgccgattgcccatctttacgagctgccgatttccaaagaggcttcgggcttggttcaccgcatccgccaggaactttccgatttggttcacggcagggacaggcggctgttggtcattatcgggccgtgttcgattcacgatccgaaagcggcgttggaatatgcggaacgtctgttgaaactccgcaagcggtatgaaaacgagcttttgatcgtgatgcgcgtttatttcgagaagccgagaacgacggtgggttggaaaggtttgattaacgacccgcatttggacggtacgttcgacatcaatttcggtttgcgtcaggcgcgcagtctgttgttgtccctgaataatatgggcatgcctgcctctaccgaatttttggatatgattacaccccagtattatgccgacctgatttcttggggggcaatcggcgcgcggacgaccgaaagccaagtccaccgcgaattggcaagcggtctgtcctgccccgtcggctttaaaaacggtacggacggcaatttgaagattgcgatcgacgcaatcggtgcggcgagccattcgcatcatttcttgtctgtaaccaaggccgggcattccgccattgtccataccggcggcaatcccgactgtcatgtcattttgcgcggcggaaaagagccgaattatgatgcgggacacgtcagcgaggcggtggaacaactgcgtgcggcaggggtaaccgacaagctgatgatcgattgcagccacgccaacagccgcaaggattacacccggcagatggaagtggcacaagacattgccgaccaattggaacaggacggcggcaatatcatgggcgtgatggtggaaagccatttggtcgaaggcaggcaggacaagccggaagtgtacggcaagagcattaccgatgcgtgtatcggttggggcgcgactgaagaattgttggcattgttggcgggtgcgaacacaaaacgtatggcgcgcgcaggt

SEQ ID NO: 1524 - protein, 351 aa, Neisseria gonorrhoeae
MTHHYPTDDIKIKEVKELLPPIAHLYELPISKEASGLVHRIRQELSDLVHGRDRRLLVIIGPCSIHDPKAALEYAERLLKLRKRYENELLIVMRVYFEKPRTTVGWKGLINDPHLDGTFDINFGLRQARSLLLSLNNMGMPASTEFLDMITPQYYADLISWGAIGARTTESQVHRELASGLSCPVGFKNGTDGNLKIAIDAIGAASHSHHFLSVTKAGHSAIVHTGGNPDCHVILRGGKEPNYDAGHVSEAVEQLRAAGVTDKLMIDCSHANSRKDYTRQMEVAQDIADQLEQDGGNIMGVMVESHLVEGRQDKPEVYGKSITDACIGWGATEELLALLAGANTKRMARAG

SEQ ID NO: 1525 - DNA, 1053 bp, Proteus mirabilis
  CDS (1)..(1053)
attatgttaaaaacagacgaattacggacaaaggctttagccagcctagtaacgccggaaacgttagctaatgagttacccatctcacaagagattatcagtaatatcacttctgcccgtcaacgcattgaagctattctcactggtgaagataaacgactattagttattattggcccttgctctatacatgatcccaaggcagctaaagagtacgcaacaaaactaaatcaacaaaaagcgcgttttcatgaccgtctagaaatcgtgatgagaacctattttgaaaaaccgcgtaccgttattggttggaaaggccttatttctgatcctttccttgataactcttgtaatgttaatgaaggcattcgtattgcaaggaaactgctaattgagatcaacgcattaggactccccacagccactgaatttcttgatatggtcacggggcaatatattgcagatttaatcagttggggggccatcggggcaagaacaacagagagtcaagttcaccgtgaaatggcctccgccctctcttgccctgtgggatttaaaaatggcactgacggtaatatacgcattgcgatagatgccattcgtgccgctcgtgccagtcacacctttttatcacctgataaaacgggacgtatgacaatttaccaaaccagcggaaatccctacggtcatattattatgcgtggcggtaaaaagcctaattatcatgccagtgatgtagcagatgctgttgatgcactgaaacaacttgatttacctgaacacttagtcatcgattttagccatggtaattgtgaaaaaattcatcgtcgccaacttgaagttgcacgcaatgtcgctcaacaaattacggatggttcacaagctattgttggtgttatggcagaaagctttttacaagagggatcacagaaagtcacagcagataaggtgctgacctatggacaatcgatcactgatccttgtctcagttgggaagataccgaacaattactggaattattagctcaagcagttgaaagtcgatttaaataa

SEQ ID NO: 1526 - protein, 350 aa, Proteus mirabilis
IMLKTDELRTKALASLVTPETLANELPISQEIISNITSARQRIEAILTGEDKRLLVIIGPCSIHDPKAAKEYATKLNQQKARFHDRLEIVMRTYFEKPRTVIGWKGLISDPFLDNSCNVNEGIRIARKLLIEINALGLPTATEFLDMVTGQYIADLISWGAIGARTTESQVHREMASALSCPVGFKNGTDGNIRIAIDAIRAARASHTFLSPDKTGRMTIYQTSGNPYGHIIMRGGKKPNYHASDVADAVDALKQLDLPEHLVIDFSHGNCEKIHRRQLEVARNVAQQITDGSQAIVGVMAESFLQEGSQKVTADKVLTYGQSITDPCLSWEDTEQLLELLAQAVESRFK

SEQ ID NO: 1527 - DNA, 1083 bp, Proteus mirabilis
  CDS (1)..(1083)
ataataatagagtggaacacgggaatgaattaccagaatgatgatcttaaaataacacaaatcaatgaacttttaccgccagtggcattattggaaaagtttccagccactgacaatgcggcgtttacagttcgtcatgcccgtgaagctattcatcaaatccttgctggaaaagatggtcgcctattagtggtgattgggccttgctctattcatgatcctaacgcggcactggaatatgctcagcgtttaaatttattaagagaagagctgaaagataaacttgaaattgtgatgcgagtttattttgaaaaaccacgtaccacagtcggttggaaagggctgataaatgatccacatatggactgtacctttgatattaatgaaggattacgcattgctcgtcgtttgctattaaccatcaatgatagtggattaccaacggctggcgagtttttagatatgataaccccacaatatgtcgctgatttgatgagttggggagctattggtgctcgaacaacagaatctcaagtgcatagagaattatcctccggactatcttgtcctgttggttttaaaaatggcacagatggcacaattaaagtggcgattgatgccatcaatgctgcaggctctccacactgtttcttatcagtaactaaatggggtcactcagcgatagttcgtactgcagggaataaagattgccatattattttacggggcggtaaagagcctaattacagtgcagaacatgttgctgccgtaaaagaaggtctgaaaaaagcaggattaccccaaaatgttatggttgattttagccacgccaatagctgtaaacaatttaagaagcaaatggaggttggtgccgatatttgccaacaaattagcgcaggagaaaaagctttaattggtgtaatggttgaaagtcatttagaagagggcaatcaatcattagaaagtggtgaacctttggtatacggtaaaagtgtcacagatgcttgtattgggtgggatgatacagaaacgttattacgccaattagccgatgcagtcgctactcgtcgtaataaatcataa

SEQ ID NO: 1528 - protein, 360 aa, Proteus mirabilis
IIIEWNTGMNYQNDDLKITQINELLPPVALLEKFPATDNAAFTVRHAREAIHQILAGKDGRLLVVIGPCSIHDPNAALEYAQRLNLLREELKDKLEIVMRVYFEKPRTTVGWKGLINDPHMDCTFDINEGLRIARRLLLTINDSGLPTAGEFLDMITPQYVADLMSWGAIGARTTESQVHRELSSGLSCPVGFKNGTDGTIKVAIDAINAAGSPHCFLSVTKWGHSAIVRTAGNKDCHIILRGGKEPNYSAEHVAAVKEGLKKAGLPQNVMVDFSHANSCKQFKKQMEVGADICQQISAGEKALIGVMVESHLEEGNQSLESGEPLVYGKSVTDACIGWDDTETLLRQLADAVATRRNKS

SEQ ID NO: 1529 - DNA, 1050 bp, Bacteria
  CDS (1)..(1050)
atgaattaccagaatgacgatataagaattaaaaaaataacagaattattgccaccagttgcattactcgaaaaatttcctgcaacaagaaataccgctactaccgttcgtgaagcccgtgaagctattcataacgttttaactggtgaagatgatcgtctattggtagtaattggcccgtgttcaattcatgacccaaaggcagcactggaatatgcagaacgcctgaataagttacgtggagaattgaaagcagatttggaaattgtgatgcgggtttattttgaaaaaccccgtaccacgataggttggaaagggttaattaatgacccgaatatggattgtagctttgatattaatgatggcttacgtactgcccgcaagcttctgatcgatattaacgacatggggctgcctgctgcgggtgagttccttgatatgataacgcctcagtatcttgctgatctcatgagctggggcgcgataggggcgcgtacgacggaatctcaggttcaccgtgaactggcttcagggctttcttgtccggttggctttaaaaatggaactgacggcacaataaaagttgccattgatgctatcaacgcggccagctcacctcactgttttctttctgtaactaaatggggacactcagcgattgtcagcacaacgggtaatcaggattgccatattattctgcgtggtggcaaagagccgaattacagtgcggagcatgtcagtgtcgttaaagaggaattaatgaaagctggtttagcacctcgtgtgatgattgatttcagccatgcaaacagttcgaagcagttcaaaagacaaatggacgttaatgatgatgtttgtgatcagatcgcaaggggagaacgcgcgattattggcgtcatggtcgaaagccatctcgttgaaggaagccaaaatctcgatagtgataagcctttggtttatggacaaagtgtgacagatgcctgcattggctgggatgacacagaaatgttactgcgtcagttatctcagtctgtcaaagcccgaagggga

SEQ ID NO: 1530 - protein, 350 aa, Bacteria
MNYQNDDIRIKKITELLPPVALLEKFPATRNTATTVREAREAIHNVLTGEDDRLLVVIGPCSIHDPKAALEYAERLNKLRGELKADLEIVMRVYFEKPRTTIGWKGLINDPNMDCSFDINDGLRTARKLLIDINDMGLPAAGEFLDMITPQYLADLMSWGAIGARTTESQVHRELASGLSCPVGFKNGTDGTIKVAIDAINAASSPHCFLSVTKWGHSAIVSTTGNQDCHIILRGGKEPNYSAEHVSVVKEELMKAGLAPRVMIDFSHANSSKQFKRQMDVNDDVCDQIARGERAIIGVMVESHLVEGSQNLDSDKPLVYGQSVTDACIGWDDTEMLLRQLSQSVKARRG

SEQ ID NO: 1531 - DNA, 1077 bp, Enterobacter cloacae
  CDS (1)..(1077)
agatatggcagagccggaaagaagatgaattatcagaacgacgatttacgcattaaagagatcaatgagttattacctcccgtagcgctccttgaaaaattccccgccaccgaaaatgccgccaacacggtgtctcatgcccgcaaggcgatccacaagatcctgaaaggtagcgacgatcgtcttctggtagtgatcgggccatgctccattcacgatcctgctgcggccaaagagtatgcgtcgcgtctgctcgccctgcgtgaagagctgaaaggcgaactggaaatcgtgatgcgcgtttatttcgaaaaaccgcgtaccaccgtgggctggaaagggttaatcaacgatccgcatatggacaacagtttccagattaacgacggcctgcgcattgcgcgtaagctgctgctggagatcaacgacagcgggctgcctgctgccggagaattcctcgatatgatcaccccgcagtatctggctgacctgatgagctggggcgctattggtgcgcgtacgactgaatctcaggttcaccgcgagctggcgtctggcctgtcatgcccggtgggtttcaaaaatggcactgatggcaccatcaaggtcgccattgacgccattaatgcggcgggcgcgccgcactgcttcctgtcggtgaccaagtggggccactcggctatcgtgaataccagcggtaatggcgattgccatatcatactgcgcggcggtaaagagcctaactatagcgctaaacacgtagcggaggtaaaagcagggctggagaaagcaggtctggcaccgcaggtgatgatcgatttcagccatgccaactccagcaaacagttcaaaaagcagatggaagtcggcgcagatgtgtgtcagcaaatcgccagcggtgaacgcgcagtgattggggtgatgattgagagccatctggttgaaggcaaccagaacctggagggcagcgagccgctggtctacggtaagagcgtgacggatgcctgcattggctgggacgataccgatgcgatcctgcgtcagctggcggatgcggttaaagcgcgtcgcggctaa

SEQ ID NO: 1532 - protein, 358 aa, Enterobacter cloacae
RYGRAGKKMNYQNDDLRIKEINELLPPVALLEKFPATENAANTVSHARKAIHKILKGSDDRLLVVIGPCSIHDPAAAKEYASRLLALREELKGELEIVMRVYFEKPRTTVGWKGLINDPHMDNSFQINDGLRIARKLLLEINDSGLPAAGEFLDMITPQYLADLMSWGAIGARTTESQVHRELASGLSCPVGFKNGTDGTIKVAIDAINAAGAPHCFLSVTKWGHSAIVNTSGNGDCHIILRGGKEPNYSAKHVAEVKAGLEKAGLAPQVMIDFSHANSSKQFKKQMEVGADVCQQIASGERAVIGVMIESHLVEGNQNLEGSEPLVYGKSVTDACIGWDDTDAILRQLADAVKARRG

SEQ ID NO: 1533 - DNA, 1071 bp, Enterobacter cloacae
  CDS (1)..(1071)
agcaaaaaatttctgagacattccatgaacaaaaccgacgaactgcgcaccgcgcgcattgatagcctggtcacaccggctgaactggcccggctgcatcccgtttccgccgaggtggcggaccatgtgacggcctcccgtcgccgcatcgaaaaaattctcaatggtgaagacaaacgtcttctggtggtgattggcccctgctccatccacgacctggacgcggcaatggattatgcacaacgccttcagacgctgcgcggcacgtatcaggatcgcctggagatcgtgatgcgtacctactttgaaaagccgcgtaccgtcgtgggctggaaaggattgatttccgatccggatctgaacggtagctaccgggtgaatcacggtattgcgctggcgcgcaagctgctgttacaggttaacaagctgggcgtgccgactgccaccgaatttctggatatggtgaccggacagtttattgccgacctcataagctggggcgcgattggcgcgcgtaccaccgaaagtcagatccaccgtgaaatggcgtcggcgctctcctgtccggtgggcttcaaaaacggaacggacggcaatacccgaattgccgtagatgccatccgcgcgtcacgcgccagccatatgttcctctccccggataaaaacggccagatgaccatctaccagaccagcggcaacccgttcggacatatcattatgcgtggcggtaaaaaaccgaattaccatgcagaagatattgccgccgcttgcgaaacgctggcggaatttgacctgcccgagcatctggtggtggatttcagccacggcaattgtcagaaacagcaccgccgccagctggacgtctgcgaggaagtttgccagcagatccgcagcggctcgaccgccattgcaggaattatggcggagagctttatcaaagaaggcacgcagaagatcgtcgccggacagcaaatggtctacggccagtcaatcaccgacccgtgcctgagctgggaagacagcgaacggctgctggagatgctggcgtctgcggtagattcgcgcttctaa

SEQ ID NO: 1534 - protein, 356 aa, Enterobacter cloacae
SKKFLRHSMNKTDELRTARIDSLVTPAELARLHPVSAEVADHVTASRRRIEKILNGEDKRLLVVIGPCSIHDLDAAMDYAQRLQTLRGTYQDRLEIVMRTYFEKPRTVVGWKGLISDPDLNGSYRVNHGIALARKLLLQVNKLGVPTATEFLDMVTGQFIADLISWGAIGARTTESQIHREMASALSCPVGFKNGTDGNTRIAVDAIRASRASHMFLSPDKNGQMTIYQTSGNPFGHIIMRGGKKPNYHAEDIAAACETLAEFDLPEHLVVDFSHGNCQKQHRRQLDVCEEVCQQIRSGSTAIAGIMAESFIKEGTQKIVAGQQMVYGQSITDPCLSWEDSERLLEMLASAVDSRF

SEQ ID NO: 1535 - DNA, 1235 bp, Salmonella typhimurium
  CDS (165)..(1235)
gtgtaaagtttttgatacgaaatgagggagattaatcgacgattgcgcatggtgtaaagtttattttacgaaatatggattgaaatctttactttttgtggtatggtttaaacatcctcgtggaggatcaactatcgcaaacaagaaaagacaggatcgccatcatgcaaaaagacgcgctgaataacgtacgtatcaccgatgaacaggtattaatgacgccggagcagcttaaagcggcctttcccttgagcctggcgcaggaagcccagatagcgcagtcccggggaatcatttctgacattattgccgggcgcgatccgcgtctcttggtggtatgcggtccttgttctattcacgatcctgaaaccgctctggaatatgcccgtcgatttaaagcccttgccgcagaggtcagcgatagcctctatctggtaatgcgcgtctattttgaaaagccgcgaactaccgtcggctggaaagggctgattaacgatcctcacatggatggctcatttgatgtggaagccgggttgaaaatagcgcgtcagctactggtggaactggtgaatatggggttgccattggcgaccgaagcgttggatccgaacagcccgcaatacctgggcgatctgtttagctggtcggcgataggggcgcgcacaaccgaatcgcaaacccaccgcgaaatggcgtctggtctttctatgccggtcgcgtttaaaaacggcacggatggcagcctggcgacagcgattaacgccatgcgcgccgctgcgcaacctcatcgttttgttggcattaaccaggccggtcaggttgcgttattgcaaacccagggaaatccgcatggccatgtgattctgcgtggcggcaaagcgccgaactatagcccggcagatgtcgctcagtgtgaaaaagagatggaacaggcgggactacgtccttcgctgatggtagattgcagtcatggtaactccaataaagattatcgccgccagccagccgttgccgaatctgtggttgcgcagattaaagatggcaatcgttcaatcattggcttaatgattgaaagtaatattcatgagggtaaccagtcttccgaacagccgcgcagcgaaatgaagtatggcgtttccgtcaccgatgcttgtattagctgggagatgaccgatgccctgttacgtgaaattcataaagatttgagcggccagctggcggtgcgcgtcgcataa

SEQ ID NO: 1536 - protein, 356 aa, Salmonella typhimurium
MQKDALNNVRITDEQVLMTPEQLKAAFPLSLAQEAQIAQSRGIISDIIAGRDPRLLVVCGPCSIHDPETALEYARRFKALAAEVSDSLYLVMRVYFEKPRTTVGWKGLINDPHMDGSFDVEAGLKIARQLLVELVNMGLPLATEALDPNSPQYLGDLFSWSAIGARTTESQTHREMASGLSMPVAFKNGTDGSLATAINAMRAAAQPHRFVGINQAGQVALLQTQGNPHGHVILRGGKAPNYSPADVAQCEKEMEQAGLRPSLMVDCSHGNSNKDYRRQPAVAESVVAQIKDGNRSIIGLMIESNIHEGNQSSEQPRSEMKYGVSVTDACISWEMTDALLREIHKDLSGQLAVRVA

SEQ ID NO: 1537 - DNA, 1086 bp, Deinococcus radiodurans
  CDS (1)..(1086)
atgacccagccccccgccccctctaccaccgaaaacctcaacgtgaccggcttcacgccgctgatgaccccgcgtgaactcaaggccgaggtgccgctgaccgacgctgccgagcgcaccgtgctcgccggacgccgggcggcgcaggccatcctgagcggcgaggacgaccgcctactggtggttgtcgggccgtgcagcattcacgaccaggcgcaagcgctggagtacgccgggcggctcgcggcgctgcgtgagcgggtgaaagaccggctggaagtgcagatgcgcgtctacgtggacaaaccgcgcacgacggtgggctggcgcggctacctgctcgaccccgacatggacggcagcaacgacatgggcaagggcgtgcgccgcacccgcgagctgatggtggcggtgagcgaactcgggctgccggtggcgaccgaactgcttgaccccttcgcgccgcagtacctcttcgacgccgtagcctgggcctgcctgggcgcgcgcaccgccgagtcgcagacccaccgggtaatggcgagcgccgtcagtgccccgatgggcttcaagaacggcaccggcggcggtatcaagctcgcggtggacgcggtggtggccgccagtcacccgcacgcttttttcaccattgacgaagatgggcgcgccgcgattgtccacaccaagggcaacgcgcacgggcacgtcattttgcgcggcgggcgtgccggccccaactacgccccgcagttcgtgcaggaagcagcagacctgctgcgcgcggcgggccgcgaagaagccgtcatggtggactgctcgcacgccaactcggggtcggactggacccggcagcgcttggtgtggcgcgacgtgctgggccagcgcctcgccggacagcgcgccatccggggcgccatgctggagagcaacctgcaagccggcaaacagagcctgcctgccgacctcacgcagctcaagcccggcgtgagcgtcaccgacgcctgcgtgggctgggacgaaaccgaggccctgctgctggaggcccacgaacagctcagtggccgcgcggcactggcgacctgctga

SEQ ID NO: 1538 - protein, 361 aa, Deinococcus radiodurans
MTQPPAPSTTENLNVTGFTPLMTPRELKAEVPLTDAAERTVLAGRRAAQAILSGEDDRLLVVVGPCSIHDQAQALEYAGRLAALRERVKDRLEVQMRVYVDKPRTTVGWRGYLLDPDMDGSNDMGKGVRRTRELMVAVSELGLPVATELLDPFAPQYLFDAVAWACLGARTAESQTHRVMASAVSAPMGFKNGTGGGIKLAVDAVVAASHPHAFFTIDEDGRAAIVHTKGNAHGHVILRGGRAGPNYAPQFVQEAADLLRAAGREEAVMVDCSHANSGSDWTRQRLVWRDVLGQRLAGQRAIRGAMLESNLQAGKQSLPADLTQLKPGVSVTDACVGWDETEALLLEAHEQLSGRAALATC

SEQ ID NO: 1539 - DNA, 1071 bp, Salmonella enterica subsp. enterica serovar Typhi
  CDS (1)..(1071)
atgcaaaaagacgcgctgaataacgtacgtatcaccgatgaacaggtattaatgacgccggagcagcttaaagcggcctttcccttgagcctggcgcaggaagcgcagatagcgcagtcccggggaatcatttctgacattattgccgggcgcgatccgcgtctgttggtggtatgcggtccttgttctattcacgatcctgaaaccgctctggaatatgcccgtcgatttaaagcccttgccgcagaggtcagcgatagcctctatctggtaatgcgcgtctattttgaaaagccgcgaactaccgtcggctggaaagggctgattaacgatcctcacatggatggctcatttgatgtggaagccgggttgaaaatagcgcgtcagctactggtggaactggtgaatatggggttgccattggcgaccgaagcgttggatccgaacagcccgcaatacctgggcgatctgtttagctggtcggcgataggggcgcgcacaaccgaatcgcaaacccaccgcgaaatggcgtctggtctttctatgccggtcggctttaaaaacggcacggatggcagcctggcgacagcgattaacgccatgcgcgccgctgcgcaacctcatcgttttgttggcattaaccaggccggtcaggttgcgttattgcaaacccagggaaatccgcatggccatgtgattctgcgtggcggcaaagcgccaaactatagcccggcagatgtcgctcagtgtgaaaaagagatggaacaggcgggactacgtccttcgctgatggtagattgcagtcatggtaactccaataaagattatcgccgccagccagccgttgccgaatctgtggttgcgcagattaaagatggcaatcgttcaatcattggcttaatgattgaaagtaatattcatgagggtaaccagtcttccgaacagccgcgcagcgaaatgaagtatggcgtttccgtcaccgatgcttgtattagctgggagatgaccgatgccctgttacgtgaaattcataaagatttgagcggccagctggcggtgcgcgtcgcataa

SEQ ID NO: 1540 - protein, 356 aa, Salmonella enterica subsp. enterica serovar Typhi
MQKDALNNVRITDEQVLMTPEQLKAAFPLSLAQEAQIAQSRGIISDIIAGRDPRLLVVCGPCSIHDPETALEYARRFKALAAEVSDSLYLVMRVYFEKPRTTVGWKGLINDPHMDGSFDVEAGLKIARQLLVELVNMGLPLATEALDPNSPQYLGDLFSWSAIGARTTESQTHREMASGLSMPVGFKNGTDGSLATAINAMRAAAQPHRFVGINQAGQVALLQTQGNPHGHVILRGGKAPNYSPADVAQCEKEMEQAGLRPSLMVDCSHGNSNKDYRRQPAVAESVVAQIKDGNRSIIGLMIESNIHEGNQSSEQPRSEMKYGVSVTDACISWEMTDALLREIHKDLSGQLAVRVA

SEQ ID NO: 1541 - DNA, 1071 bp, Yersinia pestis
  CDS (1)..(1071)
atgcaaaaagactcgctcaataacgtccatatcagtgccgaacaaatcctgataaccccggaagaactgaaaaatcagtttccactgagcgaaaatgatcagtattcgatagagcgcgcacgtaaaaccattgctgacattattcaggggcgagatccgcgtctgttggtcgtttgtgggccctgttcaattcatgatgtggatgcggcactggattacgcgcgtcgtttgaaaaaactctctgtggaattggatgacagcttatatatcgttatgcgtgtctattttgagaagccaagaactaccgtgggttggaaaggcctgatcaatgaccctgcaatggatggttcatttgatgtagaggcaggtttacacattgcccgtcgtttattgctggatttagtgggcatggggttgccgttagcgactgaagctctggatcctaatagcccacaatatttaggtgacctgttcagttggtcggccattggtgcccgtacaacggagtcacagacccaccgtgaaatggcatcaggcttgtctatgccggttggatttaaaaatggcactgacggtagcctaggcacggcaatcaatgcaatgcgcgccgctgccatgccacatcgctttatggggatcaatcagtcgggccaggtctgcctgttacaaactcagggtaacccacacggccatgtcattctacggggaggtaaaacaccaaactacagtgcacaagatgtcgctcagtgtgaaaaacagatgcaggatgcgggactcatcccatccttaatgatagattgcagtcacggtaattcaaataaagactaccgccgtcaggttgcggtggctgaatctgtggttgaacagatcaaggcgggcaatcgttcaattacaggtgtgatgctggaaagccacatccacgaaggaaatcagtcatctgaacagccacgtgctgatatgcgctacggtgtttctgtgactgacgcctgtattaactgggaaagcactgaaaccctgttacgtggtatgcgccaagaattgcttgcagcactgacggcacggactgcatga

SEQ ID NO: 1542 - protein, 356 aa, Yersinia pestis
MQKDSLNNVHISAEQILITPEELKNQFPLSENDQYSIERARKTIADIIQGRDPRLLVVCGPCSIHDVDAALDYARRLKKLSVELDDSLYIVMRVYFEKPRTTVGWKGLINDPAMDGSFDVEAGLHIARRLLLDLVGMGLPLATEALDPNSPQYLGDLFSWSAIGARTTESQTHREMASGLSMPVGFKNGTDGSLGTAINAMRAAAMPHRFMGINQSGQVCLLQTQGNPHGHVILRGGKTPNYSAQDVAQCEKQMQDAGLIPSLMIDCSHGNSNKDYRRQVAVAESVVEQIKAGNRSITGVMLESHIHEGNQSSEQPRADMRYGVSVTDACINWESTETLLRGMRQELLAALTARTA

SEQ ID NO: 1543 - DNA, 1071 bp, Escherichia coli
  CDS (1)..(1071)
atgcaaaaagacgcgctgaataacgtacatattaccgacgaacaggttttaatgactccggaacaactgaaggccgcttttccattgagcctgcaacaagaagcccagattgctgactcgcgtaaaagcatttcagatattatcgccgggcgcgatcctcgtctgctggtagtatgtggtccttgttccattcatgatccggaaactgctctggaatatgctcgtcgatttaaagcccttgccgcagaggtcagcgatagcctctatctggtaatgcgcgtctattttgaaaaaccccgtaccactgtcggctggaaagggttaattaacgatccccatatggatggctcttttgatgtagaagccgggctgcagatcgcgcgtaaattgctgcttgagctggtgaatatgggactgccactggcgacggaagcgttagatccgaatagcccgcaatacctgggcgatctgtttagctggtcagcaattggtgctcgtacaacggaatcgcaaactcaccgtgaaatggcctccgggctttccatgccggttggttttaaaaacggcaccgacggcagtctggcaacagcaattaacgctatgcgcgccgccgcccagccgcaccgttttgttggcattaaccaggcagggcaggttgcgttgctacaaactcaggggaatccggacggccatgtgatcctgcgcggtggtaaagcgccgaactatagccctgcggatgttgcgcaatgtgaaaaagagatggaacaggcgggactgcgcccgtctctgatggtagattgcagccacggtaattccaataaagattatcgccgtcagcctgcggtggcagaatccgtggttgctcaaatcaaagatggcaatcgctcaattattggtctgatgatcgaaagtaatatccacgagggcaatcagtcttccgagcaaccgcgcagtgaaatgaaatacggtgtatccgtaaccgatgcctgcattagctgggaaatgaccgatgccttgctgcgtgaaattcatcaggatctgaacgggcagctgacggctcgcgtggcttaa

SEQ ID NO: 1544 - protein, 356 aa, Escherichia coli
MQKDALNNVHITDEQVLMTPEQLKAAFPLSLQQEAQIADSRKSISDIIAGRDPRLLVVCGPCSIHDPETALEYARRFKALAAEVSDSLYLVMRVYFEKPRTTVGWKGLINDPHMDGSFDVEAGLQIARKLLLELVNMGLPLATEALDPNSPQYLGDLFSWSAIGARTTESQTHREMASGLSMPVGFKNGTDGSLATAINAMRAAAQPHRFVGINQAGQVALLQTQGNPDGHVILRGGKAPNYSPADVAQCEKEMEQAGLRPSLMVDCSHGNSNKDYRRQPAVAESVVAQIKDGNRSIIGLMIESNIHEGNQSSEQPRSEMKYGVSVTDACISWEMTDALLREIHQDLNGQLTARVA

SEQ ID NO: 1545 - DNA, 1131 bp, Nostoc sp. PCC 7120
  CDS (1)..(1131)
atgatgaatttgtgttgtacatttcatctacaatatgtatacccaatctgcctaaaatcctacccagacaattcagagcaatcctccatgcacaataaattaactaacgcaaatattgaaaattatcacgttctcttaactccaaacgcagtaaaagaaaaattaccgttaacagaaactgcggcagaaatagttttacagtttagatgtgaaatagagaaaatcttagattttcaagatagacgcaaatttatagtagttgggccttgttccattcatgaccctaatgcagcattggaatacgcccataagttaaaaaaattagctgaacgtgtccaggataaactactgttgattatgcgggtgtattttgaaaagccccgcacaactgtaggctggaaaggattaattaatgatccagaaatggatgattcttttcatgtggaaaatggtttattgctagccagagatttactgatcaagctaacagagttagggctacccaccgctacagaagctctagaccctatcgtaccccaatatattggtgaattgatcacatgggcggcgatcggcgcacgcacaacagaatcccagactcacagggaaatggctagtggtctgtctatgcccgtgggctttaaaaatggcactgatggtaatattcaagtagctttaaatgctttacattctgccagaatgactcataattttttgggcattaatcctgagggacaggtcagtgtatttgaaacgaaaggtaatgcttacggtcatgtgattttgcgtgggggaaatcaacctaattttgatgttgcaagtgttaaacaagtagaagaaaaattaaaacaggctcagttacctccgagaattgtcattgattgtagtcatggtaatactaataagaattacaggttgcaatctgatgttttagaaaacgttgtacaacaaatagttgatggtaatacatcgattgtggggatgatgctggaatcaaatttatatgaaggtaatcaacccattaactgcaaacgggaagaattgaaatatggggtttctgtaactgacccctgtatcggttgggagcaaacggaaaaaattatcttggctgcttacgaaaaacttaattga

SEQ ID NO: 1546 - protein, 376 aa, Nostoc sp. PCC 7120
MMNLCCTFHLQYVYPICLKSYPDNSEQSSMHNKLTNANIENYHVLLTPNAVKEKLPLTETAAEIVLQFRCEIEKILDFQDRRKFIVVGPCSIHDPNAALEYAHKLKKLAERVQDKLLLIMRVYFEKPRTTVGWKGLINDPEMDDSFHVENGLLLARDLLIKLTELGLPTATEALDPIVPQYIGELITWAAIGARTTESQTHREMASGLSMPVGFKNGTDGNIQVALNALHSARMTHNFLGINPEGQVSVFETKGNAYGHVILRGGNQPNFDVASVKQVEEKLKQAQLPPRIVIDCSHGNTNKNYRLQSDVLENVVQQIVDGNTSIVGMMLESNLYEGNQPINCKREELKYGVSVTDPCIGWEQTEKIILAAYEKLN

SEQ ID NO: 1547 - DNA, 1077 bp, Pseudomonas aeruginosa
  CDS (1)..(1077)
atggctgatttacagatcgacgaccttaacgttgcctccaacgagaccctgatcacgccggagcagctcaagcgtgaaattcccctgaccgacaaggccctgcagaccgtggcccagggtcgccaggtggtgcgcgacatcctggatggcaaggaccaccgtctgttcgtggtgatcggcccctgctccatccacgacatcaaggccgcccacgaatacgccgaccgcctcaaggcgctcgcggccgaagtggcggatacgctgttcctggtgatgcgcgtgtacttcgagaagccgcgtaccacggtgggctggaaaggcctgatcaacgatccgtacctggacgactcgttcaagatccaggatggcctgcacatcggccgccaactgctccgcgaccttgccgagaaaggcttgcccaccgccaccgaagcgctcgacccgatttccccgcagtacctgcaggacctgatcagttggtcggcgatcggcgcccgtaccaccgaatcgcagactcaccgcgagatggcctccggcctgtcttccgcggtcggcttcaagaacggcaccgatggcagcctgaccgtggcgatcaatgccctgcagtcggtctccagcccgcatcgcttcctcggcatcaaccagcagggcggcgtgtccatcgtgaccaccaagggcaaccgctacggtcacgtggtgttgcgcggcggcaacggcaagccgaactacgattcggtcagcgtcgcgctctgcgagcaggacctgaacaaggcgaaaatcccgctgaacatcatggtcgactgcagccacgccaactccaacaaggacccggccctgcaaccgctggtgatggacaacgtcagcaaccagatcgtcgaaggcaacaactcgatcgtcggcctgatggtggaaagccacctgggctggggcagccagccgattccgaaggatctcgaccaacttcagtacggcgtctccatcaccgacgcctgcatcgactgggcgaccaccgagaagagcatccgcagcatgcacgccaagctcaaggacgtgctgccgaaacgccagcgcggctga

SEQ ID NO: 1548 - protein, 358 aa, Pseudomonas aeruginosa
MADLQIDDLNVASNETLITPEQLKREIPLTDKALQTVAQGRQVVRDILDGKDHRLFVVIGPCSIHDIKAAHEYADRLKALAAEVADTLFLVMRVYFEKPRTTVGWKGLINDPYLDDSFKIQDGLHIGRQLLRDLAEKGLPTATEALDPISPQYLQDLISWSAIGARTTESQTHREMASGLSSAVGFKNGTDGSLTVAINALQSVSSPHRFLGINQQGGVSIVTTKGNRYGHVVLRGGNGKPNYDSVSVALCEQDLNKAKIPLNIMVDCSHANSNKDPALQPLVMDNVSNQIVEGNNSIVGLMVESHLGWGSQPIPKDLDQLQYGVSITDACIDWATTEKSIRSMHAKLKDVLPKRQRG

SEQ ID NO: 1549 - DNA, 1032 bp, Streptococcus pneumoniae
  CDS (1)..(1032)
atggtatttacagcaaaaagctctaaaataaatatagaagaagttcgtgccttgtcaaaattagaaggtcaggctttggagaggaaatcacagcgagatcaagagctagaagccattatacgtggagaagaccagcgaattctcttggtaatcgggccatgctcatctgacaacgaagaagctgtccttgaatacgctaagcgtttggcagtcctacaagaagaagtggcagatcgtatctttatggttatgcgtgtttatactgccaaaccccgtaccaacggagatggctataagggcttgattcaccagcctaacgcgacagaagcgcctagtcttatcaatggaatcaaagccgttcgccatcttcactatcgtgtcatcacagaaacagggatgacaactgctgatgaaatgctttatcctgaaaaccttccgcttgtagatgatttgatttcttacatggcagttggtgcccgttcagttgaagaccagcaacaccgctttgtggcaagtggggcaggattttctactggttttaaaaatccaacctctggaaatctcaatgtcatgtttaatgggatttatgctgctcaaaacaaacaaagtttccttttcttaggaaaagaagtagaaacaactgggaacccgctttcacacgctattcttcgtggtgctcttaatgagtatggaaaaaatattcccaactactattatgacaatttaattgataccattgcccagtatgagaaaatgggcttggaaaatccttttatcatcattgataccaatcatgacaattctggtaagcagtatattgaacagatccgaattgtccgccagaccttgattaaccgtgcttggaatgaaaaaattaagcagttcgttcgtggttttatgattgagtcttatctggaagatggtcgacaaaatgagccagaagtatttggtaagtctatcacagacccttgcctgggttgggataacacagaagctcttgtcagagaaatttacaaaacgttaggagaatag

SEQ ID NO: 1550 - protein, 343 aa, Streptococcus pneumoniae
MVFTAKSSKINIEEVRALSKLEGQALERKSQRDQELEAIIRGEDQRILLVIGPCSSDNEEAVLEYAKRLAVLQEEVADRIFMVMRVYTAKPRTNGDGYKGLIHQPNATEAPSLINGIKAVRHLHYRVITETGMTTADEMLYPENLPLVDDLISYMAVGARSVEDQQHRFVASGAGFSTGFKNPTSGNLNVMFNGIYAAQNKQSFLFLGKEVETTGNPLSHAILRGALNEYGKNIPNYYYDNLIDTIAQYEKMGLENPFIIIDTNHDNSGKQYIEQIRIVRQTLINRAWNEKIKQFVRGFMIESYLEDGRQNEPEVFGKSITDPCLGWDNTEALVREIYKTLGE

SEQ ID NO: 1551 - DNA, 1074 bp, Vibrio cholerae
  CDS (1)..(1074)
atgaaaaaaagtgaattgagtgatgtgaatatcagtaatgaacagatattgatcaccccagatgccttaaaagccaagattccactcagtgacaaggcgcgtaagtttattcgtgagtcacgtcagacggtggcggacattatccacaaacgcgatcctcgcttgctgatcgtctgtggtccttgctcaattcatgatgtggatgcggcgaaagagtacgccaaaaaactcaaagcactctcggcgcagctgagcgaccagctctacatcgtaatgcgcgtgtactttgaaaaaccgcgtactacggtcggttggaaagggctgattaacgatccgcatcttgatggcagttttgatatcgaacacggtctgcatgttgggcgtcaactcttggtcgatttggccgaaatggaaattccactggcaaccgaagcgttggacccgattagcccgcaatacttggcggatacttttagttgggcggcgattggtgcgcgtaccacggaatcacaaactcaccgcgagatggcaagtggcctttccatgccaatcggctttaaaaatggcacggatggtaacttggcaacggcgattaatgccatgcaggccgcttcatccagtcaccgctttatgggaattaaccgcgaaggacaagtggcactgctcacgacacaaggcaacccgaatgggcatgtgattttacgtggtggcaaacagaccaactacgattcggtttctgtcgcggaatgtgaagaagagatgcaaaaagcgcgtttggaaccctctttgatggtggattgcagccatgcgaactcacgtaaagattaccgccgtcagccgttggtggcagaagatgtgattcatcaaatccgtgaaggcaatcgctcgatcattggcctgatgattgaaagccatctcaatgaaggaaatcagtcttcggatctgcctcgtgaaaagatgcaatacggagtctcgatcactgacggctgtataaattggtcaacgactgaggcattattacgtcgtgcgcatcaggaacttattccctttttgcacaatcgtttgcaaggataa

SEQ ID NO: 1552 - protein, 357 aa, Vibrio cholerae
MKKSELSDVNISNEQILITPDALKAKIPLSDKARKFIRESRQTVADIIHKRDPRLLIVCGPCSIHDVDAAKEYAKKLKALSAQLSDQLYIVMRVYFEKPRTTVGWKGLINDPHLDGSFDIEHGLHVGRQLLVDLAEMEIPLATEALDPISPQYLADTFSWAAIGARTTESQTHREMASGLSMPIGFKNGTDGNLATAINAMQAASSSHRFMGINREGQVALLTTQGNPNGHVILRGGKQTNYDSVSVAECEEEMQKARLEPSLMVDCSHANSRKDYRRQPLVAEDVIHQIREGNRSIIGLMIESHLNEGNQSSDLPREKMQYGVSITDGCINWSTTEALLRRAHQELIPFLHNRLQG

SEQ ID NO: 1553 - DNA, 1038 bp, Lactococcus lactis subsp. lactis
  CDS (1)..(1038)
atgagttttaaagaaataagtcctaagataaatattgatgcaattaagatgttgggacatctcaacagtgagcaacaagaaaaaaaattgcaacgagataaagaacttgaagcaattataaaaggtgaagatgaccgtttactcttgattattgggccatgttcgtcagacaatgaagaagcagttttagaatatgctcgccgtttagctaaacttcaagaagcagttaaagataaaatttttatggtcatgcgtgtctatactgcaaaacctcgtacaaatggcgatggctataaaggattgattcacgaaccagatgctgatggtcataccgatttaatcaatggaatcaaaatggttcgtgacttacattacaaggtcatcactgaaactggtttaacaactgctgatgaaatgctttacccagaaaatcttccaatggtagatgatttggtcagctaccatgcgattggtgcacgttctgttgaaaatcaacaacaccgttttgttgcttctgggattgatgtgccaactggtttgaaaaatccaacatcaggaaatttgaaagtgatgtttaatggaatttacgcggctcaacaatcacaagatttcctctttggtcgtgcagaagttcaaacatcaggaaatcctttagcacatgcgattttgcgtggtggacaagatgaaaatggaaaataccatccaaactactacactgataacttgcttgatacaattgaaatttatgaaaaaatgggcttgaaaaatccttttattgtcattgatacaaaccatgataactctggtaagaaatttatggaacaaatccgtattgttcgtcaaaccttagttaatcgtgactgggatgataaaattcgccaaaatgttcgtggcttcatgattgaatcttacctagaagatggtcgccaagataaaccagaagtatttggtaaatcaattactgacccatgtttaggttgggataaaacagaagcacttgttcaagaaatttacgaagctgaaaacaaaaataactaa

SEQ ID NO: 1554 - protein, 345 aa, Lactococcus lactis subsp. lactis
MSFKEISPKINIDAIKMLGHLNSEQQEKKLQRDKELEAIIKGEDDRLLLIIGPCSSDNEEAVLEYARRLAKLQEAVKDKIFMVMRVYTAKPRTNGDGYKGLIHEPDADGHTDLINGIKMVRDLHYKVITETGLTTADEMLYPENLPMVDDLVSYHAIGARSVENQQHRFVASGIDVPTGLKNPTSGNLKVMFNGIYAAQQSQDFLFGRAEVQTSGNPLAHAILRGGQDENGKYHPNYYTDNLLDTIEIYEKMGLKNPFIVIDTNHDNSGKKFMEQIRIVRQTLVNRDWDDKIRQNVRGFMIESYLEDGRQDKPEVFGKSITDPCLGWDKTEALVQEIYEAENKNN

SEQ ID NO: 1555 - DNA, 1023 bp, Lactococcus lactis subsp. lactis
  CDS (1)..(1023)
atgacttttaaagaactcagtaacaaaattaacattaaagatgtaagagagctaaatcatttaaatgatgagcaacaagaaaagaaagaaaaacgtgataaggaacttgaagcgataattaagggtgaagacgatagaatcctcttagtcattggcccctgctcatcggataatgaagctgcagttctagaatatgctcacagattgttaaaacttcaaaaagaagtagaagataaaatttttattgtgatgcgtgtttatactgcaaaaccgcggacaaacggagatggctataaaggcctcattcacgaacctgatgcagatggacatacagaccttatcaatgggataaaaatggttcgtgaccttcactataaagtaattactgaaactggtctgactacagcagatgagatgctatacccagaaaatctaccattagttgatgacttagtaagttactatgcagttggcgctcgctcagttgaaaatcaacaacatcgctttgttgcctcaggaatagatgccccaacaggaatgaaaaacccgacatcagggaatttaaaagttatgtttaatggaatgtatgcagcccaacaatctcaagattttctatttgggaatgctgaagtagaaacatcaggaaatccattagctcatgccatccttcgtggtggacaagatgaaaatggtaaaaaccatccaaattactatacagataatcttcttgaaagtatcgaaatatacgaaaaaatgggtttacaaaatccatttattgttattgatactaatcatgataactctgggaagaagtatatggaacaaataagaattgttcgtcaaacattagtcaatcgtaattgggatgaacaaattcataaatatgtcagaggatttatgattgaatcatatcttgaagacggtcgtcaagacaaaccagaagtatttggaaaatcaatcactgacccatgtttgggttgggataaaacagaagaacttattaatgaaatttataattcgtga

SEQ ID NO: 1556 - protein, 340 aa, Lactococcus lactis subsp. lactis
MTFKELSNKINIKDVRELNHLNDEQQEKKEKRDKELEAIIKGEDDRILLVIGPCSSDNEAAVLEYAHRLLKLQKEVEDKIFIVMRVYTAKPRTNGDGYKGLIHEPDADGHTDLINGIKMVRDLHYKVITETGLTTADEMLYPENLPLVDDLVSYYAVGARSVENQQHRFVASGIDAPTGMKNPTSGNLKVMFNGMYAAQQSQDFLFGNAEVETSGNPLAHAILRGGQDENGKNHPNYYTDNLLESIEIYEKMGLQNPFIVIDTNHDNSGKKYMEQIRIVRQTLVNRNWDEQIHKYVRGFMIESYLEDGRQDKPEVFGKSITDPCLGWDKTEELINEIYNS

SEQ ID NO: 1557 - DNA, 1032 bp, Streptococcus pneumoniae
  CDS (1)..(1032)
atggcatttattgaaaaaggtcaagaaatcgatatggaagtcatcaaggctgaaacccaattgtctgcggaagccttgagactcaaggaaagccgtgacagggaattggcagatattatttcaggggaagatgaccgtattctcttggtgattggtccttgctcttctgataatgaagaggcggtcttggaatatgctcgccgtttatctgccttgcaaaagaaggtagcggataagattttcatggtcatgcgcgtgtatactgctaagcctcgtaccaatggagacggctataaaggattagttcaccagccagatacttctaaggctccaagcctgattaatggcttgcaggctgtgcgccagttgcactaccgcgtgattacagagactggtttgacaacggcagatgagatgctttatccgtcaaatctgatcttggtggatgacttggtcagctaccatgccgttggagctcgttctgtggaagaccaagagcaccgctttgtggcttctgggattgatgcaccagtagggatgaaaaatccaacctcaggaaatttgggtgttatgtttaacgccatctatgctgctcaaaacaagcaaaccttcctttatcatgggcaggaagttgagacatcaggtaatcctttggcccatgttatcctccgtggagcagtcaacgagtatggcaattatatgccgaattactactatgaaaatctactccaagccattgaacgctatgaaaccatgggacttgaaaatccttttatcctcattgacaccaaccatgataactcaggcaagcaatatatggagcagattcgaattgttcgccagaccttgcagaatcgtgattggaatgagaaaattaaaaagacggttcgaggatttatgattgaatcttacctagcagatggtcgtcaaaaccaaccagagatctttggttgctctattactgacccttgcctaggttgggaaaatacagaggccttggtagaagagatttatgttaccttgacaaaataa

SEQ ID NO: 1558 - protein, 343 aa, Streptococcus pneumoniae
MAFIEKGQEIDMEVIKAETQLSAEALRLKESRDRELADIISGEDDRILLVIGPCSSDNEEAVLEYARRLSALQKKVADKIFMVMRVYTAKPRTNGDGYKGLVHQPDTSKAPSLINGLQAVRQLHYRVITETGLTTADEMLYPSNLILVDDLVSYHAVGARSVEDQEHRFVASGIDAPVGMKNPTSGNLGVMFNAIYAAQNKQTFLYHGQEVETSGNPLAHVILRGAVNEYGNYMPNYYYENLLQAIERYETMGLENPFILIDTNHDNSGKQYMEQIRIVRQTLQNRDWNEKIKKTVRGFMIESYLADGRQNQPEIFGCSITDPCLGWENTEALVEEIYVTLTK

SEQ ID NO: 1559 - DNA, 1095 bp, Pseudomonas aeruginosa
  CDS (1)..(1095)
atgaactcatccgtatccgcactgaccaccctttcgccgaacgtccaggccgtcgccctgcccagcgccaccgcccgtaccgccctggaacgcctgcccagcccgctcgaactcaaggcccgccagccgttgccgctggagctggccagccaggtcgccgccagccgcgacgccatccgcgccatcctcgacggcgacgacccgcgcctgctggtggtagtcggtccctgttcgatccacgatccccgctccgccctcgaatacgccgaacgcctcgccgcgctgagcgacgaactcgacggccagttgctcctggtgatgcgcgcctacgtggaaaagccacgcaccacggtgggctggaagggcctcgcctacgatccgcacctggatggcagcgacgacatggccgccggcctggcgctgtcccggcaactgatgctggacatgctgcgcctcggcctgccgctggccaccgaactcctgcaaccgctggccgccggctacttcgacgacctgctgagctgggcggcgatcggcgcgcgcaccagcgaatcgcagatccaccgcgagctggtcagcggcctcggcctgccggtgggcttcaagaacggcaccgacggcggcgtcggcatcgcctgcgacgcgatccgttcggcggcccacggccaccgccatttcggcctcgacccgcacggtcacccggcgctgatcgagacccgcggcaatccggacacccatgtggtgctgcgcggcggccgccacggttcgaactacggccccgagcaggtgcaggccgtgcgccaggccctggaaagccagggcatcgccacgcggatgatggtcgattgcagtcacgccaacagcggcaagaacccgctgaaccagcccggcgtcctcgccagcgtgctggaccagcgcctggccggtgccagcgacctggtcggggtaatgctggaaagccacctgttcgacggttgccaggcgctcggcggcgaactgcgctacggcgtctcgatcaccgacggctgcctcggctgggaaggcaccgagcggattctccgcgacgccgcccggcggctcgccgagcggcgctga

SEQ ID NO: 1560 - protein, 364 aa, Pseudomonas aeruginosa
MNSSVSALTTLSPNVQAVALPSATARTALERLPSPLELKARQPLPLELASQVAASRDAIRAILDGDDPRLLVVVGPCSIHDPRSALEYAERLAALSDELDGQLLLVMRAYVEKPRTTVGWKGLAYDPHLDGSDDMAAGLALSRQLMLDMLRLGLPLATELLQPLAAGYFDDLLSWAAIGARTSESQIHRELVSGLGLPVGFKNGTDGGVGIACDAIRSAAHGHRHFGLDPHGHPALIETRGNPDTHVVLRGGRHGSNYGPEQVQAVRQALESQGIATRMMVDCSHANSGKNPLNQPGVLASVLDQRLAGASDLVGVMLESHLFDGCQALGGELRYGVSITDGCLGWEGTERILRDAARRLAERR

SEQ ID NO: 1561 - DNA, 1032 bp, Streptococcus pneumoniae
  CDS (1)..(1032)
atggtatttacagcaaaaagctctaaaataaatatagaagaagttcgtgccttgtcaaaattagaaggtcaggctttggagaggaaatcacagcgagatcaagagctagaagccattatacgtggagaagaccagcgaattctcttggtaatcgggccatgctcatctgacaacgaagaagctgtccttgaatacgctaatcgtttggcagtcctacaagaagaagtggcagatcgtatctttatggttatgcgtgtttatactgccaaaccccgtaccaacggagatggctataagggtttgattcaccagcctaacgcgacagaagcgcctagtcttatcaatggaatcaaagccgttcgccatcttcactatcgtgtcatcacagaaacagggatgacaactgctgatgaaatgctttatcctgaaaaccttccgcttgtagatgatttgatttcttacatggcagttggtgcccgttcagttgaagaccagcaacaccgctttgtggcaagtggggcaggattttctactggttttaaaaatccaacctctggaaatctcaatgtcatgtttaatgggatttatgctgctcaaaacaaacaaagtttccttttcttaggaaaagaagtagaaacaactgggaacccgctttcacacgctattcttcgtggtgctcttaatgagtatggaaaaaatattcccaactactattatgacaatttaattgataccattgcccagtatgagaaaatgggcttggaaaatccttttatcatcattgataccaatcatgacaattctggtaagcagtatattgaacagatccgaattgtccgccagaccttgattaaccgtgcttggaatgaaaaaattaagcagttcgttcgtggttttatgattgagtcttatctggaagatggtcgacaaaatgagccagaagtatttggtaagtctatcacagacccttgcctgggttgggataacacagaagctcttgtcagagaaatttacaaaacgttaggagaataa

SEQ ID NO: 1562 - protein, 343 aa, Streptococcus pneumoniae
MVFTAKSSKINIEEVRALSKLEGQALERKSQRDQELEAIIRGEDQRILLVIGPCSSDNEEAVLEYANRLAVLQEEVADRIFMVMRVYTAKPRTNGDGYKGLIHQPNATEAPSLINGIKAVRHLHYRVITETGMTTADEMLYPENLPLVDDLISYMAVGARSVEDQQHRFVASGAGFSTGFKNPTSGNLNVMFNGIYAAQNKQSFLFLGKEVETTGNPLSHAILRGALNEYGKNIPNYYYDNLIDTIAQYEKMGLENPFIIIDTNHDNSGKQYIEQIRIVRQTLINRAWNEKIKQFVRGFMIESYLEDGRQNEPEVFGKSITDPCLGWDNTEALVREIYKTLGE

SEQ ID NO: 1563 - DNA, 1047 bp, Buchnera aphidicola
  CDS (1)..(1047)
atgaaaaaaacagatgaactacgtacaatacgaattgatccattgataacaccatctgaattagcaaaaaaatatgctattacttcagaaatcatggataatgttattataacgagacaaaatatagctcgaattatgactggagaagatttgcgtttgcttgttgtaataggtccatgttcagtacatgatccaattgcagcagttgaatatgctcatcgattatatgaactacgtaaaaaatatcaagatcgtcttgaaattataatgcgtacatattttgaaaaaccaagaacagtagttggttggaagggattaatttcagatccagatttaaatggtagtttcagagttaatcatggtttagctgttgcacgtaaattattattagatatcaatgaactaggatgcctgcagcaacagagttttttagatatggtaatagggcaatttattgcggatttaattagctggggtgcgattggagctagaactactgaaagtcaaattcatagagaaatggcttcagctctttcttgtccagtaggttttaaaaatggaacagatggaaatatacgtattgcaattgatgctattagagcagcacaagcacgtcatttgttttttgctccgaataaagatggacaaatgactattaatcataccagtggaaatccttatggacatataattatgagaggtggtcgaactcctaattatcatgctcacgatattaattcagcaatagaacatttacgtgaatttaatttgttagaacatttaatgattgattttagtcatggtaattgtttaaaggaacatattcgtcaaaaagatgttgctaaatctgtttcaaaacaaatttctcaaggttcaaaaactatatttggtgtaatgattgaaagttttttagaagaaggttttcaaacagttaaagaaaatcaaccactaatatatggaaaatcaattactgatgcatgtttaaattggaaagacagtgtccttattattaagcaattagcagatgcggtagatactcgtttttaa

SEQ ID NO: 1564 - protein, 348 aa, Buchnera aphidicola
MKKTDELRTIRIDPLITPSELAKKYAITSEIMDNVIITRQNIARIMTGEDLRLLVVIGPCSVHDPIAAVEYAHRLYELRKKYQDRLEIIMRTYFEKPRTVVGWKGLISDPDLNGSFRVNHGLAVARKLLLDINELGCLQQQSFLDMVIGQFIADLISWGAIGARTTESQIHREMASALSCPVGFKNGTDGNIRIAIDAIRAAQARHLFFAPNKDGQMTINHTSGNPYGHIIMRGGRTPNYHAHDINSAIEHLREFNLLEHLMIDFSHGNCLKEHIRQKDVAKSVSKQISQGSKTIFGVMIESFLEEGFQTVKENQPLIYGKSITDACLNWKDSVLIIKQLADAVDTRF

SEQ ID NO: 1565 - DNA, 1104 bp, Corynebacterium glutamicum
  CDS (1)..(1104)
atgagttctccagtctcactcgaaaacgcggcgtcaaccagcaacaagcgcgtagtggctttccacgagctgccaagccctacagatctcatcgccgcaaacccactgacaccaaagcaggcttccaaggtggagcaggatcgccaggacatcgctgatatcttcgctggcgacgatgaccgcctcgttgtcgttgtgggaccttgctcagttcacgatcctgaagcagccatcgattacgcaaaccgcctggctccgctggcaaagcgccttgaccaggacctcaagattgtcatgcgcgtgtacttcgagaagcctcgcaccaccgtcggttggaagggattgatcaacgatcctcaccttaacgaaacctacgacatcccagagggcttgcgcattgcgcgtaaagtgcttatcgacgttgtgaaccttgatctcccagtcggctgcgaattcctcgaaccaaacagccctcagtactacgccgacactgtcgcatggggagcaatcggcgctcgtaccaccgaatctcaggtgcaccgccgccagctggcttctgggatgtctatgccaattggtttcaagaacggaactgacggaaacatccaggttgcagtcgacgcggtacaggctgcccagaacccacacttcttcttcggaacctccgacgacggcgcgctgagcgtcgtggagaccgcaggcaacagcaactcccacatcattttgcgcggcggtacctccggcccgaatcatgatgcagcttcggtggaggccgtcgtcgagaagcttggtgaaaatgctcgtctcatgatcgatgcgtcccacgccaactccggcaaggatcacatccgacaggttgaggttgttcgtgaaatcgcagagcagatttctggcggttctgaggctgtggcaggaatcatgatcgaatccttcctcgttggtggcgcacagaaccttgatcctgcgaaattgcgcatcaacggcggtgaaggcctggtgtacggacagtctgtgaccgataagtgcatcgatattgacaccaccatcgatttgctcgctgagctggccacagcagtaagggaacgccgagcagcagccaagtaa

SEQ ID NO: 1566 - protein, 367 aa, Corynebacterium glutamicum
MSSPVSLENAASTSNKRVVAFHELPSPTDLIAANPLTPKQASKVEQDRQDIADIFAGDDDRLVVVVGPCSVHDPEAAIDYANRLAPLAKRLDQDLKIVMRVYFEKPRTTVGWKGLINDPHLNETYDIPEGLRIARKVLIDVVNLDLPVGCEFLEPNSPQYYADTVAWGAIGARTTESQVHRRQLASGMSMPIGFKNGTDGNIQVAVDAVQAAQNPHFFFGTSDDGALSVVETAGNSNSHIILRGGTSGPNHDAASVEAVVEKLGENARLMIDASHANSGKDHIRQVEVVREIAEQISGGSEAVAGIMIESFLVGGAQNLDPAKLRINGGEGLVYGQSVTDKCIDIDTTIDLLAELATAVRERRAAAK

SEQ ID NO: 1567 - DNA, 1502 bp, Candida albicans
  CDS (336)..(1442)
acactgactaatcattaggccgcagagagagcaaggtactcaccaactcaccatgaattgtagattaattattagacattagtacacacactacaaactataaactataggcacgcactccctaatgactaacaattgtacagtttttgtgtcattgactaattgttctaatttttttttttcagtttaaatatcccgaaccaattttccaaatttttcatatctgtttttcctttttcttttttaattcctttctagatatcttgtatatatactcaatcctcatagatatattccatatatatatatatattaattcattacattaacacacaatgtttattacaaacgaacacgttggtgacagaagtcgtatggaagattggagaatccgtggttacgatccattaactcctccagatcttttacaacatgaatacccattaactcctgaatcacagaagattatcgttgaaggtagaaatgctgcttgtgatattttgaacggcaaagaccgaagattgattggaccttgttcgattcatgatcctcaagctgccttggattactgtgaaagattatatcaagcttctgaaaaacacaagggtgaattattgattgttatgagagcatacttggaaaaaccaagaaccacagttggttggaaaggtttaattaacgacccagatatcgatggtaccttccatataaataaggggttgagaattgctagaaagttgtttgttcaattaacttcaaaattaccaattgctggtgaaatgttggatacaatctcacctcaatttttatctgatttattctcagtgggggctattggtgcaagaaccaccgaatcgcaattgcacagagagttggcatctggttatcattcccagttggattcaaaaacggtaccgatggtactttgggtgttgccattgacgcctttgagagctgcttctcatccacatcatttcctttcagtcacaaaacctggtgttgttgctattgttgggactgatgggaaccaagactgttttgttatattaagaggtggtaagaagggtacaaactatgatgccaaatccgtacaagaaacacaagaagaattaatcaaatcaaaagttgttaccgaaatgaaacctggtccaagaattatggttgattgttctcatggtaattctaataaagatcatagaaaccaaccgaaagttgcccaagttgttgctgaacaagtggccggtggtgataaatccatatgtggattaatgattgagagtaatataaatgatggaagacaagatgttccaccaaaggaacaaggtggtaaagatgctttgaaatacggtgtttctattaccgatgcttgtattggttgggaaaccacagaagaagttttggaggttttagccaatgctgtcaaaaccagaagatctttatagttgattatgtaatcctatttttattaatttgaacaaacaatgatattaaaaaaaaaaaaa

SEQ ID NO: 1568 - protein, 368 aa, Candida albicans
MFITNEHVGDRSRMEDWRIRGYDPLTPPDLLQHEYPLTPESQKIIVEGRNAACDILNGKDRRLIGPCSIHDPQAALDYCERLYQASEKHKGELLIVMRAYLEKPRTTVGWKGLINDPDIDGTFHINKGLRIARKLFVQLTSKLPIAGEMLDTISPQFLSDLFSVGAIGARTTESQLHRELASGYHSQLDSKTVPMVLWVLPLTPLRAASHPHHFLSVTKPGVVAIVGTDGNQDCFVILRGGKKGTNYDAKSVQETQEELIKSKVVTEMKPGPRIMVDCSHGNSNKDHRNQPKVAQVVAEQVAGGDKSICGLMIESNINDGRQDVPPKEQGGKDALKYGVSITDACIGWETTEEVLEVLANAVKTRRSL

SEQ ID NO: 1569 - DNA, 1113 bp, Saccharomyces cerevisiae
  CDS (1)..(1113)
atgttcattaaaaacgatcacgccggtgacaggaaacgcttggaagactggagaatcaaaggttatgatccattaacccctccagatctgcttcaacatgaatttccaatttcagccaaaggtgaggaaaacattatcaaggcaagagactccgtctgtgatattttgaatggtaaagatgatcgtttagttatcgtgatcgggccatgttccctacatgaccccaaagccgcttacgattacgctgacagattggctaaaatttcagaaaagttgtcaaaagacttattgattattatgagagcgtatttagaaaaaccaaggactactgttggctggaaagggttgattaacgaccctgatatgaataactcttttcaaatcaataaaggtctacggatttcgagagaaatgttcataaaactggttgaaaaattacccattgctggtgagatgttggataccatttctccgcagtttttgagtgattgtttctccttgggtgccatcggcgccagaactactgaatcccaactgcacagagaattagcatccggtctatctttccctattggatttaagaacggtactgatggtggtttgcaagtcgccatcgacgctatgagagccgctgcacatgaacattacttcctttctgtcacaaagccaggtgtcactgctatcgtgggcactgaaggtaacaaggataccttcctgatcttgagaggtggtaagaacggtactaactttgacaaagaaagtgttcaaaatactaagaaacagttagaaaaggccggtttgactgatgattcccagaaaagaattatgatcgattgttcccacggcaacagtaataaagatttcaagaaccaaccaaaggttgccaaatgtatttatgaccagctgacggagggtgagaatagtctctgtggtgttatgattgagtccaacataaatgaaggtagacaagatattcccaaagaaggtggcagagagggattgaagtatggttgttctgttacggatgcttgtattggctgggagtccaccgaacaggtattggagctattggcagaaggtgttagaaacagaagaaaggccttgaaaaaatag

SEQ ID NO: 1570 - protein, 370 aa, Saccharomyces cerevisiae
MFIKNDHAGDRKRLEDWRIKGYDPLTPPDLLQHEFPISAKGEENIIKARDSVCDILNGKDDRLVIVIGPCSLHDPKAAYDYADRLAKISEKLSKDLLIIMRAYLEKPRTTVGWKGLINDPDMNNSFQINKGLRISREMFIKLVEKLPIAGEMLDTISPQFLSDCFSLGAIGARTTESQLHRELASGLSFPIGFKNGTDGGLQVAIDAMRAAAHEHYFLSVTKPGVTAIVGTEGNKDTFLILRGGKNGTNFDKESVQNTKKQLEKAGLTDDSQKRIMIDCSHGNSNKDFKNQPKVAKCIYDQLTEGENSLCGVMIESNINEGRQDIPKEGGREGLKYGCSVTDACIGWESTEQVLELLAEGVRNRRKALKK

SEQ ID NO: 1571 - DNA, 2048 bp, Saccharomyces cerevisiae
  CDS (619)..(1731)
gtatacagctagccttgaaagtgatggaaaacattgtcatcggcacataaataaaaaaattatgaatcacgtgatcaacagcaaattatgtactcgtatatatgcaagcgcattccttatattgacactctttcattgggcatgaggctgtgtaaacataagctgtaacggtctcacggaacactgtgtagttgcattactgtcaggcagttatgttgcttaatataaaggcaaaggcatggcagaatcactttaaaacgtggccccacccgctgcaccctgtgcattttgtacgttactgcgaaatgactcaacgatgaaatgaaaaaattttgcttgaaattttgaaaaaaagatgtgcgggacgcattgttagctcattgaatacatcgtgatcgaatccaatcaatgtttaatttcatattaatacagaaactttttctcatactttcttcttcttttcattggtatattatctatatatcgtgttaattcctctttcgtcatttttagcatcgttataagagtaattaagaataactagaagagtctctctttatattcgtttattttatatatttaaccgctaaatttagtaaacaaaagaatctatcagaaatgagtgaatctccaatgttcgctgccaacggcatgccaaaggtaaatcaaggtgctgaagaagatgtcagaattttaggttacgacccattagcttctccagctctccttcaagtgcaaatcccagccacaccaacttctttggaaactgccaagagaggtagaagagaagctatagatattattaccggtaaagacgacagagttcttgtcattgtcggtccttgttccatccatgatctagaagccgctcaagaatacgctttgagattaaagaaattgtcagatgaattaaaaggtgatttatccatcattatgagagcatacttggagaagccaagaacaaccgtcggctggaaaggtctaattaatgaccctgatgttaacaacactttcaacatcaacaagggtttgcaatccgctagacaattgtttgtcaacttgacaaatatcggtttgccaattggttctgaaatgcttgataccatttctcctcaatacttggctgatttggtctccttcggtgccattggtgccagaaccaccgaatctcaactgcacagagaattggcctccggtttgtctttcccagttggtttcaagaacggtaccgatggtaccttaaatgttgctgtggatgcttgtcaagccgctgctcattctcaccatttcatgggtgttactaagcatggtgttgctgctatcaccactactaagggtaacgaacactgcttcgttattctaagaggtggtaaaaagggtaccaactacgacgctaagtccgttgcagaagctaaggctcaattgcctgccggttccaacggtctaatgattgactactctcacggtaactccaataaggatttcagaaaccaaccaaaggtcaatgacgttgtttgtgagcaaatcgctaacggtgaaaacgccattaccggtgtcatgattgaatcaaacatcaacgaaggtaaccaaggcatcccagccgaaggtaaagccggcttgaaatatggtgtttccatcactgatgcttgtataggttgggaaactactgaagacgtcttgaggaaattggctgctgctgtcagacaaagaagagaagttaacaagaaatagatgtttttttaatgatatatgtaacgtacattctttcctctaccactgccaattcggtattatttaattgtgtttagcgctatttactaattaactagaaactcaatttttaaaggcaaagctcgctgacctttcactgatttcgtggatgttatactatcagttactcttctgcaaaaaaaaattgagtcatatcgtagctttgggattatttttctctctctccacggctaattaggtgatcatgaaaaaatgaaaaattcatgagaaaagagtcagacatcgaaacatacataagttgatattcctttgatatc

SEQ ID NO: 1572 - protein, 370 aa, Saccharomyces cerevisiae
MSESPMFAANGMPKVNQGAEEDVRILGYDPLASPALLQVQIPATPTSLETAKRGRREAIDIITGKDDRVLVIVGPCSIHDLEAAQEYALRLKKLSDELKGDLSIIMRAYLEKPRTTVGWKGLINDPDVNNTFNINKGLQSARQLFVNLTNIGLPIGSEMLDTISPQYLADLVSFGAIGARTTESQLHRELASGLSFPVGFKNGTDGTLNVAVDACQAAAHSHHFMGVTKHGVAAITTTKGNEHCFVILRGGKKGTNYDAKSVAEAKAQLPAGSNGLMIDYSHGNSNKDFRNQPKVNDVVCEQIANGENAITGVMIESNINEGNQGIPAEGKAGLKYGVSITDACIGWETTEDVLRKLAAAVRQRREVNKK

SEQ ID NO: 1573 - DNA, 1107 bp, Schizosaccharomyces pombe
  CDS (1)..(1107)
atggacaagcacactcctcttcttcctggcgacagtgttttttcacgttgtaaaactgaagatagtcgtatcaaaggctatgatccagtaatttcacctgctttaattcaatcagaattagcagcctctgatgaaacacttgcttttgtgtcggatcaaagacgccaagccgccgatatcattgcgggacgtgatgatagacttcttctaatcgttggaccctgttctttacacgatcctgttgccgccaaggagtatgccattcgcttgcaaaaggaggctattaagcacaagaaggacttgcatattattatgcgcgcctatcttgaaaagcctcgtacaactgttggatggaaagggttgattaatgatcccgatttggatggatcttataacattaataagggtattcgtgtcgctcgacgcatttttctggagcttctggaaactggtgtcggtatagcgtcagagatgctggacactataagtccccaatatttagctgatctaatttgctggggcgctattggtgctcgtaccactgagtcccaattgcatcgagaacttgcttcagggctttcttttccaataggttttaagaatgctactgacggtaacattggtattgctatagatgctatgaattcttctgccaaccctcatcatttcttgtctgtcacaaagcagggtgttgtagccattgttactactacaggtaaccctgatacacacattattttgcgtggtggtaaaagtgggactaacttcgatgctgattcagtggctggtgccaaggctaaactcgaagaatgcaacaagctacctagtatcatgatcgactgttctcatggaaactcatctaaaaaccataagaatcaacccaaggttgctgcttgtattgctgagcaggtggcaaacggtcagaaagcaattactggtgtcatgatcgaatctcaccttaacgaaggtaagcaagctatacctgaggatgatttgtcaagtatgaaatatggagtcagtgtcaccgatgcttgcattggttgggacgacactaccgccgtttttgaacagttggctgctgccgtccgttctcgtcgttctcattaa

SEQ ID NO: 1574 - protein, 368 aa, Schizosaccharomyces pombe
MDKHTPLLPGDSVFSRCKTEDSRIKGYDPVISPALIQSELAASDETLAFVSDQRRQAADIIAGRDDRLLLIVGPCSLHDPVAAKEYAIRLQKEAIKHKKDLHIIMRAYLEKPRTTVGWKGLINDPDLDGSYNINKGIRVARRIFLELLETGVGIASEMLDTISPQYLADLICWGAIGARTTESQLHRELASGLSFPIGFKNATDGNIGIAIDAMNSSANPHHFLSVTKQGVVAIVTTTGNPDTHIILRGGKSGTNFDADSVAGAKAKLEECNKLPSIMIDCSHGNSSKNHKNQPKVAACIAEQVANGQKAITGVMIESHLNEGKQAIPEDDLSSMKYGVSVTDACIGWDDTTAVFEQLAAAVRSRRSH

SEQ ID NO: 1575 - DNA, 1089 bp, Amycolatopsis orientalis
  CDS (1)..(1089)
atgacaacatctactcccgccgccgcggtcgacctcgacaaccagaggatcgaccgcatagtcccattggtgacaccggccctgctgcaccatgaactgccgctcagcgccaaggcagccgacaccgtgcgacgaggtcgtgagaacgtccttcgcgtcctcgacggtacggatgaccggctgctcgtgatcactggaccgtgctccatccacgacccggccgcggccctcgactacgccgaccacctcgccacgatggccggccggttcactgacgacctcctgatcgtcatgcgcgtgtacttcgagaaaccgcgaacggtcggtggctggaaagggctcatcaacgacccccacctcgacggcaccggcgacgtgaaccacggcctgcgaatcgcccggcacctgttgctggagctcgccgaacgcggcctgcccgtcgcgtgcgagtggctggacacgaccatcccggcctacctcgccgacaccgtttcctggggcgcgatcggtgcccgcaccgtggaaagccaaaaccaccgcatgctcgccagcggtctgtccatgccggtcggcttcaagaaccgccgcgacggcgacatcaccgtggccatcgacgcgatccgcgctgcggcggcccgtcacgtcgttcctggcgtcgaccccggcggcttgcccgccatcctgcacaccgccggcaaccccgactgccatcttgttctgcgcggcggcaattccgcgcccaaccacgacgcctcgtctgtccacacagcactcaccgcgctgcaggacgccggtcttccccgccgggtcgtgatcgatgccagccatgacaacagccgcaaggaccaccaccggcaacctgttgtcgccgggcagatcgccgaccaggtcaagggcggccaacgcggcattgttggcgtgatgctcgaatccaacctccgcgccggccgccaggacctccgccccggccagcctctgacctacggccagtccatcacggacgcctgcatcgacatccccacgacgcagaccgttctgcagaccctcgccacggcaaccgcggctcggcggcgtctcagccagaactga

SEQ ID NO: 1576 - protein, 362 aa, Amycolatopsis orientalis
MTTSTPAAAVDLDNQRIDRIVPLVTPALLHHELPLSAKAADTVRRGRENVLRVLDGTDDRLLVITGPCSIHDPAAALDYADHLATMAGRFTDDLLIVMRVYFEKPRTVGGWKGLINDPHLDGTGDVNHGLRIARHLLLELAERGLPVACEWLDTTIPAYLADTVSWGAIGARTVESQNHRMLASGLSMPVGFKNRRDGDITVAIDAIRAAAARHVVPGVDPGGLPAILHTAGNPDCHLVLRGGNSAPNHDASSVHTALTALQDAGLPRRVVIDASHDNSRKDHHRQPVVAGQIADQVKGGQRGIVGVMLESNLRAGRQDLRPGQPLTYGQSITDACIDIPTTQTVLQTLATATAARRRLSQN

SEQ ID NO: 1577 - DNA, 1119 bp, Schizosaccharomyces pombe
  CDS (1)..(1119)
atgtctccggtttttttacccagcggtgaaacttacgatcaagagcatcttgatgacaaccgtgtcttaggttacaaccctttggttcctgccgctttggttcaacaagagattcctgtttctgaaacttctcgcaaagtcatcactgactccagaaaggagattcaagctattctcaacaaacaagatgacagaattatcgttgttgtcggtccttgctccattcatgaccctaaattggccatggactatgctaagttgctgaagcccaaagctgacgagcttcaggatgctttgtgcgttgtcatgcgttgttatttggagaagccccgtactactatcggatggaagggtttggtcaacgaccctaacttggatggttcttttgctatcaacaagggtattaggatggctcgtcaaatgtattgcgacgttaccaattttggcattcctttggccagtgagatgttggacaacatttctccccaattcttcgccgacttactcagttttggtgctatcggtgctcgtactaccgagtctcaattacatcgtgaattggcttctgccctttccttccctgttggtttcaagaatggtactgatggtactgttggtgtggcgattgatgccattggtgctaccgcccatcctcacacaatgctaggagttactaaacaaggtctcgccgctattaccatgaccaggggcaacaaggataccttcatcattttgcgtggtggtaagaagggtcctaactatgatgctgagcacgttgccgccgttcgcaaagatcttgagaaggccaaccttcctcctcgtatcatgatcgattgctctcatggcaactcaagcaagaatcatttgaaccaaccaaaggtctccaagagcatcgccgaacaaatcagaaatggcgactcttccattgttggtgttatgattgaatctcatatcaatgaaggtcgtcaagatgctccaatccgtcctggcgttaaggatactctcaagtacggtgtcagtatcactgatgcttgtgttagctgggaacaaactgctccaatgctagacgatcttgctgaagctgtccgtgctcgccgtcaaaaccaaaaaagtaattaa

SEQ ID NO: 1578 - protein, 372 aa, Schizosaccharomyces pombe
MSPVFLPSGETYDQEHLDDNRVLGYNPLVPAALVQQEIPVSETSRKVITDSRKEIQAILNKQDDRIIVVVGPCSIHDPKLAMDYAKLLKPKADELQDALCVVMRCYLEKPRTTIGWKGLVNDPNLDGSFAINKGIRMARQMYCDVTNFGIPLASEMLDNISPQFFADLLSFGAIGARTTESQLHRELASALSFPVGFKNGTDGTVGVAIDAIGATAHPHTMLGVTKQGLAAITMTRGNKDTFIILRGGKKGPNYDAEHVAAVRKDLEKANLPPRIMIDCSHGNSSKNHLNQPKVSKSIAEQIRNGDSSIVGVMIESHINEGRQDAPIRPGVKDTLKYGVSITDACVSWEQTAPMLDDLAEAVRARRQNQKSN

SEQ ID NO: 1579 - DNA, 1092 bp, Mesorhizobium loti MAFF303099
  CDS (1)..(1092): transl_table=11
gtgttgaccaccacagacgacctccgggtcaaggaaatccgagaactgagcacgccggaccaggtgatgcgggaaatcccgcgcacgctgacggcgacgcgcaccgtgagcgcctcacgcaatgcgatccacgctattctgaacggcaccgacgaccggctgcttgtcgtcgtcggtccctgttcgatccacgatccggtcgcggccgttgactatgccagccgtctggcggcgctgcgcgagaccctgtccgaccggcttgagatcgtgatgcgggtgtatttcgagaagccgcgcaccacggtcggctggaagggcctgatcaacgatcccgaccttgacggcagcttcaacatcgacaaggggctcaggatggcacgcaacgtgctttccgccgtcaacaatctcggcctgccggcggccaccgaattcctcgacatgaccacgccgcaatacattgccgacctcgtcgcctggggtgccatcggcgcgcgcaccaccgaaagccaaatccaccgtgagctggcctcgggcctgtcctgcccggtcggtttcaagaacggcaccgacggcaatctcaggatcgccggcgaggcggtgaaatcggccgcccagccgcatcatttcatggcggtgaccaagggcggacgcagcggcatcgccaccaccaccggcaatgaggactgccatgtcatcctgcgcggcggcgttcagcccaactacgacgcggcgagcgtcgaggcggcctcggtcgaactcgcccgcatcggtgtcgcgccgcggctgatgatcgatgtcagccacgccaactccgccaagaagcctgagaaccagccgaaggtggcggccgatgtggccggccaggtggcggcgggcgacgagcgcatcatcggcctgatgatcgagagcaatctcgtcgccggccggcaggacgtggtgcccggcaagccgctcgtctatggccagagcatcaccgatggctgcatcgactgggcgaccaccgagaccgtgctgcatggccttgccggtgccgtcgagtggcgccggtcggcacgccgcgccatgctggaaagccggcagggtgctgcctga

SEQ ID NO: 1580 - protein, 363 aa, Mesorhizobium loti MAFF303099
MLTTTDDLRVKEIRELSTPDQVMREIPRTLTATRTVSASRNAIHAILNGTDDRLLVVVGPCSIHDPVAAVDYASRLAALRETLSDRLEIVMRVYFEKPRTTVGWKGLINDPDLDGSFNIDKGLRMARNVLSAVNNLGLPAATEFLDMTTPQYIADLVAWGAIGARTTESQIHRELASGLSCPVGFKNGTDGNLRIAGEAVKSAAQPHHFMAVTKGGRSGIATTTGNEDCHVILRGGVQPNYDAASVEAASVELARIGVAPRLMIDVSHANSAKKPENQPKVAADVAGQVAAGDERIIGLMIESNLVAGRQDVVPGKPLVYGQSITDGCIDWATTETVLHGLAGAVEWRRSARRAMLESRQGAA

SEQ ID NO: 1581 - DNA, 1188 bp, Vibrio cholerae O1 biovar eltor str. N16961
  CDS (1)..(1188): transl_table=11
ttggtcaaatgctcggtttttacttcaatttacacccctttccgcagctgttttcggcgtaatggtttattctcgttgacaaattcgttatctttagcgcttcgcaataaaaggacaggcgctcctatgccactgaaaaccgatgaattaagaacccaagcattgggacctatgcctactccggcagaattaagtcacgcacatcctatcactgatgaagttgcgctacggatcgcgcagtctcgtcgccaaattgaaagcattcttaccggtgaagatgatcgcctattagtgatagtggggccttgttcggtgcatgataccgatgccgcactcgactacgctcgccgccttgctgcgctacaagaaaactatactgatgagctttttgtggtgatgcggacctatttcgaaaaaccacgtactgtggtgggttggaaaggactgatcaccgatccaaacttagatggctcttacgctttagaaaccggtctcaataaagcgcgaaagttgctgcttgatgtaaacaagctcggattggctaccgcgaccgagtttcttgatatgatcacaggccaatacatcgcggaccttatcacgtggggcgcaattggtgcgcgtaccactgagtcgcaaattcaccgtgagatggcctctgcgctctcctgccctgtgggttttaaaaatggcactaacggtaatgtgaaaatcgcgattgatgcgatccgcgcggccaaagcgtcacattacttctattcaccagataagaatggtcgtatgacggtttaccgtaccagtggtaacccatttggtcatattattctgcgtggtggtgatagcggaccaaactttgatgcggcttcgattaatgaagcttgccagcagttggcgcaattcaacttaccagagcgtttagtggtggatttcagccacgcgaactgtcaaaaacaacaccgtaaacaagtggatgtcgcgcgcgatatttgccagcaaattgaagctggcagccacaaaattgcgggcatcatggcggaaagcttccttgtggaaggcaatcagccaatgcacgatctcaataatctgacttatggtctgtcgatcaccgatccttgtttaggatggaaagataccgccaccatgcttgatatgctggctcaatcgatcaaagtccgtcgttctcgtcattaa

SEQ ID NO: 1582 - protein, 395 aa, Vibrio cholerae O1 biovar eltor str. N16961
MVKCSVFTSIYTPFRSCFRRNGLFSLTNSLSLALRNKRTGAPMPLKTDELRTQALGPMPTPAELSHAHPITDEVALRIAQSRRQIESILTGEDDRLLVIVGPCSVHDTDAALDYARRLAALQENYTDELFVVMRTYFEKPRTVVGWKGLITDPNLDGSYALETGLNKARKLLLDVNKLGLATATEFLDMITGQYIADLITWGAIGARTTESQIHREMASALSCPVGFKNGTNGNVKIAIDAIRAAKASHYFYSPDKNGRMTVYRTSGNPFGHIILRGGDSGPNFDAASINEACQQLAQFNLPERLVVDFSHANCQKQHRKQVDVARDICQQIEAGSHKIAGIMAESFLVEGNQPMHDLNNLTYGLSITDPCLGWKDTATMLDMLAQSIKVRRSRH

SEQ ID NO: 1583 - DNA, 1086 bp, Pasteurella multocida subsp. multocida str. Pm70
  CDS (1)..(1086): transl_table=11
atgacagaatataaaaatgaaatttatatcgaaaatgatgacaccagaattgataaaattgagcaagttttaccgcctgtggcgttattagaaaaatttcctgccagtgatgtggcagtagaaaccgtcagacaaacacgaaaaaaagcacataatattattcatcgaaaagatgaccgtttattagttgtcatgggaccttgttccattcatgatcctgtttctgcgctggagtatgcgaaacggattaaaatgatgcgcgaaaaataccaagatagcttggagattattatgcgtgtctattttgaaaaaccgcgaaccacggtagggtggaaaggcttgattaatgatcctcacctaaatggtacctttgagctgaatgaagggttgcgtcttgcgcgtaaattattatcggacgttaatgatttaggggtaccggctgcgggtgaatttttggacatgattacaccacaatatctggctgatttcatgagttggggtgcgattggtgccagaaccacagaatcacaggtgcaccgtgaacttgcctctggtctatcttgtgcagttggctttaaaaatggcacgaatggtggggtcagaatcgcgttagatgcgattggggcagcagaagcaccacattattttctttctgtcacgaaatttggtcattctgcgattgtatctacaaaagggaatgaagactgccacattattttacgaggcggtgataaaggtcctaattatgatgcagagcatattgctatggtttgtgcagagatcgaaaaaacagggcgtattccacatgtgatggtcgatttcagccatgctaacagttgtaaacaatttaaaaaacaattagaggtttgtgacagtgtttgccagcaaatcgctatgggttctactcaaatctttggtgtgatggtagaaagccatcttgttgaagggcgacaagatttagtagatggaaaagcggtcacttatgggcagagtatcacggacgcctgtattgggtgggaagatagcgagaaagttttggaatcgctttcaaaagctgtcatccaacgccgaaatttgcagcaataa

SEQ ID NO: 1584 - protein, 361 aa, Pasteurella multocida subsp. multocida str. Pm70
MTEYKNEIYIENDDTRIDKIEQVLPPVALLEKFPASDVAVETVRQTRKKAHNIIHRKDDRLLVVMGPCSIHDPVSALEYAKRIKMMREKYQDSLEIIMRVYFEKPRTTVGWKGLINDPHLNGTFELNEGLRLARKLLSDVNDLGVPAAGEFLDMITPQYLADFMSWGAIGARTTESQVHRELASGLSCAVGFKNGTNGGVRIALDAIGAAEAPHYFLSVTKFGHSAIVSTKGNEDCHIILRGGDKGPNYDAEHIAMVCAEIEKTGRIPHVMVDFSHANSCKQFKKQLEVCDSVCQQIAMGSTQIFGVMVESHLVEGRQDLVDGKAVTYGQSITDACIGWEDSEKVLESLSKAVIQRRNLQQ

SEQ ID NO: 1585 - DNA, 1056 bp, Neisseria meningitidis MC58
  CDS (1)..(1056): transl_table=11
atgacacaccattaccccacagacgatattaagattaaagaagttaaagagttgttgccgccgatagcccatctttacgagctgccgatttccaaagaggcttcgggcttggttcaccgcacccgtcaggaaatttccgatttggttcacggcagggacaagcggctgttggttattatcgggccgtgttcgattcacgatccgaaagcggcgttggaatatgcggagcgtttgttgaaactccgcaagcagtatgaaaacgagcttttgattgtgatgcgcgtttatttcgagaagccgaggacgacggtgggttggaaaggtttgattaacgacccgcatttggacggtacgtttgacatcaatttcggtttgcgtcaggcgcgcagcctgttgttgtcgctgaacaatatgggtatgcctgcctctaccgagtttttggatatgattacgccgcaatattatgcggacttgatttcttggggggcaatcggtgcgcggacgaccgaaagccaagttcaccgcgaattggcaagcgggctgtcctgccccgtcggctttaaaaacggtacggacggcaatttgaagattgccatcgacgcaatcggtgcggcgagccattcgcatcatttcctgtctgtaaccaaggccgggcattccgccattgtccataccggcggcaatcccgactgtcatgtcattttgcgcggcggcaaagagccgaattatgatgcggaacacgtcagcgaggcggcggaacaactgcgtgcggcaggggtaaccgacaagctgatgatagattgcagccacgccaacagccgcaaggattacactcggcagatggaagtggcacaagacattgccgcccaattggaacaggacggcggcaatatcatgggcgtgatggtggaaagccatttggtcgaaggcagacaggacaagccggaagtgtacggcaagagcattaccgatgcgtgtatcggttggggcgcgactgaagaactgttggcattgttggcaggtgcaaacaaaaaacgtatggcgcgcgccagttga

SEQ ID NO: 1586 - protein, 351 aa, Neisseria meningitidis MC58
MTHHYPTDDIKIKEVKELLPPIAHLYELPISKEASGLVHRTRQEISDLVHGRDKRLLVIIGPCSIHDPKAALEYAERLLKLRKQYENELLIVMRVYFEKPRTTVGWKGLINDPHLDGTFDINFGLRQARSLLLSLNNMGMPASTEFLDMITPQYYADLISWGAIGARTTESQVHRELASGLSCPVGFKNGTDGNLKIAIDAIGAASHSHHFLSVTKAGHSAIVHTGGNPDCHVILRGGKEPNYDAEHVSEAAEQLRAAGVTDKLMIDCSHANSRKDYTRQMEVAQDIAAQLEQDGGNIMGVMVESHLVEGRQDKPEVYGKSITDACIGWGATEELLALLAGANKKRMARAS

SEQ ID NO: 1587 - DNA, 1056 bp, Neisseria meningitidis Z2491
  CDS (1)..(1056): transl_table=11
atgacacaccattaccccacagacgatattaagattaaagaagttaaagagttgttgccgccgattgcccatctttacgagctgccgatttccaaagaggcttcgggcttggttcaccgcacccgtcaggaaatttccgatttggttcacggcagggacaagcggctgttggttattatcgggccgtgttcgattcacgatccgaaagcggcgttggaatatgcggagcgtttgttgaaactccgcaagcagtatgaaaacgagcttttgattgtgatgcgcgtttatttcgagaagccgaggacgacggtgggttggaaaggtttgattaacgacccgcatttggacggtacgtttgacatcaatttcggtttgcgtcaggcacgcagcctgttgttgtcgctgaacaatatgggtatgcctgcctctaccgagtttttggatatgattacgccgcaatattatgcggacttgatttcttggggggcaatcggcgcgcggacgaccgaaagccaagttcaccgcgaattggcaagcgggctgtcctgccccgtcggctttaaaaacggtacggatggcaatttgaagattgccatcgacgcaatcggtgcggcgagccattcgcatcatttcctgtctgtaaccaaggccgggcattccgccattgtccataccggcggcaatcctgactgtcatgtcattttgcgcggcggaaaagagccgaattatgatgcgggacacgtcagcgaggcggcggaacaactgcgtgcggcaggcgtaaccgacaagctgatgattgattgcagccacgccaacagccgcaaggattacacccgacagatggaagtggcgcaagacattgccgcccaattggaacaggacggcggcaatattatgggcgtgatggtggaaagccatttggtcgaaggcaggcaggacaagccggaagtgtacggcaaaagcattaccgatgcgtgtattggttgggacgcgactgaagaactgttggcattgttggcaggtgcaaacaaaaaacgtatggcgcgcgccggttga

SEQ ID NO: 1588 - protein, 351 aa, Neisseria meningitidis Z2491
MTHHYPTDDIKIKEVKELLPPIAHLYELPISKEASGLVHRTRQEISDLVHGRDKRLLVIIGPCSIHDPKAALEYAERLLKLRKQYENELLIVMRVYFEKPRTTVGWKGLINDPHLDGTFDINFGLRQARSLLLSLNNMGMPASTEFLDMITPQYYADLISWGAIGARTTESQVHRELASGLSCPVGFKNGTDGNLKIAIDAIGAASHSHHFLSVTKAGHSAIVHTGGNPDCHVILRGGKEPNYDAGHVSEAAEQLRAAGVTDKLMIDCSHANSRKDYTRQMEVAQDIAAQLEQDGGNIMGVMVESHLVEGRQDKPEVYGKSITDACIGWDATEELLALLAGANKKRMARAG

SEQ ID NO: 1589 - DNA, 1095 bp, Xylella fastidiosa 9a5c
  CDS (1)..(1095): transl_table=11
atgccaccatttaccgacgacctccgtatccgcaaaattgaaccactgacacctcctaaccagctcctattgcaactaccatgcgatgagcaggcatcgctgactgttgcgacctcacgcaacgcactgcacgatatcctgcacggccacaacgaccgtttagccgtcgtgataggcccatgctcaatccatgatccaattgcagccattgattacgcgcaacgtctacacccattgcgtgagatgtacaaggatgcactagagatcgtgatgcgggtttactttcagaaaccgcgcaccaccattggttggaaaggattggtcaacgatccggatcttgatggcagcttccaaatcaataagggcctgcatatcgcgcgcaacctgctacgcgatatcaatcatctcggcttacccgctggtgtggaatttctagacacgatttcgccgcaatatctggctgacttagtcgcctggggtgccattggtgcacgcaccactgagagccaaatacaccgtgaaatggcttcaggtttatcgtgcccgattggctttaaaaacagtaccagtggtgatgtgaaaattgctgctgacgcgattaaagcagcttcgcatccgcaccatttcctttcagtgacaaagacaggtgttgccgcagtcgtcgccacccagggtaaccccgattgtcacgtgattctacgtggaggcagggtcccgaattacgacgcaatcaatgtcgaagctgccagccaaacattgcttaaatccaagctaccggtgcgactgatgattgatgcgagccatgccaatagcggcaaaaacccaaacaatcaacccaaggtgatcgagaacatcgtagaacagcttgaagccggtgaacgccgcatcgtcggtgtcatgattgaaagccacattgttggtggtcggcaagaattagtccttggaaacacacttacctatggacagagcattaccgatgcttgcatcgactgggatacctcggtcgcaatgttagagcagctcgctcaggccgtacgcgtcagacagactctaccaacgaccgctacaactaacaaaacatcaaaaacccaataa

SEQ ID NO: 1590 - protein, 364 aa, Xylella fastidiosa 9a5c
MPPFTDDLRIRKIEPLTPPNQLLLQLPCDEQASLTVATSRNALHDILHGHNDRLAVVIGPCSIHDPIAAIDYAQRLHPLREMYKDALEIVMRVYFQKPRTTIGWKGLVNDPDLDGSFQINKGLHIARNLLRDINHLGLPAGVEFLDTISPQYLADLVAWGAIGARTTESQIHREMASGLSCPIGFKNSTSGDVKIAADAIKAASHPHHFLSVTKTGVAAVVATQGNPDCHVILRGGRVPNYDAINVEAASQTLLKSKLPVRLMIDASHANSGKNPNNQPKVIENIVEQLEAGERRIVGVMIESHIVGGRQELVLGNTLTYGQSITDACIDWDTSVAMLEQLAQAVRVRQTLPTTATTNKTSKTQ

SEQ ID NO: 1591 - DNA, 1071 bp, Escherichia coli O157:H7
  CDS (1)..(1071): transl_table=11
atgcaaaaagacgcgctgaataacgtacatattaccgacgaacaggttttaatgactccggcacaactgaaggccgcttttccattaagcctgcaacaagaagcccagattgctgactcgcgtaaaaccatttcagatattatcgccgggcgcgatcctcgtctgctggtagtatgtggcccttgttccattcatgatccggaaactgctctggaatatgctcgtcgatttaaagcccttgccgcagaggtcagcgatagcctctatctggtaatgcgcgtctattttgaaaaaccccgtaccactgtcggctggaaagggttaattaacgatccccatatggatggctcttttgatgtagaagccgggctgcagatcgcgcgtaaattgctgcttgagctggtgaatatgggactgccactggcgacggaagcgttagatccgaatagcccgcaatacctgggcgatctgtttagctggtcagcaattggtgctcgtacaacggaatcgcaaactcaccgtgaaatggcctccgggctttccatgccggttggctttaaaaacggcaccgacggcagtctggcaacagcaattaacgctatgcgcgccgccgcccagccgcaccgttttgttggcattaaccaggcagggcaggttgcgttgctacaaactcaggggaatccggacgggcatgtcatcctgcgcggtggtaaagcgccgaactatagccctgcggatgttgcgcaatgtgaaaaagagatggaacaggcgggactgcgcccgtctctgatggtagattgcagccacggtaattccaataaagattatcgccgtcagcctgcggtggcagaatccgtggttgctcaaatcaaagatggcaatcgctcaattattggtctgatgatcgaaagtaatatccacgagggcaatcagtcttccgagcaaccgcgcagtgaaatgaaatacggtgtatccgtaaccgatgcctgcattagctgggaaatgaccgatgccttgctgcgtgaaattcatcaggatctgaacgggcagctgacggctcgcgtggcttaa

SEQ ID NO: 1592 - protein, 356 aa, Escherichia coli O157:H7
MQKDALNNVHITDEQVLMTPAQLKAAFPLSLQQEAQIADSRKTISDIIAGRDPRLLVVCGPCSIHDPETALEYARRFKALAAEVSDSLYLVMRVYFEKPRTTVGWKGLINDPHMDGSFDVEAGLQIARKLLLELVNMGLPLATEALDPNSPQYLGDLFSWSAIGARTTESQTHREMASGLSMPVGFKNGTDGSLATAINAMRAAAQPHRFVGINQAGQVALLQTQGNPDGHVILRGGKAPNYSPADVAQCEKEMEQAGLRPSLMVDCSHGNSNKDYRRQPAVAESVVAQIKDGNRSIIGLMIESNIHEGNQSSEQPRSEMKYGVSVTDACISWEMTDALLREIHQDLNGQLTARVA

SEQ ID NO: 1593 - DNA, 1110 bp, Caulobacter crescentus CB15
  CDS (1)..(1110): transl_table=11
atgccgtccacgtccaccgctcacctcgtcaccctgcccgttccgaccgatgatctgcggatcgagaaactccagaccctgagcccgccggctcaggtcatcggagaagctcccgccacctcgtcagtggccgagatcgtcggcggggcgcgtcaggcggttcatcagatcctgcacggccaggacgaccgcctcgtcgtggtcatcggcccctgctccattcacgaccccaaggcggcgatcgactacgcccggcgcctcgccgccgagcgcgagcgccacgcgggcgaactggaagtgatcatgcgggtctatttcgagaagccgcgcacgaccgtgggctggaagggcctgatcaacgatccgggcctcgacggcggcttccggatcaatgacggcctgcgtctggcgcgacgggttctgctggacgtcagcgcgcagggcctgccggccgcctgcgagttcctggacgtgaccaccccgcagtacatcgctgacctggtatcctggggcgcgatcggcgcccgcaccaccgagagccagattcaccgcgaactggcctcgggcctttcctgccccgtcggtttcaagaacggcaccaatggcgatgtgaagatcgccgtcgacgccgtaatggccgcgtcccagccgcaccacttcctggccgtcaccaaagagggccgcgcggcgatcgccaccacgacgggcaatggtgactgtcacctcgtgctgcgcggcggcaagaccccgaactacgacgccgccagcgtcgccgccgccgcagaggttctgagcaaggccggactgccgcagcgcctgatggtcgatgtcagccacgccaacagcggcaagaaccatgagaaccaacccgccgtgatcgccgacgtctgcgcccaggtcgcgaccggcgcctcgccggtcatgggcgtgatgatcgagagcaatctcgtggccggccgccaggatatcgtccaaggccagggcctgacctatggtcagtcggtcaccgacgcctgcgtcgactgggaaacctcggtgcggctgctggacgacctggcgggcgcagttcgcgcgggtcgcctggcgcggggctctaaatcaagcacttag

SEQ ID NO: 1594 - protein, 369 aa, Caulobacter crescentus CB15
MPSTSTAHLVTLPVPTDDLRIEKLQTLSPPAQVIGEAPATSSVAEIVGGARQAVHQILHGQDDRLVVVIGPCSIHDPKAAIDYARRLAAERERHAGELEVIMRVYFEKPRTTVGWKGLINDPGLDGGFRINDGLRLARRVLLDVSAQGLPAACEFLDVTTPQYIADLVSWGAIGARTTESQIHRELASGLSCPVGFKNGTNGDVKIAVDAVMAASQPHHFLAVTKEGRAAIATTTGNGDCHLVLRGGKTPNYDAASVAAAAEVLSKAGLPQRLMVDVSHANSGKNHENQPAVIADVCAQVATGASPVMGVMIESNLVAGRQDIVQGQGLTYGQSVTDACVDWETSVRLLDDLAGAVRAGRLARGSKSST

SEQ ID NO: 1595 - DNA, 1053 bp, Salmonella enterica subsp. enterica serovar Typhi str. CT18
  CDS (1)..(1053): transl_table=11
atgaattatcagaatgacgatttacgcattaaagaaatcaacgagttattacctccggtcgcgctgctggaaaagtttcccgccacggaaaatgcagcaaataccgttgctcacgcacgcaaagccatccataaaattctcaaaggcaatgacgatcgtctgctggtggtgatcggtccttgttcaattcatgatccggcagcggcgaaagagtatgccgcccgtttgctggcgctacgcgatgagcttcaaggcgagcttgaaattgtcatgcgcgtctattttgagaaaccgcgtactaccgtcggctggaaagggctgattaacgatccgcacatggataacagcttccagattaacgacggtctgcgtattgcgcgcaaactgctgctggatattaacgacagcggcctgcctgccgccggcgaattcctcgatatgatcacgccgcaatatctggccgatctgatgagctggggcgccattggcgcacggactactgaatcccaggttcatcgcgaactggcgtctggcctctcttgtccggtcggttttaaaaatggtactgatggcacgattaaagtcgccattgacgccatcaacgccgccggcgcgccgcattgcttcctctccgtcactaaatggggtcattcggcgattgtgaataccagcggcaacggcgactgccatatcattctgcgcggcggtaaagcgccaaactatagcgcgcaacatgttgctgaggtgaaagaaggcctcatcaaagcgggactgacgccgcaggtcatgatcgatttcagccatgccaactcctgtaagcaatttcaaaagcagatggaggtttgcgccgatgtctgtcagcagatagcgggcggtgaaaaagcgattattggcgtgatggtagagagtcatctggtagaaggaaaccagagtctggaaagcggtcagccgctgacctacggtaaaagcattactgacgcctgtattggctgggaagataccgatgcgctgcttcgtcagttgtcggcagcggtaaaagcccgtcgaggttaa

SEQ ID NO: 1596 - protein, 350 aa, Salmonella enterica subsp. enterica serovar Typhi str. CT18
MNYQNDDLRIKEINELLPPVALLEKFPATENAANTVAHARKAIHKILKGNDDRLLVVIGPCSIHDPAAAKEYAARLLALRDELQGELEIVMRVYFEKPRTTVGWKGLINDPHMDNSFQINDGLRIARKLLLDINDSGLPAAGEFLDMITPQYLADLMSWGAIGARTTESQVHRELASGLSCPVGFKNGTDGTIKVAIDAINAAGAPHCFLSVTKWGHSAIVNTSGNGDCHIILRGGKAPNYSAQHVAEVKEGLIKAGLTPQVMIDFSHANSCKQFQKQMEVCADVCQQIAGGEKAIIGVMVESHLVEGNQSLESGQPLTYGKSITDACIGWEDTDALLRQLSAAVKARRG

SEQ ID NO: 1597 - DNA, 1053 bp, Salmonella typhimurium LT2
  CDS (1)..(1053): transl_table=11
atgaattatcagaacgacgatttacgcattaaagaaatcaacgagttattacctccggtcgcgctgctggaaaagtttcccgccacggaaaatgcagcaaataccgttgctcacgcgcgcaaagccatccataaaattctcaaaggcaatgacgatcgtctgctggtggtgatcggtccttgttcaattcatgatccggcagcggcgaaagagtatgccgcccgtttgctggcgctacgcgatgagcttcaaggcgagcttgaaattgtcatgcgcgtctattttgagaaaccgcgtaccaccgtcggctggaaagggctgattaacgatccgcacatggataacagcttccagattaacgacggtctgcgtattgcgcgcaaactgctgctggatattaacgacagcggcctgcctgccgccggcgaattcctcgatatgatcacgccgcaatatctggccgatctgatgagctggggcgccattggcgcgcggactactgaatcccaggttcatcgcgaattggcgtctggcctctcttgtccggtcggttttaaaaatggtactgatggcacgattaaagtcgccattgacgccatcaacgccgccggcgcgccgcattgcttcctctccgtcactaaatggggtcattcggcgattgtgaataccagcggcaacggcgactgccatatcattctgcgcggcggtaaagcgccaaactatagcgcgcagcatgttgctgaggtgaaagaaggcctcaccaaagcgggactgacgccgcaggtcatgatcgatttcagccatgccaactcctgtaagcaatttcaaaagcagatggaggtttgcgccgatgtctgccagcagatagcgggcggtgaaaaagcgattattggcgtgatggtagagagtcatctggtagaaggaaaccagagtctggaaagcggtcagccgctgacctacggtaaaagcattactgacgcctgtattggctgggaagataccgatgcgctgcttcgtcagttgtcggcagcggtaaaagcccgtcgcggctaa

SEQ ID NO: 1598 - protein, 350 aa, Salmonella typhimurium LT2
MNYQNDDLRIKEINELLPPVALLEKFPATENAANTVAHARKAIHKILKGNDDRLLVVIGPCSIHDPAAAKEYAARLLALRDELQGELEIVMRVYFEKPRTTVGWKGLINDPHMDNSFQINDGLRIARKLLLDINDSGLPAAGEFLDMITPQYLADLMSWGAIGARTTESQVHRELASGLSCPVGFKNGTDGTIKVAIDAINAAGAPHCFLSVTKWGHSAIVNTSGNGDCHIILRGGKAPNYSAQHVAEVKEGLTKAGLTPQVMIDFSHANSCKQFQKQMEVCADVCQQIAGGEKAIIGVMVESHLVEGNQSLESGQPLTYGKSITDACIGWEDTDALLRQLSAAVKARRG

SEQ ID NO: 1599 - DNA, 1179 bp, Ralstonia solanacearum GMI1000
  CDS (1)..(1179): transl_table=11
atgggcaatcggcggactgccccggtttcggcgcaccgctcgtgtttccaggagttttccgtgattcgcatcgacaatccccaaagcgaccaagaagtcggcgtggccgacgctacccaggacaccacccgcatcgatgacgtgcgcatcggtgcggtccgtccgctcatttccccggcactcctgctcgacgagttgcccgtgtcgcccgccgtgcaggcgcacgtcgaagcgagccgggccgcggtcacggacatcctgcacggacgggacgatcgcctgcttgccgtggtgggcccgtgctcgatccacgatcacgaccaggcgctcgactacgcccatcggctcgggacggccgcgaatcgcctgcgcgacgatctgctgatcgtcatgcgcgtgtatttcgaaaagccgcgcacgaccgtcggctggaagggctacatcaacgatccgcggctcgacggcagcttccgcatcaacgaagggctgcgccgtgcgcgccagttgctcctggaagtcaacgcgatgggattgccggcggccaccgagtttctcgatctgctgagtccgcagtacatcgcggacctgattgcctggggcgcgatcggcgccaggacgacggaaagccagagccatcggcagctcgcctcgggactgagctgtcccatcggcttcaagaacggcacggatggcggtgtccagatcgcggcggacgcgattctggcggcgcggtcgagccactcgttcatgggcatgacgaagatggggatggccgcgattttcgagacgcgcggcaacggtgatgcgcacgtcattcttcgcggcggcaagaagggaccgaactatgacgcggcggccatcgaagacagctgcgcgattctccgggcggccgggctgcgcgagcaggtgatggtcgactgttcgcacgcgaactcgggcaagtcccatgcccgtcaagccgacgttgcgcgggatctggcgcagcagctgtcgtccggcgagcggcgcatcagcggcgtgatgatcgagagccatctggaagaggggcgccaggatctgaaacccggcgtgccgttgcagcgcggcgtgtccattaccgatgcctgccttgggtggtcccagacggaaccgttgctggaaaccctcgcaacggctgtgcgtgcgcggcggcgcggctag

SEQ ID NO: 1600 - protein, 392 aa, Ralstonia solanacearum GMI1000
MGNRRTAPVSAHRSCFQEFSVIRIDNPQSDQEVGVADATQDTTRIDDVRIGAVRPLISPALLLDELPVSPAVQAHVEASRAAVTDILHGRDDRLLAVVGPCSIHDHDQALDYAHRLGTAANRLRDDLLIVMRVYFEKPRTTVGWKGYINDPRLDGSFRINEGLRRARQLLLEVNAMGLPAATEFLDLLSPQYIADLIAWGAIGARTTESQSHRQLASGLSCPIGFKNGTDGGVQIAADAILAARSSHSFMGMTKMGMAAIFETRGNGDAHVILRGGKKGPNYDAAAIEDSCAILRAAGLREQVMVDCSHANSGKSHARQADVARDLAQQLSSGERRISGVMIESHLEEGRQDLKPGVPLQRGVSITDACLGWSQTEPLLETLATAVRARRRG

SEQ ID NO: 1601 - DNA, 1080 bp, Ralstonia solanacearum GMI1000
  CDS (1)..(1080): transl_table=11
atgccgaagaacaccgacgacctgcgcattcgcgaactgaaagagctgaccccgccggcgcacctgatccgcgaattcccgtgcaacgacgccgtttccgagctgatctaccagagccgcacggcgatgcaccgcatcctgcacggcatggacgaccgcctgatcgtcatcatcgggccgtgctcgatccacgacaccaaggccgccctcgactacgcgcgccgcctggtcgaacagcgcgagcgcttcaaggccgacctggaaatcgtcatgcgcgtgtacttcgagaagccgcgcaccacggtcggctggaagggcctgatcaacgacccgtacatggacggcagcttcaagatcaacgacggcctgcgcaccgcgcgcgagctgctggtgaacatcaacgagctgggcgtgccggcgggcaccgaatacctcgacatgatcagcccgcagtacatcgccgacctggtgagctggggcgcgatcggggcgcgcacgaccgaatcgcaggtgcaccgcgaactcgcctccggactgtcgtgcccggtcggcttcaagaacggcaccgatggcaacgtgaagatcgccgtggacgcgatcaaggcggcgtcgcagccgcaccacttcctgtcggtcaccaagggcggccactcggccatcgtgtcgacggcgggcaacgaggattgccacatcatcctgcgcggcggcaaggcgcccaactacgatgccgccagcgtgcaggcggcctgcgaagacatcgccaagtccggcctggccgcgcgcctgatgatcgatgcctcgcacgccaacagcagcaagaagcacgagaaccagatcccggtctgcgaagacatcggccgccagatcgccggcggcgacgaccgcatcgtcggcgtgatggtggaatcgcacatcaatgccggccgccaggaccacgtgcagggcaccccggtcgaggacctgaactacggccagagcgtgaccgacgcctgcatcggctgggacgattcgctcaaggtactggaaacgctggccgacgccgtgcgcaagcgccggctggtgccccgcaacggcaactga

SEQ ID NO: 1602 - protein, 359 aa, Ralstonia solanacearum GMI1000
MPKNTDDLRIRELKELTPPAHLIREFPCNDAVSELIYQSRTAMHRILHGMDDRLIVIIGPCSIHDTKAALDYARRLVEQRERFKADLEIVMRVYFEKPRTTVGWKGLINDPYMDGSFKINDGLRTARELLVNINELGVPAGTEYLDMISPQYIADLVSWGAIGARTTESQVHRELASGLSCPVGFKNGTDGNVKIAVDAIKAASQPHHFLSVTKGGHSAIVSTAGNEDCHIILRGGKAPNYDAASVQAACEDIAKSGLAARLMIDASHANSSKKHENQIPVCEDIGRQIAGGDDRIVGVMVESHINAGRQDHVQGTPVEDLNYGQSVTDACIGWDDSLKVLETLADAVRKRRLVPRNGN

SEQ ID NO: 1603 - DNA, 1074 bp, Xanthomonas campestris pv. campestris str. ATCC 33913
  CDS (1)..(1074): transl_table=11
atgccgccgctgaccgatgacctgcgtatccgcaagatcgaaccgttgaccccgccctcgcagctgctgtcgctgctgccctgcgatgagcgcgcttccgaaaccgtcaccaacgcacgtgccgccctgcacgagattctgcacgggcgcgatgaccgcctggcggtggtgatcggcccctgttcgatccacgaccctgtggctgccatggagtacgcgcagcgtctgcgccccttgcgtgagcagtttggcgacgcgctggaaatcgtgatgcgcgtgtacttcgaaaagccgcgcaccaccattggctggaagggcctgatcaacgacccggacctggatggcagtttccagatcaacaagggcctgcgcgtggcgcgtggcttgctgcgcgatatcaacaacctcggcctgccggccggcgtggaatttctcgacatcatctcgccgcagtacatcgctgacttggtggcctggggcgcgatcggtgcgcggaccaccgaaagccaggtgcatcgcgaaatggcctccggcctgtcgtgcccagtggggttcaagaacggcaccggtggcgacgtcaagattgccgtggacgcggtgggtgcggcctcgcatccgcatcatttcctggcggtgaccaaggatggccacacggcggtggcggccaccgcgggcaacccggattgtcatgtgattttgcgtggcggcaagcagcctaacttcgacgcggccaatgtggaagcatccagccaggtgctcaacaaggccggcttgccggcgcggctgatgatcgacgccagccacgccaacagcggcaagaacccggacaaccagcccaaggtcatcgacgacatcgccacgcagctggagggcggcgagacgcgcatcgttggcgtgatggtggaaagccacctggtcggcggccggcaggaactggtgccgggcggcacgctgacctacggccaaagcatcaccgacggctgcctggattgggacgcctcgctgcaggtgctggagcgcttggcgattgcggtgcgtgcacgtcgtgcgcggcgggttgccgaggctgcgtga

SEQ ID NO: 1604 - protein, 357 aa, Xanthomonas campestris pv. campestris str. ATCC 33913
MPPLTDDLRIRKIEPLTPPSQLLSLLPCDERASETVTNARAALHEILHGRDDRLAVVIGPCSIHDPVAAMEYAQRLRPLREQFGDALEIVMRVYFEKPRTTIGWKGLINDPDLDGSFQINKGLRVARGLLRDINNLGLPAGVEFLDIISPQYIADLVAWGAIGARTTESQVHREMASGLSCPVGFKNGTGGDVKIAVDAVGAASHPHHFLAVTKDGHTAVAATAGNPDCHVILRGGKQPNFDAANVEASSQVLNKAGLPARLMIDASHANSGKNPDNQPKVIDDIATQLEGGETRIVGVMVESHLVGGRQELVPGGTLTYGQSITDGCLDWDASLQVLERLAIAVRARRARRVAEAA

SEQ ID NO: 1605 - DNA, 1074 bp, Xanthomonas axonopodis pv. citri str. 306
  CDS (1)..(1074): transl_table=11
atgccgcccgtcaccgatgacctgcgtatccgcaagatcgaagccctcgcaccgcccgcgcagctgctgtcgctgctgccctgcgatgagcgcgcctccgaaaccgtgaccaacgcgcgcgccgcgctgcacgacatcctgcatgggcgcgacgaccgcctggccgtggtgatcgggccatgctcgatccacgacccggtcgcggcgatggagtacgcgcaacgcttgcgcccgttgcgcgatcagttcggcgacgcgctggagatcgtgatgcgggtgtacttcgaaaagccgcgcaccaccatcggctggaagggcttgatcaacgatccggacctggacggcagcttccagatcaacaagggcctgcgcgtggcgcgtggcctgctgcgcgatatcaacaatctcggcctgccggccggcgtggaatttctcgacatcatttcgccgcaatacatcgccgacctggtggcctggggcgcgatcggcgcacgcaccaccgagagccaggtgcatcgcgaaatggcgtccgggctgtcatgcccggtgggcttcaagaacggcaccggtggcgacgtcaagattgcggtggacgcggtgggcgcggcctcgcatccgcatcatttcctggccgtgaccaaggacggacataccgccgtggcagcgacggcgggcaatccggattgccatgtgatcctgcgcggcggcaaacagcccaacttcgatgcggccaatgtggaagcggccagccaggtgctcaatgcatccggcctgcccgcgcgcctgatgatcgatgccagccacgccaacagcagcaagaatcccgagaaccagcccaaggtcgtcgaggacatcgccaaccagctggaaggcggcgaaacacgcatcgtcggcgtgatggtggaaagtcacctggtcggtggacgccaggacctcttgccggggtgcgagctgacctacggccagagcattaccgacggctgcatcggctgggacagttcggtgcaggtgctggaacgcctggcgaccgcagtgcgcgcacggcgcatgcgccggattgccgaggctgcatga

SEQ ID NO: 1606 - protein, 357 aa, Xanthomonas axonopodis pv. citri str. 306
MPPVTDDLRIRKIEALAPPAQLLSLLPCDERASETVTNARAALHDILHGRDDRLAVVIGPCSIHDPVAAMEYAQRLRPLRDQFGDALEIVMRVYFEKPRTTIGWKGLINDPDLDGSFQINKGLRVARGLLRDINNLGLPAGVEFLDIISPQYIADLVAWGAIGARTTESQVHREMASGLSCPVGFKNGTGGDVKIAVDAVGAASHPHHFLAVTKDGHTAVAATAGNPDCHVILRGGKQPNFDAANVEAASQVLNASGLPARLMIDASHANSSKNPENQPKVVEDIANQLEGGETRIVGVMVESHLVGGRQDLLPGCELTYGQSITDGCIGWDSSVQVLERLATAVRARRMRRIAEAA

SEQ ID NO: 1607 - DNA, 1062 bp, Chlorobium tepidum TLS
  CDS (1)..(1062): transl_table=11
atgcaacaactacaggatttacgagtttcaagaatcattactcttagctcgccaaaggcactgaaggaaaaattgcccgtaacggagcatattgccgatacggtctacaaggctaggcaggaagttgagaatattctgaccggcaaggacagccgtatgctggtcatcgtcggcccatgctccattcacgacatcaaggcggctcgtgactatgcctcgcgcctttttgctttgcgcaaagaactcgaatcggagttctgcattgtcatgagggtttatttcgagaaaccacggacgaccatcggctggaaagggttcatcaacgaccctcatctcaacgatacctacgatatcgagcatggcctgttccatgcccgaaagctgttgattgagctgaatgaaatgggcctgcccgcagccacggagtttctcgatccgatctcgccgcaatatgttgctgacctgatcagctgggcagccattggcgcgcgtaccatcgagtcacagactcaccgccagatggccagtggcctgtcaatgccggtcggttttaaaaacgcgaccgatgggcgccttcaggtggccatcgacgctattcggtcggcgatgcaccagcacagttttctcggaatcgaccaagacgggcacagcagcgtcatcaccaccaaagggaacccgtttggccatctcgtgctgcgcggcggctctagcaagccgaactacgatgccgacagcatcgcccatgctgaaaaacagttgcgcaaggccgacctgactccgcatctgctggtcgattgcagccatgctaactccggcaagaagtgtggtaatcagctcaaggtctgggccgatattcttgcccagaaggagcagggcaacaccagcatcgtaggggtcatgatcgagagcaatatcttctctggaaaccagcctttcccggtcgatccgagagagctgcaatacggcgtctcgattaccgacgagtgcgtctcttgggaggagaccgagaggatgcttcgggatggagccgcattcatgaagcaggttcgctcgaaagcctga

SEQ ID NO: 1608 - protein, 353 aa, Chlorobium tepidum TLS
MQQLQDLRVSRIITLSSPKALKEKLPVTEHIADTVYKARQEVENILTGKDSRMLVIVGPCSIHDIKAARDYASRLFALRKELESEFCIVMRVYFEKPRTTIGWKGFINDPHLNDTYDIEHGLFHARKLLIELNEMGLPAATEFLDPISPQYVADLISWAAIGARTIESQTHRQMASGLSMPVGFKNATDGRLQVAIDAIRSAMHQHSFLGIDQDGHSSVITTKGNPFGHLVLRGGSSKPNYDADSIAHAEKQLRKADLTPHLLVDCSHANSGKKCGNQLKVWADILAQKEQGNTSIVGVMIESNIFSGNQPFPVDPRELQYGVSITDECVSWEETERMLRDGAAFMKQVRSKA

SEQ ID NO: 1609 - DNA, 1077 bp, Yersinia pestis KIM
  CDS (1)..(1077): transl_table=11
atgatcatgcaaaaagactcgctcaataacgtccatatcagtgccgaacaaatcctgataaccccggaagaactgaaaaatcagtttccactgagcgaaaatgatcagtattcgatagagcgcgcacgtaaaaccattgctgacattattcaggggcgagatccgcgtctgttggtcgtttgtgggccctgttcaattcatgatgtggatgcggcactggattacgcgcgtcgtttgaaaaaactctctgtggaattggatgacagcttatatatcgttatgcgtgtctattttgagaagccaagaactaccgtgggttggaaaggcctgatcaatgaccctgcaatggatggttcatttgatgtagaggcaggtttacacattgcccgtcgtttattgctggatttagtgggcatggggttgccgttagcgactgaagctctggatcctaatagcccacaatatttaggtgacctgttcagttggtcggccattggtgcccgtacaacggagtcacagacccaccgtgaaatggcatcaggcttgtctatgccggttggatttaaaaatggcactgacggtagcctaggcacggcaatcaatgcaatgcgcgccgctgccatgccacatcgctttatggggatcaatcagtcgggccaggtctgcctgttacaaactcagggtaacccacacggccatgtcattctacggggaggtaaaacaccaaactacagtgcacaagatgtcgctcagtgtgaaaaacagatgcaggatgcgggactcatcccatccttaatgatagattgcagtcacggtaattcaaataaagactaccgccgtcaggttgcggtggctgaatctgtggttgaacagatcaaggcgggcaatcgttcaattacaggtgtgatgctggaaagccacatccacgaaggaaatcagtcatctgaacagccacgtgctgatatgcgctacggtgtttctgtgactgacgcctgtattaactgggaaagcactgaaaccctgttacgtggtatgcgccaagaattgcttgcagcactgacggcacggactgcatga

SEQ ID NO: 1610 - protein, 358 aa, Yersinia pestis KIM
MIMQKDSLNNVHISAEQILITPEELKNQFPLSENDQYSIERARKTIADIIQGRDPRLLVVCGPCSIHDVDAALDYARRLKKLSVELDDSLYIVMRVYFEKPRTTVGWKGLINDPAMDGSFDVEAGLHIARRLLLDLVGMGLPLATEALDPNSPQYLGDLFSWSAIGARTTESQTHREMASGLSMPVGFKNGTDGSLGTAINAMRAAAMPHRFMGINQSGQVCLLQTQGNPHGHVILRGGKTPNYSAQDVAQCEKQMQDAGLIPSLMIDCSHGNSNKDYRRQVAVAESVVEQIKAGNRSITGVMLESHIHEGNQSSEQPRADMRYGVSVTDACINWESTETLLRGMRQELLAALTARTA

SEQ ID NO: 1611 - DNA, 1047 bp, Yersinia pestis KIM
  CDS (1)..(1047): transl_table=11
atgtacaagatagatgaactgcggaccgctcgcatcgatagcttgattacaccgcagcaactggctgaaaagttaccgatttctgaggttattgcagataacgtgacggcgtcacgtaaacgaatagagaaaatacttattggtgaagacccacgtctactcgtggtgattggcccctgctctattcacgaccttgatgcagccgttgattatgccacccggctcaaggtgctacgagaacgctatcaagaccggctggaaatcgtgatgcgcacctatttcgagaaaccacggactgtagtgggttggaaggggctgatttctgatccggcacttgacggctcatgccaggtgaacttgggtattgaactggcacgtaagctactgttagccgtgaatgaactcgggctgccgaccgctaccgagttcctcaatatggtaacaggccaatatattgccgacctcatcagttggggggcaataggcgcacgtaccaccgaaagccagatccaccgagagatggcctcggcactctcctgccccgtgggtttcaaaaatggtacagatggcaatgtgcgtattgctattgatgccattcgcgccgcacaagccagccatatgttcctttctccggataaaaccggccaaatgacgatttaccaaaccagtggtaacccctatgggcatattattatgcggggtggaaagcaacctaactatgatgcctctgatatcgcagccgcctgtgacagcttgcgggaatttgatttgccagaacatctggtggtagattttagccacggcaattgccagaagatgcatcgccgccagttggatgttgccgaaaatatcgggctacagatccgtgcgggttcaacagcgattgtcggtgttatggctgagagtttcctgattgagggcacacagaagattgttgccggacagcccttaacttatgggcaatccatcactgacccttgcctgaattgggatgatactgaacaactgttaagcctattggcagatgcagtagacagccggttttaa

SEQ ID NO: 1612 - protein, 348 aa, Yersinia pestis KIM
MYKIDELRTARIDSLITPQQLAEKLPISEVIADNVTASRKRIEKILIGEDPRLLVVIGPCSIHDLDAAVDYATRLKVLRERYQDRLEIVMRTYFEKPRTVVGWKGLISDPALDGSCQVNLGIELARKLLLAVNELGLPTATEFLNMVTGQYIADLISWGAIGARTTESQIHREMASALSCPVGFKNGTDGNVRIAIDAIRAAQASHMFLSPDKTGQMTIYQTSGNPYGHIIMRGGKQPNYDASDIAAACDSLREFDLPEHLVVDFSHGNCQKMHRRQLDVAENIGLQIRAGSTAIVGVMAESFLIEGTQKIVAGQPLTYGQSITDPCLNWDDTEQLLSLLADAVDSRF

SEQ ID NO: 1613 - DNA, 1053 bp, Yersinia pestis KIM
  CDS (1)..(1053): transl_table=11
atgaattaccagaatgatgatttacggattaaagaaattaaggaactcctacctcctgttgcgttgttagagaaatttccctccacagttaatgcggcagaaaccgtcgccaagacccggaatgctattcacaacatcttgcgtgctcaggatgatcgcttgctggtggtgattggcccatgctctattcatgatacgcaagcggctaaagaatatgcggcccgtttgctggcactgcgtgaagaactgcagggcgagctggaagttgtcatgcgtgtttattttgaaaagccgcgtacaacggtgggttggaaaggcctgattaacgatccgcatatggacaatagctacgacatcaatgaaggtttacgtctggcgcgtgaattactcgtcgaaattaacgacagcgggttaccggccgccggtgagtttttggatatgattacgccgcagtatctggctgatctgatgagctggggagccattggcgcacgtactactgaatctcaggttcaccgcgaactggcttctggtctgtcttgccccgttggttttaaaaatggtaccgacggcaccattaaagtggctattgatgcgatcaacgcggccagtgccccacactgtttcttgtcggtgaccaaatggggtcattcggcgattgtgaatactgccggcaatggtgattgccatatcattttacgtggtggtaaagagccgaattacagcagtaagcatgtgaatgcggttaaagaagggctgattaaagcgggcctggaaccccagattatgatcgatttcagccacgctaacagttgcaaacagtttcaaaagcagatggaagtgggaacggatgtttgccaacaaattgcgcaaggtgaaaaatctatcataggcgtgatgatcgaaagccatttagtcgaaggtagccaaaacctggaaagtggtgaaccactaacctatggccagagtattaccgatgcctgtattggctggaaagatactgaggcgctgttgcgccagttggctggagcagtgagagctcgccgccagtag

SEQ ID NO: 1614 - protein, 350 aa, Yersinia pestis KIM
MNYQNDDLRIKEIKELLPPVALLEKFPSTVNAAETVAKTRNAIHNILRAQDDRLLVVIGPCSIHDTQAAKEYAARLLALREELQGELEVVMRVYFEKPRTTVGWKGLINDPHMDNSYDINEGLRLARELLVEINDSGLPAAGEFLDMITPQYLADLMSWGAIGARTTESQVHRELASGLSCPVGFKNGTDGTIKVAIDAINAASAPHCFLSVTKWGHSAIVNTAGNGDCHIILRGGKEPNYSSKHVNAVKEGLIKAGLEPQIMIDFSHANSCKQFQKQMEVGTDVCQQIAQGEKSIIGVMIESHLVEGSQNLESGEPLTYGQSITDACIGWKDTEALLRQLAGAVRARRQ

SEQ ID NO: 1615 - DNA, 1062 bp, Thermosynechococcus elongatus BP-1
  CDS (1)..(1062): transl_table=11
atgccgcaaacctttgatcttcacgttgttgagacacgacccttgttgacgcctgctaccctgctggcggatttaccgctgactgaatcccaagctacccttgtggccacaactcgcgatcgcattcgtgagattttcaaggggcgcgatcgccgcctgctggtgattgtggggccttgttcaattcacgatgtcaaggcagcgctggaatatggggaaaagttggcccggatacgcgatcgcctgcgggatagtctcgaaattgtgatgcgggtttactttgaaaaaccacggacctctgtaggttggaaaggcctcatcaacgatccgcacctcgatggcagctatgatatcaacaccgggctacgccttgcccgcaagctactgctggatttggccaacttaggaatacccgccgctacagaattactcgatccgatcattccccagtacattgccgatgttgtcagttggactgctattggcgctcgcaccaccgaaagccaaactcaccgtcaaatggcctcgggtctctcgatgcccgtaggcttcaaaaatggcaccgatggtcacttagattctgccattaatgccatgattgcggcccagcagtcccaccattttttgggcattaatgctgaaggccgcgccagtattgttgccaccactgggaatcccgatactcacctggtgctacggggcggcaaagacggccccaactattctgccgcccacattgagatggctgccgcactcttagagcgtaagggactcacaccacggctcatggtggattgtagtcatgccaacgctgccaaagacccccaacgccaagtgctagtgtgtgagaacctcgcccatcaggtccagcaaggctcccgttatttggcgggtgtgatgatcgaaagtcatctcaaggcgggtaatcaaccaattcccaaggatctctcgcagttggtctatggccaaagtattaccgatccctgcgtggactttgcaacaacagtaacaatgctcgaacaattggctagtgcggtaggatcgcaactggtggccagataa

SEQ ID NO: 1616 - protein, 353 aa, Thermosynechococcus elongatus BP-1
MPQTFDLHVVETRPLLTPATLLADLPLTESQATLVATTRDRIREIFKGRDRRLLVIVGPCSIHDVKAALEYGEKLARIRDRLRDSLEIVMRVYFEKPRTSVGWKGLINDPHLDGSYDINTGLRLARKLLLDLANLGIPAATELLDPIIPQYIADVVSWTAIGARTTESQTHRQMASGLSMPVGFKNGTDGHLDSAINAMIAAQQSHHFLGINAEGRASIVATTGNPDTHLVLRGGKDGPNYSAAHIEMAAALLERKGLTPRLMVDCSHANAAKDPQRQVLVCENLAHQVQQGSRYLAGVMIESHLKAGNQPIPKDLSQLVYGQSITDPCVDFATTVTMLEQLASAVGSQLVAR

SEQ ID NO: 1617 - DNA, 1008 bp, Streptococcus agalactiae 2603V/R
  CDS (1)..(1008): transl_table=11
atgggatttcatcagttaagtgataaaattaatattgaaatattgaagcagaaaactagcttagatctagaagttagccaaaaaaaattagccaaagaagaagagttaaaaaatatcataaaaggtgaggatcagcggtttctagtaatagtaggtccttgttctgcggataatccaaaggcggtgctaacttatgcaaagcgtttagctaaattggaagctgcctttaaagataaaatgtttttggttatgagagtttataccgctaagccaagaacgaatggtgatggttataaaggcttagttcaccattctgacaaactaggagttttttttcaagcacgtaagatgcactatgacatcattcgagagactggactcctgacagctgatgaattactttatccagagatgttatcagtgatggatgatttagtttcttactatgctattggtgcgcgttcagtggaagatcagggacaccgttttatatcttcaggtatagatgcaccagtaggtatgaaaaatccaacgtctggtaatttaagagtcatgtttaatgcggtctatgcagcacaaaatcaacaggaattattctatcaaaataagcaagttagaacagatggtaatttgctgtcacatgttattttgagaggatatcataatgccgactatcgaagtatccctaattatcattatgaaaaccttttagaaactattactcattatgaagagactgatttgcaaaatccctttattgttgttgatacaaatcatgacaattcaggtaagcaatttttagaacaaattcgcattgtgaaatcagtacttgcagaccgacagtggcatactaaaattagaaactatgttcgtggttttttgatagaatcttatttagaagatggaagacaagataaaccagatgtttttggtaagtctatcacagatccatgtctaggttgggataaaacagaaatgctaattagggatatttacaatagtttgtaa

SEQ ID NO: 1618 - protein, 335 aa, Streptococcus agalactiae 2603V/R
MGFHQLSDKINIEILKQKTSLDLEVSQKKLAKEEELKNIIKGEDQRFLVIVGPCSADNPKAVLTYAKRLAKLEAAFKDKMFLVMRVYTAKPRTNGDGYKGLVHHSDKLGVFFQARKMHYDIIRETGLLTADELLYPEMLSVMDDLVSYYAIGARSVEDQGHRFISSGIDAPVGMKNPTSGNLRVMFNAVYAAQNQQELFYQNKQVRTDGNLLSHVILRGYHNADYRSIPNYHYENLLETITHYEETDLQNPFIVVDTNHDNSGKQFLEQIRIVKSVLADRQWHTKIRNYVRGFLIESYLEDGRQDKPDVFGKSITDPCLGWDKTEMLIRDIYNSL

SEQ ID NO: 1619 - DNA, 1134 bp, Bifidobacterium longum NCC2705
  CDS (1)..(1134): transl_table=11
atggcagcactacgtggtccggatagttccgaggatgaacgtcgtttgggggagcaggccgtctttcctgagaccgtcgatgtcaacattcgtcagcttgaccccattcccgcgccgcgtgctttcctcagggagcagccgctcaccgatgagatgagcgagctcgtgctccactcgcggcaggaaatccgcgatgtgctcaacggccgcgacgaccgactgctcgtcatcgtgggcccctgctcaatccacgacccgaaggccgcgcacgagtacgcagaaaagctggctgccgtcaagcgcgagttggaagaccgactcgtgatcgtgatgcgcgtgtacttcgagaagccgcgcaccaccatcggctggaaaggcctcatcaacgaccccgatctggacggtcgcttcaatattcgtaagggcatgtggctggcccgcaaggtgctcaccgacgtgctgagcctcggtctgcccgccgccaccgaatggcttgaccccatcaccccgcagtacatctgcgacgcgatcagctggggtgccatcggcgcgcgtaacaccgaatcccaagtccaccgcgaactggccagtggcctgtccatgccggtgggcttcaagaactccaccgacggctccatcaaggccgccgccgattcctgtttcgcggccggcttcgagcatcacttcctgtccattaacttggacggtcgcgtgatttccgccgaaaccaaaggcaacccggattgccatctggttctgcgcggctccagccacggcccgaactacgatgccgaatccgtgcgtcaagctctggaagacctcaaggtttccaaagcgtccggcccgagccagcatggcctcgtcatcgatgccgcccacggcaactgcggcaaagacgaaaaccgcgaagccgaagtcatcgaagagatcgctgagcgcctggcgcacggcgaacaaggcatcaccggcgtaatgatggaaagcttcttggtcggcggtcaccaaaagccggccccgctcgaccagttggtctacggtcagtccgtcaccgactcttgcgtgccgtgggaacgcaccaacgaactgctgcacaccctagccgacgccgtcaccgctcgccgctcggctaaatag

SEQ ID NO: 1620 - protein, 377 aa, Bifidobacterium longum NCC2705
MAALRGPDSSEDERRLGEQAVFPETVDVNIRQLDPIPAPRAFLREQPLTDEMSELVLHSRQEIRDVLNGRDDRLLVIVGPCSIHDPKAAHEYAEKLAAVKRELEDRLVIVMRVYFEKPRTTIGWKGLINDPDLDGRFNIRKGMWLARKVLTDVLSLGLPAATEWLDPITPQYICDAISWGAIGARNTESQVHRELASGLSMPVGFKNSTDGSIKAAADSCFAAGFEHHFLSINLDGRVISAETKGNPDCHLVLRGSSHGPNYDAESVRQALEDLKVSKASGPSQHGLVIDAAHGNCGKDENREAEVIEEIAERLAHGEQGITGVMMESFLVGGHQKPAPLDQLVYGQSVTDSCVPWERTNELLHTLADAVTARRSAK

SEQ ID NO: 1621 - DNA, 1053 bp, Shigella flexneri 2a str. 301
  CDS (1)..(1053): transl_table=11
atgaattatcagaacgacgatttacgcatcaaagaaatcaaagagttacttcctcctgtcgcattgctggaaaaattccccgcaactgaaaatgccgcgaatacggttgcccatgcccgaaaagcgatccataagatcctgaaaggtaatgatgatcgcctgttggtggtgattggcccgtgctcaattcatgatcctgtcgcggctaaagagtatgccactcgcttgctggcgctgcgtgaagagctgaaagatgagctggaaatcgtaatgcgcgtctattttgaaaagccgcgtaccacggtgggctggaaagggttgattaacgatccgcatatggataacagcttccagatcaacgacggtctgcgtatagcccgtaaattgctgcttgatattaacgacagcggtctgccagcggcgggtgagtttctcgatatgatcactcctcagtatctcgctgacctgatgagctggggcgcaattggtgcacgtaccacggaatcgcaggtgcaccgcgaactggcgtctggtctttcttgtccggtaggttttaaaaatggcacagacggtacgattaaagtggctatcgatgccattaatgccgccggtgcgccgcactgcttcctgtccgtaactaaatgggggcattcggcgattgtgaataccagtggtaacggcgattgccatatcattctgcgcggcggtaaagagcctaactacagcgcgaagcacgttgctgaagtgaaagaagggctgaacaaagcaggtctgccagctcaggtgatgatcgatttcagccatgctaattcgtccaaacaattcaaaaagcagatggatgtttgtgctgacgtttgccagcagattgccggtggcgaaaaggccattattggcgtgatggtggaaagccatctggtggaaggcaatcagagcctcgatagcggggagccgctggcctacggtaagagcatcaccgatgcctgcattggctgggaagataccgatgctctgttacgtcaactggtgaatgcagtaaaagcgcgtcgcgggtaa

SEQ ID NO: 1622 - protein, 350 aa, Shigella flexneri 2a str. 301
MNYQNDDLRIKEIKELLPPVALLEKFPATENAANTVAHARKAIHKILKGNDDRLLVVIGPCSIHDPVAAKEYATRLLALREELKDELEIVMRVYFEKPRTTVGWKGLINDPHMDNSFQINDGLRIARKLLLDINDSGLPAAGEFLDMITPQYLADLMSWGAIGARTTESQVHRELASGLSCPVGFKNGTDGTIKVAIDAINAAGAPHCFLSVTKWGHSAIVNTSGNGDCHIILRGGKEPNYSAKHVAEVKEGLNKAGLPAQVMIDFSHANSSKQFKKQMDVCADVCQQIAGGEKAIIGVMVESHLVEGNQSLDSGEPLAYGKSITDACIGWEDTDALLRQLVNAVKARRG

SEQ ID NO: 1623 - DNA, 1071 bp, Shigella flexneri 2a str. 301
  CDS (1)..(1071): transl_table=11
atgcataaagacgcgctgaataacgtacatattaccgacgaacaggttttaatgactccggaacaactgaaggccgcttttccattgagcctgcaacaagaagcccagattgctgactcgcgtaaaaccatttcagatattatcgccgggcgcgatcctcgtctgctggtagtatgtggtccttgttccattcatgatccggaaactgctctggaatatgctcgtcgatttaaagctcttgccgcagaggtcagcgatagcctctatctggtaatgcgcgtctattttgaaaaaccccgtaccactgtcggctggaaagggttaattaacgatccccatatggatggctcttttgatgtagaagccgggctgcaaatcgcgcgtaaattgttgcttgagctggtgaatatgggactgccactggcgacggaagcgttagatccgaatagcccgcaatacctgggcgatctgtttagctggtcagcaattggtgctcgtacaacggaatcgcaaactcaccgtgaaatggcctccgggctttccatgccggttggttttaaaaacggcaccgacggcagtctggcaacagcaattaacgctatgcgcgccgccgcccagccgcactgttttgttggcattaaccaggcagggcaggttgcgttgctacaaactcaggggaatccggacgggcatgtgatcctgcgcggtggtaaagcgccgaactatagccctgcggatgttgcgcaatgtgaaaaagagatggaacaggcgggactgcgcccgtctctgatggtagattgcagccacggtaattccaataaagattatcgccgtcagcctgcggtggcagaatccgtggttgctcaaatcaaagatggtaatcgctcaattattggtctgatgatcgaaagtaatatccacgagggcaatcagtcttctgagcaaccgcgcagtgaaatgaaatacggtgtatccgtaaccgatgcctgcattagctgggaaatgactgatgccttgctgcgtgaaattcatcaggatctgaacgggcagctgacggctcgcgtggcttaa

SEQ ID NO: 1624 - protein, 356 aa, Shigella flexneri 2a str. 301
MHKDALNNVHITDEQVLMTPEQLKAAFPLSLQQEAQIADSRKTISDIIAGRDPRLLVVCGPCSIHDPETALEYARRFKALAAEVSDSLYLVMRVYFEKPRTTVGWKGLINDPHMDGSFDVEAGLQIARKLLLELVNMGLPLATEALDPNSPQYLGDLFSWSAIGARTTESQTHREMASGLSMPVGFKNGTDGSLATAINAMRAAAQPHCFVGINQAGQVALLQTQGNPDGHVILRGGKAPNYSPADVAQCEKEMEQAGLRPSLMVDCSHGNSNKDYRRQPAVAESVVAQIKDGNRSIIGLMIESNIHEGNQSSEQPRSEMKYGVSVTDACISWEMTDALLREIHQDLNGQLTARVA

SEQ ID NO: 1625 - DNA, 1059 bp, Shewanella oneidensis MR-1
  CDS (1)..(1059): transl_table=11
atgtattaccaaaatgatgacgttcgcattaatgaagttaaagagttacttccccctattgcgatcctagaacgatttcctgcctccgaaaacgctgctgcaactgtgtttaatgcccgtcaaagcatccataatattctcgctcgtgaagatgatcgcctattagtggtcattggtccctgctctattcatgatcctaaagcggcgctggaatacggtcagcgattggttgtccttagagagcgctatcaagatcaacttgagattgtgatgcgagtgtattttgaaaagccgcgaactaccgtagggtggaaggggctgatcaatgatccttacatggataacagtttcaaactgaatgatggtttgcgaacagcgcgtaaactcttggtcgatttgaatgattcaggcatgccgacagcgggtgagttcctcgacatgattactccgcaatatgtggcggatatgatgtgttggggcgccattggtgcccgcacaacagaatcacaagtccaccgcgaactggcctcgggtttatcttgtcctgtgggctttaaaaatggcacagacggcacaatcaaagtggcaatcgatgccattggtgccgctaatgcgccgcatcactttttatctgtgaccaaatttggccattcggcgattgtctccactaaaggcaacccagattgccatatcatccttcgcggcggccgagagccgaattacagtgcgagccacgtcgcccaaatcagtgaccaactgaaaaaagccaaactggtcgacaacatcatgatcgactttagccatgccaatagcagcaaacaatatcagcggcaaatggtggtggccaatgaggttgccgaacaagtcgcggcgggcaatcaggcgatttttggggtgatggttgaaagccacttagtcgaagggcgccaagatctgatcgagggccaagcgttatgctacggccagagtgtgactgatgcttgtattggttgggaagattctgagcgtttgttagctgtgctaaatcagagtgttgttgagcgacgtcagcgggtttaa

SEQ ID NO: 1626 - protein, 352 aa, Shewanella oneidensis MR-1
MYYQNDDVRINEVKELLPPIAILERFPASENAAATVFNARQSIHNILAREDDRLLVVIGPCSIHDPKAALEYGQRLVVLRERYQDQLEIVMRVYFEKPRTTVGWKGLINDPYMDNSFKLNDGLRTARKLLVDLNDSGMPTAGEFLDMITPQYVADMMCWGAIGARTTESQVHRELASGLSCPVGFKNGTDGTIKVAIDAIGAANAPHHFLSVTKFGHSAIVSTKGNPDCHIILRGGREPNYSASHVAQISDQLKKAKLVDNIMIDFSHANSSKQYQRQMVVANEVAEQVAAGNQAIFGVMVESHLVEGRQDLIEGQALCYGQSVTDACIGWEDSERLLAVLNQSVVERRQRV

SEQ ID NO: 1627 - DNA, 1065 bp, Shewanella oneidensis MR-1
  CDS (1)..(1065): transl_table=11
atgaccattaaaacagacgaattacgcacttccttattagctaaagtcatctcacctgcacaactggcatctgagtaccccttaacccaagatgctgccgactacctcgttcaacaacgtcgtgaagttgaagccatcattatgggcgaagaccaacgcctgttggtgatcattggcccttgctctatccacgatacgcaagccgccctcgattacgcccgccgcttagcagtgctacatcaagagttaaaggacgacctctgtattttaatgcgagtgtattttgaaaagccgcgcacgattgtgggttggaaggggttgatttccgatcctgacttagatggcagcttcgagccaaataaaggattgcgtattgcacgccagcttctacagcaaatcactgagcttaagctgcccatcgctaccgaatttttagatatggtgaacgggcaatatattgccgatttaatcacctggggcgcgattggtgctcgcaccaccgaaagccaagtacaccgtgaaatggcctcagccctttcttgccctgtgggctttaaaaacggaaccgatggcaatattaatatcgccgttgatgcggtacgtgccgcaaaagtgccgcatatcttctactcaccggataaagatggtgcgatgtctgtctatcgcacccatggtaatccttacggacacatcattttacgtggcggtaaaaaacccaattactttgagcaagacattgaacaagcaagattaaaacttgagtctgtcaatgttacaccgcgtgtggtggttgattttagccacggaaatagtgaaaaaaatcacctaaaacaactggtcgttgctgaaaatatcatggcgcaaatgcgtgctggtagtacggccattgccggcatcatggccgaaagtttcttacaagaaggcaaccaaaaggtgattgaaggtcaacccctatgttatggccaaagcatcacggatgcctgcttacattgggctgactccgaaaaattactgcgagatcttgccagcgcctcacgcgatagacgcgaactccttggcaaataa

SEQ ID NO: 1628 - protein, 354 aa, Shewanella oneidensis MR-1
MTIKTDELRTSLLAKVISPAQLASEYPLTQDAADYLVQQRREVEAIIMGEDQRLLVIIGPCSIHDTQAALDYARRLAVLHQELKDDLCILMRVYFEKPRTIVGWKGLISDPDLDGSFEPNKGLRIARQLLQQITELKLPIATEFLDMVNGQYIADLITWGAIGARTTESQVHREMASALSCPVGFKNGTDGNINIAVDAVRAAKVPHIFYSPDKDGAMSVYRTHGNPYGHIILRGGKKPNYFEQDIEQARLKLESVNVTPRVVVDFSHGNSEKNHLKQLVVAENIMAQMRAGSTAIAGIMAESFLQEGNQKVIEGQPLCYGQSITDACLHWADSEKLLRDLASASRDRRELLGK

SEQ ID NO: 1629 - DNA, 1035 bp, Streptococcus mutans UA159
  CDS (1)..(1035): transl_table=11
atgggtattcatcaaaaaagcaaaaccatagatcttttcacggttaaacaaggcacgcaattaaaaggtcaggatttggctaagaaagaagcacgtgatcgtgaattggtttccattatcaagggagaggacaaccgtttactcttgattattggtccttgttcatcagataatgaagaagctgttcttgagtatgctaaacgtcttgctaaattgcaggaagaagttaaagatcgcatctttatggtgatgcgtgtttatacggcaaagccacgtactaatggtgatggttataaaggcctcattcatcaaccaaatacttctaaattgccagatttgattaatggcattcatgctgttcgtaatttgcattatcgtgtgattactgagacaggattgacaacagcagatgaaatgctttacccttctaatcttgtcttagtagatgatttggtttcttatcatgctgttggtgctcgttcggttgaagatcaggaacatcgctttgtggcttcaggcattgatgtgcctactggcatgaaaaatccaacgtctggtaatctcaaggttatgcttaatgctttacatgcagcacaaaattcacaaaattttatctataatggagcagaagtagaaacagacggcaattccttggctcatgttattttgcgcggaggcagcaatgagcatggtgactatgaacctaattattattatgacgttctcttaaaactgatccaacagtatgaaaatatgaatttaatcaatccctttattgttgttgataccaatcatgataactctggcaaaaattatttggaacaagtaagaattgttcggcaaacccttattaaccgtgactggaatgataaaatcaataagtatgttcgcggctttatgattgaatcttatctagaagatggtcgtcaggataagccagaagtttttggcaagtctattacggatccttgtttgggttgggaaaatactcaacagttgatttatgagatttaccatactctcaaagcaaaataa

SEQ ID NO: 1630 - protein, 344 aa, Streptococcus mutans UA159
MGIHQKSKTIDLFTVKQGTQLKGQDLAKKEARDRELVSIIKGEDNRLLLIIGPCSSDNEEAVLEYAKRLAKLQEEVKDRIFMVMRVYTAKPRTNGDGYKGLIHQPNTSKLPDLINGIHAVRNLHYRVITETGLTTADEMLYPSNLVLVDDLVSYHAVGARSVEDQEHRFVASGIDVPTGMKNPTSGNLKVMLNALHAAQNSQNFIYNGAEVETDGNSLAHVILRGGSNEHGDYEPNYYYDVLLKLIQQYENMNLINPFIVVDTNHDNSGKNYLEQVRIVRQTLINRDWNDKINKYVRGFMIESYLEDGRQDKPEVFGKSITDPCLGWENTQQLIYEIYHTLKAK

SEQ ID NO: 1631 - DNA, 1053 bp, Escherichia coli CFT073
  CDS (1)..(1053): transl_table=11
atgaattatcagaacgacgatttacgcatcaaagaaatcaaagagttacttcctcctgtcgcattgctggaaaaattccccgctactgaaaatgccgcgaatacggtcgcccatgcccgaaaagcgatccataagatcctgaaaggtaatgatgatcgcctgttggtggtgattggcccatgctcaattcatgatcctgtcgcggctaaagagtatgccactcgcttgctgacgctgcgtgaagagctgcaagatgagctggaaatcgtgatgcgcgtctattttgaaaagccgcgtactacggtgggctggaaagggctgattaacgatccgcatatggataacagcttccagatcaacgacggtctgcgtattgcccgcaaattgctgctcgatattaacgacagcggtctgccagcggcgggtgaattcctggatatgatcaccccacaatatctcgctgacctgatgagctggggcgcaattggcgcacgtaccaccgaatcgcaggtgcaccgcgaactggcgtctggtctttcttgtccggtaggtttcaaaaatggcactgatggtacgattaaagtggctatcgatgccattaatgccgccggtgcgccgcactgcttcctgtccgtaacgaaatgggggcattcggcgattgtgaataccagcggtaacggcgattgccatatcattctgcgcggcggtaaagagcctaactacagcgcgaagcacgttgctgaagtgaaagaagggctgaacaaagcaggcctgccagcgcaggtgatgatcgatttcagccatgctaactcgtcaaaacaattcaaaaagcagatggatgtttgtactgacgtttgccagcagattgccggtggcgaaaaggccattattggcgtgatggtggaaagccatctggtggaaggcaatcagagcctcgagagcggggaaccgctggcctacggtaagagcatcaccgatgcctgcattggctgggatgataccgatgctctgttacgtcaactggcgagtgcagtaaaagcgcgtcgcgggtaa

SEQ ID NO: 1632 - protein, 350 aa, Escherichia coli CFT073
MNYQNDDLRIKEIKELLPPVALLEKFPATENAANTVAHARKAIHKILKGNDDRLLVVIGPCSIHDPVAAKEYATRLLTLREELQDELEIVMRVYFEKPRTTVGWKGLINDPHMDNSFQINDGLRIARKLLLDINDSGLPAAGEFLDMITPQYLADLMSWGAIGARTTESQVHRELASGLSCPVGFKNGTDGTIKVAIDAINAAGAPHCFLSVTKWGHSAIVNTSGNGDCHIILRGGKEPNYSAKHVAEVKEGLNKAGLPAQVMIDFSHANSSKQFKKQMDVCTDVCQQIAGGEKAIIGVMVESHLVEGNQSLESGEPLAYGKSITDACIGWDDTDALLRQLASAVKARRG

SEQ ID NO: 1633 - DNA, 1077 bp, Escherichia coli CFT073
  CDS (1)..(1077): transl_table=11
gtgtgcaatagatggttaagaatagaactttcaggagatacaatgcagtcagtcagtaaatcaatctaccgagggaagttgcttagcagtttacctgctgtgggcgagattcataaagaaatcgcagtatcagaagaaaccgtaacatggatctctctgcaacgagagattatagcgaatattttgctgggaaaagatcctcgcttgcttgtgattgttggtccatgctcaatccatgacgttcaggctgccgttgaatatgcgaaacgattgtccgtattacagaataagtacttatcgcaaatgtacattgtaatgcgcacttattttgagaaacctcgaactcgtaaaggctggaaaggaataatgcacgatcctgatctaaatggaagctataatgttgagaaagggatacgatatgctcgccagtgtttgtcctcaatcacaacaatgcgtgtcgcaaccgctacagaattcctcgatcctttccttactccctatattgctgatttaatatgttggggggctgttggtgccagaactactgaatcacaaacgcatcgtcaacttgcgtctggtttacattgtcctgttggatttaaaaacagcactgatggaaatattaacttagctattgatgctattcttgcagcccgtgaacaacatgttgtatatatgacatctttaacaaaatgtatatctaccctattaaccgatggcaatccacatggacatctcatattacgtggtggtagagagccgaactatggtttgtcggatataacgaaggcagtgaaattaatgcatgatgaaggtatcaatcatcgtctgataattgactgtagccatggtaatagtggtaaagtggctgaacggcaaatctctgttgctcgtgaagtcattgataatcggaaaaagatgccgggatatgtagctggaattatgctggaaagctttttacaaggtggaaaacaatcagacagccttccgcgagagtatggtcagtctgttactgatgagtgtctttcatggcaacagacagaacaattattatcaactctggcagcacaactttaa

SEQ ID NO: 1634 - protein, 358 aa, Escherichia coli CFT073
MCNRWLRIELSGDTMQSVSKSIYRGKLLSSLPAVGEIHKEIAVSEETVTWISLQREIIANILLGKDPRLLVIVGPCSIHDVQAAVEYAKRLSVLQNKYLSQMYIVMRTYFEKPRTRKGWKGIMHDPDLNGSYNVEKGIRYARQCLSSITTMRVATATEFLDPFLTPYIADLICWGAVGARTTESQTHRQLASGLHCPVGFKNSTDGNINLAIDAILAAREQHVVYMTSLTKCISTLLTDGNPHGHLILRGGREPNYGLSDITKAVKLMHDEGINHRLIIDCSHGNSGKVAERQISVAREVIDNRKKMPGYVAGIMLESFLQGGKQSDSLPREYGQSVTDECLSWQQTEQLLSTLAAQL

SEQ ID NO: 1635 - DNA, 1140 bp, Escherichia coli CFT073
  CDS (1)..(1140): transl_table=11
atgtgttatcgttacgtcatcctcgctgaggatcaactatcgcaaacgagcataaacaggatcgccatcatgcagaaagacgcgctgaataacgtacatattaccgacgaacaggttttaatgactccggaacaactgaaggccgcttttccattaagcctgcaacaagaagcccagattgctgactcgcgtaaaaccatttcagatattatcgccgggcgcgatcctcgtctgctggtagtatgtggtccttgttccattcatgatccggaaactgctctggaatatgctcgtcgatttaaagcccttgccgcagaggtcagcgatagcctctatctggtaatgcgcgtctattttgaaaaaccccgtaccactgtcggctggaaagggttaattaacgatccccatatggatggctcttttgatgtagaagccgggctgcagatcgcgcgtaaattgctgcttgagctggtgaatatgggactgccactggcgacggaagcgttagatccgaatagcccgcaatacctgggcgatctgtttagctggtcagcaattggtgctcgtacaacggaatcgcaaactcaccgtgaaatggcctccgggctttccatgccggttggttttaaaaacggcaccgatggcagtctggcaacggcaattaacgctatgcgtgccgccgcccagccgcaccgttttgttggcattaaccaggcagggcaggttgcgttgctacaaactcaggggaatccggacgggcatgtgatcctgcgcggtggtaaagcgccaaactatagccctgcggatgttgcgcaatgtgaaaaagagatggaacaggcgggactgcgcccgtctctgatggtagattgcagccacggtaattccaataaagattatcgccgtcagcctgcggtggcagaatccgtggttgctcaaatcaaagatggcaatcgctcaattattggtctgatgatcgaaagtaatatccacgagggcaatcagtcttccgagcaaccgcgcagtgaaatgaaatacggtgtatccgtaaccgatgcctgcattagctgggaaatgaccgatgccttgctgcgtgaaattcatcaggatctgaacgggcagctgacggctcgcgtggcttaa

SEQ ID NO: 1636 - protein, 379 aa, Escherichia coli CFT073
MCYRYVILAEDQLSQTSINRIAIMQKDALNNVHITDEQVLMTPEQLKAAFPLSLQQEAQIADSRKTISDIIAGRDPRLLVVCGPCSIHDPETALEYARRFKALAAEVSDSLYLVMRVYFEKPRTTVGWKGLINDPHMDGSFDVEAGLQIARKLLLELVNMGLPLATEALDPNSPQYLGDLFSWSAIGARTTESQTHREMASGLSMPVGFKNGTDGSLATAINAMRAAAQPHRFVGINQAGQVALLQTQGNPDGHVILRGGKAPNYSPADVAQCEKEMEQAGLRPSLMVDCSHGNSNKDYRRQPAVAESVVAQIKDGNRSIIGLMIESNIHEGNQSSEQPRSEMKYGVSVTDACISWEMTDALLREIHQDLNGQLTARVA

SEQ ID NO: 1637 - DNA, 1053 bp, Vibrio vulnificus CMCP6
  CDS (1)..(1053): transl_table=11
atgccactaaaaacagatgaattgagaacccaacctttgggtccaatgccaactcccgctgagttgagccaagcccatccgattaccgacgatgtggccgagcgaattgcgaaatctcgcagacaaattgaagatattttaacgggtaaggacaaccgccttttggtgattgtcggtccttgctctgtgcacgatactgaagccgcgattgattacgcgacgcgtttaagctcgattcaagagctgtatcgcgatgagctgttcatcgttatgcgcacctactttgaaaaaccacgcactgtggtgggctggaaaggcctcattaccgacccaaatctggatggctcttacgcactagaagcaggcctgcataaagcacgtaagctattgctcgacatcaacaaacttggccttgctaccgcaactgagtttcttgacatgatcactggtcaatatattgctgatttgatcacttggggcgcgattggtgctcgaaccactgaatcgcaaattcaccgtgaaatggcatctgcactctcctgcccggttggctttaaaaacggcaccaacggcaacgtgaaaattgcgattgacgcaattcgagcatcaaaagcttcgcattacttctactctccagataaaaatggccgcatgaccgtttaccgcaccagtggtaacccatatggacacattattctgcgtggtggtgataccggccctaactttgatgcaaaatcggttgagtctgcctgtcaatcactggctgagttcgatttgccacagcgtttgatcgttgatttcagtcacgcgaactgtgaaaagcaacatcgtaaacagctcgatgtcgcgcaagacatttgtaaccagctaaaagcaggcagcacttatatcgcaggcatcatggcagaaagctttattaccgaaggcaatcagccgatgactgaccttgataacttgacctacggccaatcgatcactgacccttgcctaagctgggaacacacagcgcaaatgctggacatgcttgcgactgctgtaaaagaaagccgttaa

SEQ ID NO: 1638 - protein, 350 aa, Vibrio vulnificus CMCP6
MPLKTDELRTQPLGPMPTPAELSQAHPITDDVAERIAKSRRQIEDILTGKDNRLLVIVGPCSVHDTEAAIDYATRLSSIQELYRDELFIVMRTYFEKPRTVVGWKGLITDPNLDGSYALEAGLHKARKLLLDINKLGLATATEFLDMITGQYIADLITWGAIGARTTESQIHREMASALSCPVGFKNGTNGNVKIAIDAIRASKASHYFYSPDKNGRMTVYRTSGNPYGHIILRGGDTGPNFDAKSVESACQSLAEFDLPQRLIVDFSHANCEKQHRKQLDVAQDICNQLKAGSTYIAGIMAESFITEGNQPMTDLDNLTYGQSITDPCLSWEHTAQMLDMLATAVKESR

SEQ ID NO: 1639 - DNA, 1053 bp, Vibrio vulnificus CMCP6
  CDS (1)..(1053): transl_table=11
atgttccaaacagatgatgtaagaattaataacgttaaagagttacttccaccagtagctgttttagagaagtacccggcgactgaaaccgcttcttcgacaactttccaatcgagaaacgacattcacaacattctcatcggcaaggacgatcgcctgctggttattgtcggcccttgctctatccacgatcctgtggccgcggttgaatacggcaagcgtttgaaaacgttgcgtgacgagctcaaaggtgagctcgaaattgttatgcgcgtttactttgaaaagccacgtaccactgtgggttggaaaggtttgattaatgacccgtaccttaacgacacctacaagttgaatgatggtttacgcatgggccgaaaactgttgttggatcttaccgatatgggtcttccaacggcgagtgagttccttgacatgatcacaccacagtatgtggctgatttgatcagttggggtgcgattggtgcacgtactacggaatctcaggttcaccgtgaactggcgtcgggtctttcttgtccggttggttttaaaaatggcacggatggcaacattaagattgcaagtgatgcgattcgctcagcaagtgcttctcaccatttcctatcggtaacgaaatacggccattctgctatcgttgaaaccgcgggtaatccagactgccacattattttgcgtggtggtaaagagccaaactacagtgcagcgcatgtttcagcagtaaaagaagagctagctacatcgggtttaccacaaaaagtgatgatcgacttcagccacgccaacagctccaagcagtataagcgtcaaatgttggtggccgacgatgtctctgagcagctagcggccggtgaagaggcaatctttggggtgatgatcgaatcacatcttgtggaaggtcgacaagatcttgttgatggtaaagcggcgacttatggtcagtcgattaccgacgcttgcatcggttgggaagatactgaaactgtgcttcgccaattggcaaatgcagtggcagctcgtcgagcgaaatag

SEQ ID NO: 1640 - protein, 350 aa, Vibrio vulnificus CMCP6
MFQTDDVRINNVKELLPPVAVLEKYPATETASSTTFQSRNDIHNILIGKDDRLLVIVGPCSIHDPVAAVEYGKRLKTLRDELKGELEIVMRVYFEKPRTTVGWKGLINDPYLNDTYKLNDGLRMGRKLLLDLTDMGLPTASEFLDMITPQYVADLISWGAIGARTTESQVHRELASGLSCPVGFKNGTDGNIKIASDAIRSASASHHFLSVTKYGHSAIVETAGNPDCHIILRGGKEPNYSAAHVSAVKEELATSGLPQKVMIDFSHANSSKQYKRQMLVADDVSEQLAAGEEAIFGVMIESHLVEGRQDLVDGKAATYGQSITDACIGWEDTETVLRQLANAVAARRAK

SEQ ID NO: 1641 - DNA, 1086 bp, Bradyrhizobium japonicum USDA 110
  CDS (1)..(1086): transl_table=11
gtgctgagcacgactgacgatcttcgtatccgtgaactgaaagagctgagcacgccggatgaggtaatgcgggaggtcccgcgcacgctcaccgcaacgcgtgtggtgatggcggcgcgcaacgccatccatgccatcctcaccggccaggacgaccgcctgctggtggtggtcggcccgtgctcggtgcatgatccccgggccgcgctcgactacgctgagcgtctgacaaaactgcgcgaggacctcgccgaccagctcgagatcgtaatgcgggtctatttcgagaagccgcgcaccaccgtcggctggaagggcctgatcaacgaccccgatctcgacggcagcttcgacatcaacaagggcctgcggctggcgcgcaacgtgctgtcagcggtgaacaatctcggcctcccggccggcgccgaattcctggacatgacgacgccgcaatacatcgctgacctcgtgtcctgggccgcgatcggcgcgcgcacgaccgagagccagatccatcgcgagctggcctccgggctgtcctgcccggtcggcttcaagaacggcaccgatggcaatgtgcggatcgcggcggacgcagtgaagtcggcctcgcatccgcatcatttcatggcggtgaccaagctcggccgctcggcgatcgcctcgaccgcgggcaacgaggactgccacatcatcctgcgcggcggcagcacgccgaactacgatgcggcaagcgtcgcggcggcctgcaacgagctggcgaaatccggcgtcgcgccgctggtgatggtggatgcgagccacgccaattcgagcaagaagccggagaaccagccgctggtcatggccgacattgccggccagatttccggtggcgagagccgcatcatgggtgtgatgatcgagagcaatctcgtcgccggccgccaggacgtggttccgggcaagccgctcacctacggccagagcatcacggacggctgtatcgactgggcgaccacggcaactgtgctcgagcagctcgccgatgcggtcgaaatccggcgcaacgcccagcgcgcggggctgcacgagcgctcggcgtaa

SEQ ID NO: 1642 - protein, 361 aa, Bradyrhizobium japonicum USDA 110
MLSTTDDLRIRELKELSTPDEVMREVPRTLTATRVVMAARNAIHAILTGQDDRLLVVVGPCSVHDPRAALDYAERLTKLREDLADQLEIVMRVYFEKPRTTVGWKGLINDPDLDGSFDINKGLRLARNVLSAVNNLGLPAGAEFLDMTTPQYIADLVSWAAIGARTTESQIHRELASGLSCPVGFKNGTDGNVRIAADAVKSASHPHHFMAVTKLGRSAIASTAGNEDCHIILRGGSTPNYDAASVAAACNELAKSGVAPLVMVDASHANSSKKPENQPLVMADIAGQISGGESRIMGVMIESNLVAGRQDVVPGKPLTYGQSITDGCIDWATTATVLEQLADAVEIRRNAQRAGLHERSA

SEQ ID NO: 1643 - DNA, 1095 bp, Xylella fastidiosa Temecula1
  CDS (1)..(1095): transl_table=11
atgccaccatttaccgacgacctccgtatccgaaaaattgaaccactgacacctcctaacaagctcctcttacaactaccatgcgatgagcaggcatcgctgactgttgcgacctcacgcaacgcactgcacgatatcctgcacggccacaatgaccgtttagccgtcgtgataggcccatgctcaatccatgatccaattgcagccattgattactcgcaacgtctacgcccattgcgtgagatgtacaaggatgcactagaaatcgtgatgcgagtttactttcagaaaccgcgcaccactattggttggaaaggattggtcaacgatccggatcttgatggcagcttccagatcaataagggcttgcatatcgcgcgcaacctgctgcgcgatatcaatcatctcggcttacccgctggtgtggaatttctagacacgatttcgccgcaatatctggctgacttagtcgcctggggtgccattggtgctcgcaccactgaaagccaaatacaccgtgaaatggcttcaggtttatcgtgcccgattggctttaaaaacagtaccagtggtgatgtgaagattgctgctgacgcgattaaagcagcttcgcatccgcaccatttcctttcagtgacaaagacaggtgttgccgcagtcgtcgccacccagggtaaccccgattgtcacgtgattctgcgtggaggcaaggtcccgaattacgacgcaatcaatgtcgaagctgccagccaaacattgcttaaatccaagctaccggtgcgactgatgattgatgcgagccatgccaatagcggcaaaaatccaaacaatcaacctaaggtgatcgagaacatcgtagaacagcttaaagccggtgaacgccgcatcatcggtgtcatgattgaaagccacattgttggtggccggcaagaattagtccttggaaacacacttaactatggacagagcattaccgatgcttgcatcgactgggatacctcggttgcaatgttagaacagctcgctcaggccgtacgcgtcagacagactctaccaacgaccactacagctaacaaaacatcaaaaacccaataa

SEQ ID NO: 1644 - protein, 364 aa, Xylella fastidiosa Temecula1
MPPFTDDLRIRKIEPLTPPNKLLLQLPCDEQASLTVATSRNALHDILHGHNDRLAVVIGPCSIHDPIAAIDYSQRLRPLREMYKDALEIVMRVYFQKPRTTIGWKGLVNDPDLDGSFQINKGLHIARNLLRDINHLGLPAGVEFLDTISPQYLADLVAWGAIGARTTESQIHREMASGLSCPIGFKNSTSGDVKIAADAIKAASHPHHFLSVTKTGVAAVVATQGNPDCHVILRGGKVPNYDAINVEAASQTLLKSKLPVRLMIDASHANSGKNPNNQPKVIENIVEQLKAGERRIIGVMIESHIVGGRQELVLGNTLNYGQSITDACIDWDTSVAMLEQLAQAVRVRQTLPTTTTANKTSKTQ

SEQ ID NO: 1645 - DNA, 1053 bp, Vibrio parahaemolyticus RIMD 2210633
  CDS (1)..(1053): transl_table=11
atgcctataaaaacagatgaattgagaacccaacctttgggtccaatgcctaccccagcggagctaggtagtgtacatccgatcacggatgacgttgcagatcgcatcgctcaatctcgtcgtcagattgaaaacattttaacaggtgaagacgatcgccttcttgctatcgttggtccatgttctgttcacgatactgaagccgcaattgattacgcgaaacgcttgagtgaaatccaagataagtacaaagacgagctatttatcgttatgcgtacttactttgaaaagcctcgtacagtagttggttggaaaggtcttatcaccgaccctaacctagacggttcttacgcgcttgaagctggccttcacaaagctcgtaaactgctactggatatcaacaagcttggtcttgcgactgctactgagtttcttgatatgatcactggccaatacattgcggatttgatcacttggggcgcaattggcgcacgtacgacagaatctcaaattcaccgtgaaatggcatcagcgctatcttgccctgttggctttaaaaatggcacaaacggtaatgtgaaaatcgcgattgacgcgattcgtgcctcccaagcttcacactacttctactcgccagataagaatggtcgtatgacggtgtaccgcacaagtggcaacccattcggtcatattattttgcgtggcggcgaaaaaggtccaaactttgacgaagcatctgtgaagcaagcgtgtgattcacttgctgagtttggtttacctgagcgtcttattgtagacttcagtcatgcaaactgtcagaagcagcaccgaaaacaacttgatgttgcgagcgacatttgtactcaaattaagtcaggcagcactcgcattgcgggtatcatggcggaaagcttcattatggaaggcaaccagccaatgactgacattaacaacctaacttacggtcaatcaattactgacccttgtttaggttgggacgatacagtaactatgctagatatgctggcagaagctgtaaaatccactaagtaa

SEQ ID NO: 1646 - protein, 350 aa, Vibrio parahaemolyticus RIMD 2210633
MPIKTDELRTQPLGPMPTPAELGSVHPITDDVADRIAQSRRQIENILTGEDDRLLAIVGPCSVHDTEAAIDYAKRLSEIQDKYKDELFIVMRTYFEKPRTVVGWKGLITDPNLDGSYALEAGLHKARKLLLDINKLGLATATEFLDMITGQYIADLITWGAIGARTTESQIHREMASALSCPVGFKNGTNGNVKIAIDAIRASQASHYFYSPDKNGRMTVYRTSGNPFGHIILRGGEKGPNFDEASVKQACDSLAEFGLPERLIVDFSHANCQKQHRKQLDVASDICTQIKSGSTRIAGIMAESFIMEGNQPMTDINNLTYGQSITDPCLGWDDTVTMLDMLAEAVKSTK

SEQ ID NO: 1647 - DNA, 1053 bp, Vibrio parahaemolyticus RIMD 2210633
  CDS (1)..(1053): transl_table=11
atgtttcaaactgatgatgtaagaattaatagagtaaaagagttattgccccctgttgcagttctagagaagttcccagcgaccgaaaccgcttcttcgaccacttttgattgccgtaatgccattcacaatattcttgaaggaaaagatgatcgtttacttgtgatcgttggtccttgctctatccatgatcctgcagctgcagttgaatacggcaaaaagctgaaagtgttgcgtgatgaacttggtgagcaactggaagttgtgatgcgagtttactttgaaaaaccacgtacgacagtcggctggaaaggtttgatcaacgacccatacctgaacgacacatttaagctaaatgacggtcttcgtattggacgtaagctgcttttggatctcactgacatgggcctaccaacagcgagtgaattcctagacatgattacgcctcaatacgttgcggatttgatcagctggggcgcgattggtgcacgcacgacggaatcgcaagttcaccgcgaactcgcttctggtctttcttgcccggttggtttcaaaaacggtactgacggtaacattaaaatcgcgagtgatgctattcgctctgcaagcgcttctcaccatttcctatcggtaacgaagtacggtcattcagcgattgttgaaaccgcaggtaacccagactgccacatcattttacgtggtggtaaagaaccaaactacagtgcagcacacgttgctcaaatcaaagacgagttggacgcggctggtctaccgaagaaagtgatgatcgattttagccacgcgaacagctctaagcagttcaaacgtcaaatgcttgtgtctgatgatgtatcagagcaaatcgctggtggtgaagatgcaatctttggcgtgatgatcgagtctcatttggttgaaggccgccaagatttagtggatggtaaagtggcaacttacggtcagtcgattactgatgcatgtattggttgggacgatacggaaacggtacttcgtcagctttctgaagcagtaaaagcgcgccgtagcaaataa

SEQ ID NO: 1648 - protein, 350 aa, Vibrio parahaemolyticus RIMD 2210633
MFQTDDVRINRVKELLPPVAVLEKFPATETASSTTFDCRNAIHNILEGKDDRLLVIVGPCSIHDPAAAVEYGKKLKVLRDELGEQLEVVMRVYFEKPRTTVGWKGLINDPYLNDTFKLNDGLRIGRKLLLDLTDMGLPTASEFLDMITPQYVADLISWGAIGARTTESQVHRELASGLSCPVGFKNGTDGNIKIASDAIRSASASHHFLSVTKYGHSAIVETAGNPDCHIILRGGKEPNYSAAHVAQIKDELDAAGLPKKVMIDFSHANSSKQFKRQMLVSDDVSEQIAGGEDAIFGVMIESHLVEGRQDLVDGKVATYGQSITDACIGWDDTETVLRQLSEAVKARRSK

SEQ ID NO: 1649 - DNA, 1083 bp, Coxiella burnetii RSA 493
  CDS (1)..(1083): transl_table=11
atgcagaaaactgacaatttaagaataaaagccatccaccccctgatgctccccgcccttctcatcgaagagctgcccatcacagccgctgtagcttcaaccgtcaacctagctcgattagctgccagagacatcattcacggccaagatgaccgtttgttagtagtccttggcccttgctccattcacgacgttaaagccgccctcgaatacgctaatcgactcaaacgctgtattgatcgacacgctaaggaactgtgcatcatcatgcgcgtttattttgaaaaaccccgaacgaccgttggatggaagggcttgattaacgacccccagctcgatggaagtttccacattaaccaagggctgcgggtcgcccggcgtttactgctcgacattaatgaaatcggggttcctaccggaagcgaatttctagacaccattataccccagtatatttctgatttaacttcgtggtccgccatcggcgctcgcacgaccgaaagccaaacccaccgagagctagcttctggcctttcaatgccaattggcttcaaaaacggtaccacgggcaatgtccaaatcgccattgatgcagtgctggctgcccgacaagcccatcattttttaggggtatccaaacaaggcatcgctgctattatcattacaaaaggaaaccctgacggtcacgtgattttgcgcggctcctcccagagcaccaactatgatcccaaatccattgaagaagccattctgaaactcaaagctaaccatttacccccctcggtgatggttgactgtagccacggcaatagccgcaaaaaccacaaaaatcaaatgcgagttgttgacgccttatacgatcaaattacccaaggcagctcttatttattgggcgccatgattgaaagtaatttagttgaagggaaacaaaccctcgaatccggaaaagctttaacctatgggcagagcatcaccgatgcttgcatctcgtgggaagataccgaacttgcgttggaaaaactggcacaagccgttattattcggcgccaacacagcgaagagagaaaacatcatggcgaataa

SEQ ID NO: 1650 - protein, 360 aa, Coxiella burnetii RSA 493
MQKTDNLRIKAIHPLMLPALLIEELPITAAVASTVNLARLAARDIIHGQDDRLLVVLGPCSIHDVKAALEYANRLKRCIDRHAKELCIIMRVYFEKPRTTVGWKGLINDPQLDGSFHINQGLRVARRLLLDINEIGVPTGSEFLDTIIPQYISDLTSWSAIGARTTESQTHRELASGLSMPIGFKNGTTGNVQIAIDAVLAARQAHHFLGVSKQGIAAIIITKGNPDGHVILRGSSQSTNYDPKSIEEAILKLKANHLPPSVMVDCSHGNSRKNHKNQMRVVDALYDQITQGSSYLLGAMIESNLVEGKQTLESGKALTYGQSITDACISWEDTELALEKLAQAVIIRRQHSEERKHHGE

SEQ ID NO: 1651 - DNA, 1179 bp, Nitrosomonas europaea ATCC 19718
  CDS (1)..(1179): transl_table=11
atgaagtcgggcagtctgtattgccagtgtggcaaggaagtgcaaaaagaaatagtcatcaaggaatcatctgtggaacataaaactgacgaccggcgcattatcagaggagatgagctgatcacgccggtgaaactgcttcatgatcatcctctgactgaacaggcgactgaaactgtggttactgccagacaggagtgccacgatattttgcggggagaggatgaccggttactggtggtatgtggcccatgctcgattcatgatgtggatgcggcagtggaatatgcttcccgactgagtcatctgcgtcaggagctgaaagatcagttacatatcatcatgcgggtttatttcgagaaacctcgcacaacagttggctggaaaggcctgatcaacgacccagacctggataacagtttcaacattgacaagggattgcggcttgcccgcgacctgttgctgaaactgggtaatataaatatgccggctgcaactgaatttcttgatctgatcagcccgcaatatgtggctgacctcatcagttgggcggccatcggcgcacgcacgactgaaagccagggacatcgtgaactggcctccggtgtttcgtgtccagtggggttcaagaatggtacctacggcaatctgaatatcgcaatcgatgcgattggtgctgcatcccacccgcataatttcctgtcagtcaccaaagaaggccgggttgctactttcaccaccaggggaaatgaagattgtcatatcatcctgcgcggcggaagatcaccgaattacgatgcagagagtgttgcttctgcggtcgaagcactgcggaaagccaagctgcctccttatctgatgatcgattgcagtcacgccaacagccacaaggattaccggcgtcagccggaagtggctgccgatgtggctcagcaaattgcggaaggaaactgctcaatcagcgggatcatgcttgaaagtcacctggtggccggcaggcagaatgttgaaggtaagcggcgggaagagctggtttacgggcaaagcatcacggatggctgtatcgatttcgatacgacacagcaggtgctgttcgagctggcggaagcggtggaaaaacgaagaaatttgcagaataccccgatactggttccagatcattccactgcgctttcctga

SEQ ID NO: 1652 - protein, 392 aa, Nitrosomonas europaea ATCC 19718
MKSGSLYCQCGKEVQKEIVIKESSVEHKTDDRRIIRGDELITPVKLLHDHPLTEQATETVVTARQECHDILRGEDDRLLVVCGPCSIHDVDAAVEYASRLSHLRQELKDQLHIIMRVYFEKPRTTVGWKGLINDPDLDNSFNIDKGLRLARDLLLKLGNINMPAATEFLDLISPQYVADLISWAAIGARTTESQGHRELASGVSCPVGFKNGTYGNLNIAIDAIGAASHPHNFLSVTKEGRVATFTTRGNEDCHIILRGGRSPNYDAESVASAVEALRKAKLPPYLMIDCSHANSHKDYRRQPEVAADVAQQIAEGNCSISGIMLESHLVAGRQNVEGKRREELVYGQSITDGCIDFDTTQQVLFELAEAVEKRRNLQNTPILVPDHSTALS

SEQ ID NO: 1653 - DNA, 1053 bp, Rhodopirellula baltica SH 1
  CDS (1)..(1053): transl_table=11
atgatccgcaccgatgaccttcgtatcggcgccatcaaaaatctgatgtcccccagtgaattgctatccgaaattccggccagcgatgcgatttcacagacggtcgctgacggtcgaaccgcgatccaaaacgtgcttcagcagaaggacgaccgtttgctcgtcgtcgtcgggccgtgttcgattcacgatccggattccgctcgtcagtacgcggagaagttggcggtcgagcaaaaaaagcacgccgatgagctgttgatcgtcatgcgggtttacttcgaaaaacctcgaacaacggttggctggaagggtctgatcaacgaccccaaacttgacgacagcttcgaaatcaatcacggattgcgaaccgctcggcgtttgctcagcgacatcaacgcgatgggactgccgaccggaaccgagtttttggatttgatcagcccgcagtatgtggctgacttggtcgggtggggtgccatcggagcacgcacgaccgaaagccaaggtcaccgcgaattggcgtcggggctgtcttgcccggtcggcttcaaaaatggaaccagcggcaacgttcagatcgctgtcgatgcgatttgctccgcacgtcgaccacaccacttcctatccgtcacgaaggaaggaacctcggcgatcttcgcaacaaccggaaacccggactgccacatcattctgcgtggcggaaagcacaccaactacgatgccgccagcatcgatatggcatcgggattgctcgagaaagcggacctgccagcacgaatcatgatcgattgcagccacgcgaacagccgcaagattttcaaacgtcaatcgtacgtttgccgggacatctgtgcccaagtatccgatggcgaccaacgcatcatgggcgtgatgatcgaaagcaatctgctcgagggcaaccaaaaactcagcgattcgccgcttgttcagggtctcagcgtcaccgatgcgtgtatcggttgggaaaccaccgagcaactcttcagcgacctgggaaaatccgtcgccgcacgccgtaaagtcggctga

SEQ ID NO: 1654 - protein, 350 aa, Rhodopirellula baltica SH 1
MIRTDDLRIGAIKNLMSPSELLSEIPASDAISQTVADGRTAIQNVLQQKDDRLLVVVGPCSIHDPDSARQYAEKLAVEQKKHADELLIVMRVYFEKPRTTVGWKGLINDPKLDDSFEINHGLRTARRLLSDINAMGLPTGTEFLDLISPQYVADLVGWGAIGARTTESQGHRELASGLSCPVGFKNGTSGNVQIAVDAICSARRPHHFLSVTKEGTSAIFATTGNPDCHIILRGGKHTNYDAASIDMASGLLEKADLPARIMIDCSHANSRKIFKRQSYVCRDICAQVSDGDQRIMGVMIESNLLEGNQKLSDSPLVQGLSVTDACIGWETTEQLFSDLGKSVAARRKVG

SEQ ID NO: 1655 - DNA, 1113 bp, Haemophilus ducreyi 35000HP
  CDS (1)..(1113): transl_table=11
atgccttataaaaatgatgatcttcgtatcactaaaattgaacagctattacccccgatcgctttattagagcgttttccagccagtgatgttgctgagcatactgttgctagagcaagagaagctattcataaaattattcacggtgaagacgatcgtttattagttgttattgggccttgctcaattcatgatccagaatctgctctagattatgctaaacgaattaaagcattacgtgataatccacagattaatcaaaacttagagttagtaatgcgcgtttattttgaaaaaccacgaacaaccgttggttggaaagggttaattaatgacccctatctgaatgaaacttatgcattaaacgatggtttacgaattgcacgaaaagtactgtccgatattaatgatttaaccgtgcctgccgcgggtgagtttttagatatgatcattccacaatatgtagccgattttatgagttggggagccattggagcacggaccgctgaatcacaagttcatcgtgagttagcctcaggtttatcttgtgcggtaggtttcaaaaatgccactaatggcagtgttaaaaccgctttagatgcaataaaatctgctgaagtttcacatcacttcttatccgtgaccaaatttgctcattcagctgttatttctaccgcaggtaatgaggattgccacattattttgcgtggtggcgataatggcacaaattatgatattgcgtctgtaaaaaaagtgtgtgcagatattgagaaagcagggcggcgtcctcacgtaatgattgactttagtcatgctaatagccaaaaacaatttaaacgacaaatggaagtttgtactaatgtatgccaacagattgcaaatggttcatcattaatttctggtgtgatgatagaaagccatttagtcgaaggtcggcaagatcttgtcgaaggtggtttagataaattagtatatggtcaaagtgttacagatgcttgtattggttgggaagacagcgaaacagcactgtttgccttagctgaagcggtcgcattacgccgacaacggaccaacaataatgctaatgatttggttaatcatatagtaaaatag

SEQ ID NO: 1656 - protein, 370 aa, Haemophilus ducreyi 35000HP
MPYKNDDLRITKIEQLLPPIALLERFPASDVAEHTVARAREAIHKIIHGEDDRLLVVIGPCSIHDPESALDYAKRIKALRDNPQINQNLELVMRVYFEKPRTTVGWKGLINDPYLNETYALNDGLRIARKVLSDINDLTVPAAGEFLDMIIPQYVADFMSWGAIGARTAESQVHRELASGLSCAVGFKNATNGSVKTALDAIKSAEVSHHFLSVTKFAHSAVISTAGNEDCHIILRGGDNGTNYDIASVKKVCADIEKAGRRPHVMIDFSHANSQKQFKRQMEVCTNVCQQIANGSSLISGVMIESHLVEGRQDLVEGGLDKLVYGQSVTDACIGWEDSETALFALAEAVALRRQRTNNNANDLVNHIVK

SEQ ID NO: 1657 - DNA, 1119 bp, Bordetella parapertussis 12822
  CDS (1)..(1119): transl_table=11
ttgacccgtatcgatgacccgctgcacgatcgcgaggccggccaggccgacgcgacgcaagacaccacccgcatcgacgacgtgcgcatcggcgccgtgcgtcccctgatttcgcccgccctgctgcaggacgaactgccggtatcggcgccgctacaggcgctggtcgaggacagccgcgcgcgcatcgccgacgtgctgcacggccgcgacgaccggctggtggtggtggtcggcccctgctccatccacgaccacgaacaggccatggagtacgcgcgccagctcaaggaggcgaccgacacgctggccgacgacctgctcatcgtcatgcgcgtgtacttcgagaagccgcgcaccaccgtgggctggaagggctacatcaacgatccgcgcctggacggcagtttccgcatcaacgaaggcctgcgccgcgcgcgccacctgctgctggaaatcggcgccctgggactgcccatcgccaccgaattcctggacctgctcagcccgcaatacatcgccgacctgatcgcctggggcgcgatcggcgcgcgcaccaccgaaagccccagccaccggcaactggcctcgggcctgagctgcccgctgggtttcaagaacggcaccgacggcggcatccaggtggcggccgacgccatcgtggccgccagcgccccgcatgccttcatgggcatgaccaagatgggcaccgccgccatcttcgagacgcgcggcaacgacgacacccacgtcatcctgcgcggcggcaagcaaggccccaactacgacgcggccgccatcgacgcctgctgtgcggcgctggccaaggccggcctgcgcgagcaggtcatggtcgactgctcgcacgccaattcgaacaagtcgcacgcgcgccaggtcgacgtggcgcgcgacctggcccggcagctggccggcggcgaccgccgcatcatcggcatcatgatcgaaagcaacctcgaggaaggccgccaggatctcaagcccggcgtgccgctcaagcgcggcgtgtccatcaccgacgcctgcctgagctgggcccagaccgagccggtgctggccgagctggcccaggccgtgcgccagcgccgcgaaggctga

SEQ ID NO: 1658 - protein, 372 aa, Bordetella parapertussis 12822
MTRIDDPLHDREAGQADATQDTTRIDDVRIGAVRPLISPALLQDELPVSAPLQALVEDSRARIADVLHGRDDRLVVVVGPCSIHDHEQAMEYARQLKEATDTLADDLLIVMRVYFEKPRTTVGWKGYINDPRLDGSFRINEGLRRARHLLLEIGALGLPIATEFLDLLSPQYIADLIAWGAIGARTTESPSHRQLASGLSCPLGFKNGTDGGIQVAADAIVAASAPHAFMGMTKMGTAAIFETRGNDDTHVILRGGKQGPNYDAAAIDACCAALAKAGLREQVMVDCSHANSNKSHARQVDVARDLARQLAGGDRRIIGIMIESNLEEGRQDLKPGVPLKRGVSITDACLSWAQTEPVLAELAQAVRQRREG

SEQ ID NO: 1659 - DNA, 1074 bp, Bordetella parapertussis 12822
  CDS (1)..(1074): transl_table=11
gtgtcgcacaataccgatgactttcgtatccgtgaaatcaaagagctgaatcctcctgcgcatgtcatgcgcgagtttccgtgctcgaaggatgtttctgaaatcgtctacgccgcccgccagggcatgcatcgcatcctgcatggcatggatgaccgcctgatcgtcgtgatcggcccttgctcgatccacgataccaaggcggcgctcgaatacgcggatcgcctcaagccggtgcgcgaccgcctggccgccgatctcgaggtggtgatgcgcgtctacttcgaaaagccgcgcaccaccgtgggctggaagggcctgatcaacgaccccgacctggatggcagcttcgatatcaacaagggcgtgcgcgtggcgcgcgaactgctgctggacatcaacagccgcggcctgccggcgggttgcgagttcctcgacatgattaccccgcagtacatcgccgacctggtgtcgtggggggcgatcggggcgcggacgaccgaaagccaggttcaccgcgagctggcttccggcctgtcgtgtcctgtcggtttcaagaacggcaccgacggcaatgtgaagatcgccgtcgacgccatcaaggccgcctcgcaaccgcaccatttcctctcggtgaccaagggcgggcattcggccatcgtctcgaccgcgggcaacgaggactgccacgtcattctgcgcggcggcaaggcgcccaactacgatgccgccagcatcgaagcggcctgccaggacatggccaaggccggcctggcccagcgcatcatgatcgacgccagccacgccaacagcagcaagaaacccgagaatcagccgctggtggtcgatgatgtggccaaccagatcgagcagggcgatgcccgcatcgtgggcctgatgatagaaagccatctgctgggcggccgccaggacctggtgcccggccaggccttgacgtacgggcagagcatcaccgacggttgcatcgactgggatgcttcggtgcaggtgctggagcgcctggcccatgcggtgcgcgaacgccggcgcgcgtcgctgagcgccggcaagtag

SEQ ID NO: 1660 - protein, 357 aa, Bordetella parapertussis 12822
MSHNTDDFRIREIKELNPPAHVMREFPCSKDVSEIVYAARQGMHRILHGMDDRLIVVIGPCSIHDTKAALEYADRLKPVRDRLAADLEVVMRVYFEKPRTTVGWKGLINDPDLDGSFDINKGVRVARELLLDINSRGLPAGCEFLDMITPQYIADLVSWGAIGARTTESQVHRELASGLSCPVGFKNGTDGNVKIAVDAIKAASQPHHFLSVTKGGHSAIVSTAGNEDCHVILRGGKAPNYDAASIEAACQDMAKAGLAQRIMIDASHANSSKKPENQPLVVDDVANQIEQGDARIVGLMIESHLLGGRQDLVPGQALTYGQSITDGCIDWDASVQVLERLAHAVRERRRASLSAGK

SEQ ID NO: 1661 - DNA, 1074 bp, Bordetella bronchiseptica RB50
  CDS (1)..(1074): transl_table=11
gtgtcgcacaataccgatgaccttcgtatccgtgaaatcaaagagctgaatcctcccgcgcatgtcatgcgcgagtttccgtgctcgaaggatgtttctgaaatcgtctacgccgcccgccagggcatgcatcgcatcctgcatggcatggatgaccgcctgatcgtcgtgatcggcccttgctcgatccacgataccaaggcggcgctcgaatacgcggatcgcctcaagccggtgcgcgaccgcctggccgccgatctcgaggtggtgatgcgcgtctacttcgaaaagccgcgcaccaccgtgggctggaagggcctgatcaacgaccccgacctggatggcagcttcgatatcaacaagggcgtgcgcgtggcgcgcgaactgctgctggacatcaacagccgcggcctgccggcgggttgcgagttcctcgacatgattaccccgcagtacatcgccgacctggtgtcgtggggggcgatcggggcgcggacgaccgaaagccaggttcaccgcgagctggcttccggcctgtcgtgtcctgtcggtttcaagaatggcaccgacggcaatgtgaagatcgccgtcgacgccatcaaggccgcctcgcaaccgcaccatttcctctcggtgaccaagggcgggcattcggccatcgtctcgaccgcgggcaacgaggactgccacgtcattctgcgcggcggcaaggcgcccaactacgatgccgccagcatcgaagcggcctgccaggacatggccaaggccggcctggcccagcgcatcatgatcgacgccagccacgccaacagcagcaagaagcccgagaatcagccgctggtggtcgatgatgtggccaaccagatcgagcagggcgatgcccgcatcgtgggcctgatgatagaaagccatctgctgggcggccgccaggacctggtgcccggccaggccttgacgtacgggcagagcatcaccgacggttgcatcgactgggatgcttcggtgcaggtgctggagcgcctggcccatgcggtgcgcgaacgccggcgcgcgtcgctgagcgccggcaagtag

SEQ ID NO: 1662 - protein, 357 aa, Bordetella bronchiseptica RB50
MSHNTDDLRIREIKELNPPAHVMREFPCSKDVSEIVYAARQGMHRILHGMDDRLIVVIGPCSIHDTKAALEYADRLKPVRDRLAADLEVVMRVYFEKPRTTVGWKGLINDPDLDGSFDINKGVRVARELLLDINSRGLPAGCEFLDMITPQYIADLVSWGAIGARTTESQVHRELASGLSCPVGFKNGTDGNVKIAVDAIKAASQPHHFLSVTKGGHSAIVSTAGNEDCHVILRGGKAPNYDAASIEAACQDMAKAGLAQRIMIDASHANSSKKPENQPLVVDDVANQIEQGDARIVGLMIESHLLGGRQDLVPGQALTYGQSITDGCIDWDASVQVLERLAHAVRERRRASLSAGK

SEQ ID NO: 1663 - DNA, 1119 bp, Bordetella bronchiseptica RB50
  CDS (1)..(1119): transl_table=11
ttgacccgtatcgatgacccgctgcacgatcgcgaggccggccaggccgacgcgacgcaagacaccacccgcatcgacgacgtgcgcatcggcgccgtgcgtcccctgatttcgcccgccctgctgcaggacgaactgccggtatcggcgccgctacaggcgctggtcgaggacagccgcgcgcgcatcgccgacgtgctgcacggccgcgacgaccggctggtggtggtggtcggcccctgctccatccacgaccacgaacaggccatggagtacgcgcgccagctcaaggaggcggccgacacgctggccgacgacctgctcatcgtcatgcgcgtgtacttcgagaagccgcgcaccaccgtgggctggaagggctacatcaacgatccgcgcctggacggcagtttccgcatcaacgaaggcctgcgccgcgcgcgccacctgctgctggaaatcggcgccctgggactgcccatcgccaccgaattcctggacctgctcagcccgcaatacatcgccgacctgatcgcctggggcgcgatcggcgcgcgcaccaccgaaagccccagccaccggcaactggcctcgggcctgagctgcccgctgggtttcaagaacggcaccgacggcggcatccaggtggcggctgacgccatcgtggccgccagcgccccgcatgccttcatgggcatgaccaagatgggcaccgccgccatcttcgagacgcgcggcaacgacgacacccacgtcatcctgcgcggcggcaagcaaggccccaactacgacgcggccgccatcgacgcctgctgtgcggcgctggccaaggccggcctgcgcgagcaggtcatggtcgactgctcgcacgccaattcgaacaagtcgcacgcgcgccaggtcgacgtggcgcgcgacctggcccggcagctggccggcggcgaccgccgcatcatcggcatcatgatcgaaagcaacctcgaggaaggccgccaggatctcaagcccggcgtgccgctcaagcgcggcgtgtccatcaccgacgcctgcctgagctgggcccagaccgagccggtgctggccgagctggcccaggccgtgcgccagcgccgcgaaggctga

SEQ ID NO: 1664 - protein, 372 aa, Bordetella bronchiseptica RB50
MTRIDDPLHDREAGQADATQDTTRIDDVRIGAVRPLISPALLQDELPVSAPLQALVEDSRARIADVLHGRDDRLVVVVGPCSIHDHEQAMEYARQLKEAADTLADDLLIVMRVYFEKPRTTVGWKGYINDPRLDGSFRINEGLRRARHLLLEIGALGLPIATEFLDLLSPQYIADLIAWGAIGARTTESPSHRQLASGLSCPLGFKNGTDGGIQVAADAIVAASAPHAFMGMTKMGTAAIFETRGNDDTHVILRGGKQGPNYDAAAIDACCAALAKAGLREQVMVDCSHANSNKSHARQVDVARDLARQLAGGDRRIIGIMIESNLEEGRQDLKPGVPLKRGVSITDACLSWAQTEPVLAELAQAVRQRREG

SEQ ID NO: 1665 - DNA, 1083 bp, Prochlorococcus marinus str. MIT 9313
  CDS (1)..(1083): transl_table=11
atgaattctggcgaaatgaccaccacttccgacttgcatgtggtggatacgcggcccttggtgtcgccgctcttgcttcatcaggagctgccccttgatctagtggctctcaaaaccgttgcagatactcgtaagcgcatccaggcaattctgcgtggtgaggatccccgcttgctggtgattgttggtccctgctcggttcatgacattgcctctgcaagggactatgcccgtcagttggagccattgcgacagcgatatgccgcccagttggaggtggttttgcgggtctatttcgaaaaacctcgcaccacagttggctggaaaggtctcatcaatgatccccatctcgatggttcctatgacatcaacactggcttgaggcgtgcgcggtcgttgttgctcgaccttgctcgcgagggtatgccgacggccactgaattgctggatccggttgtgcctcaatacatcgctgatttgatcagttggacggcgattggagccagaaccactgagagtcagacccatcgggagatggcttctggattgtcaatgcccgtcggttacaaaaacggtaccgatggcagtgccaagattgcgatccatgcgatgcaggcagcatctagaccgcatcattttcttgggatcaatcggcagggtcaggcttcgattgtgcataccactggaaaccctgatggccatctcgtgttgcggggaggtaatggctgtaccaattaccatcccgaagcggtggaagaggttgcaaaagaattagtgaaggctggcttggttgatcggttgatggtggattgcagccatgacaattcgaagaaagattttcggcgacagtcagaggtgcttcaggctgttgctactcaggtacgccaaggatcaacccatctcatgggtgtgatgttggaaagtcatcttgtcgagggcaatcagaagttgcctgaagacctctctactcttgtctatggtcaaagcattacggatgcttgtatcgatatagagacaacggcaactctccttgaggatttggcggctgcagtggcttcagtgacgttgtcaccaataacttga

SEQ ID NO: 1666 - protein, 360 aa, Prochlorococcus marinus str. MIT 9313
MNSGEMTTTSDLHVVDTRPLVSPLLLHQELPLDLVALKTVADTRKRIQAILRGEDPRLLVIVGPCSVHDIASARDYARQLEPLRQRYAAQLEVVLRVYFEKPRTTVGWKGLINDPHLDGSYDINTGLRRARSLLLDLAREGMPTATELLDPVVPQYIADLISWTAIGARTTESQTHREMASGLSMPVGYKNGTDGSAKIAIHAMQAASRPHHFLGINRQGQASIVHTTGNPDGHLVLRGGNGCTNYHPEAVEEVAKELVKAGLVDRLMVDCSHDNSKKDFRRQSEVLQAVATQVRQGSTHLMGVMLESHLVEGNQKLPEDLSTLVYGQSITDACIDIETTATLLEDLAAAVASVTLSPIT

SEQ ID NO: 1667 - DNA, 1068 bp, Synechococcus sp. WH 8102
  CDS (1)..(1068): transl_table=11
atggccaccacctcggatttgcatgtggtggagacccgtccgctggtggctccggctctgctgcacggagatctgccgattgatgccgccgccacggagacggtcgcatcggcccgtcgtcggatccaggccattttgcgcggcgatgatcagcgtcagctggtggtggtgggcccctgctcggtccacgatgtgaaggcggcgcgggagtacgccgaacggctggccccgatccgggaacggctgaaggatcagctggaggtggtgatgcgggtttatttcgaaaagccgcgtacgacggttggttggaaaggcctcatcaatgacccccacctcgatggctcgtacgacatcaacacaggcctgaggcgggctcgtggcttactgctggacctgtccagggagggcatgccggcagcgacggaactgctggatccggtggttccccagtacatcgctgatctgatcagctggactgcgatcggagcccgcaccacggaaagccagacccatcgggagatggcttcaggcttgtcgatgccgatcggctacaagaacagtaccgatggcagcgcctgcatcgccatcaatgcgatgcaggcggcatcgaaacctcatcattttctgggaatcaaccacgacggccatgcctcgatcgtgagcacgactggcaacccggatggtcatctagtgctgcgtggcggtcatcagggcagcaactaccacctggaggccgttcaggctgctgcagcggaactgagcaaggcgggcctgaaggatcgtctgatggtggactgcagccatgccaactcgaacaaggatttccgccgccaggccgatgtactcgccacggtggctgatcagttgaaggctggttccggccatgtgatgggcgtgatgatcgaaagtcatctggtggaaggcaatcagaaactgaccgctggtctctcccagctcacctatggccagagcattacggatgcctgcatcagcctggagaccacggatgcgctgctgtcccagctggctgcagccgtggccgatcgcagcagcgctttgacggcataa

SEQ ID NO: 1668 - protein, 355 aa, Synechococcus sp. WH 8102
MATTSDLHVVETRPLVAPALLHGDLPIDAAATETVASARRRIQAILRGDDQRQLVVVGPCSVHDVKAAREYAERLAPIRERLKDQLEVVMRVYFEKPRTTVGWKGLINDPHLDGSYDINTGLRRARGLLLDLSREGMPAATELLDPVVPQYIADLISWTAIGARTTESQTHREMASGLSMPIGYKNSTDGSACIAINAMQAASKPHHFLGINHDGHASIVSTTGNPDGHLVLRGGHQGSNYHLEAVQAAAAELSKAGLKDRLMVDCSHANSNKDFRRQADVLATVADQLKAGSGHVMGVMIESHLVEGNQKLTAGLSQLTYGQSITDACISLETTDALLSQLAAAVADRSSALTA

SEQ ID NO: 1669 - DNA, 1059 bp, Chromobacterium violaceum ATCC 12472
  CDS (1)..(1059): transl_table=11
atgcaacgccagaccgacgacgtcagaatccgcgaaatcaaggaactgcttcccccgatcgcccacctttacgagctgccgatcagcgagtcggcctccgagctgatctacaacacccgtcgcgaaatctcggccttgctgcgcggcgaggacgaccgcctgctggtggtgatcggcccctgttccatccacgacgtcgacgccgcggtcgagtacgcgcagaagctggcgccgctgcgccaggcgctggcggatgagctggtggtggtgatgcgggtgtatttcgagaagccgcgcaccacggtcggctggaagggcctgatcaacgacccgcacctgaacgagtcctacgacatcaacgccggcctgcgcatcgcgcgccgcctgctgctgacgctgaacaacctgggcatgccggccgccaccgaattcctcgacatgatcacgccgcagtacttcgccgacctgatcagctggggcgcgatcggcgcccgcaccaccgagagccaggtgcaccgcgagctggcctccggcctgtcctgcccggtcggtttcaagaacggcaccgacggcaacctgaagatcgccgtcgacgccatccgctcgtccagcgtgccgcaccatttcctgtcggtgaccaagaccggccattccgccatcgtttccaccggcggcaacccggactgccacgtgatcctgcgcggcggcaaggaacccaattactcggccgagcatgtgcgcgccgccgccgccgagctgaccgcggtcggcctgccgcacaagctgatggtggacttcagccacgccaacagccgcaaggactaccgccgccagatggaggtcagcgccgacgtggccggccagatcgccggcggcgaccgcaacatcttcggcgtgatggtggaaagccacctggtggaggggcgccaggatcagaagcccggctgcgagctcaagtacggccagagcatcaccgacgcctgcctgggctgggacgacaccgagacgctgctgcgccagctggccgacgccgtcaaggcgcgccgcgccgccgagtaa

SEQ ID NO: 1670 - protein, 352 aa, Chromobacterium violaceum ATCC 12472
MQRQTDDVRIREIKELLPPIAHLYELPISESASELIYNTRREISALLRGEDDRLLVVIGPCSIHDVDAAVEYAQKLAPLRQALADELVVVMRVYFEKPRTTVGWKGLINDPHLNESYDINAGLRIARRLLLTLNNLGMPAATEFLDMITPQYFADLISWGAIGARTTESQVHRELASGLSCPVGFKNGTDGNLKIAVDAIRSSSVPHHFLSVTKTGHSAIVSTGGNPDCHVILRGGKEPNYSAEHVRAAAAELTAVGLPHKLMVDFSHANSRKDYRRQMEVSADVAGQIAGGDRNIFGVMVESHLVEGRQDQKPGCELKYGQSITDACLGWDDTETLLRQLADAVKARRAAE

SEQ ID NO: 1671 - DNA, 1119 bp, Gloeobacter violaceus PCC 7421
  CDS (1)..(1119): transl_table=11
gtgcccggcggctctcgcgatgtcggcgagttcgcctttgagccgctcgacgatttgcggatcgtctcggtgagtgagattcctcctccagtgcaactgcgcgagcaattgcctctggatgcggctgcccagaatacagtgcgccggggccgctcgcagattcgcgctgtattgggcggctttgattcacgcctgttggtggtggtcggcccctgttcggtgcacgacgccgatgcggcgcgcgagtacgcccagaggctggccgagtgcgcccgccgctatgcggacgaactgctcatcgccatgcgcgtttacttcgagaaaccgcgcaccacggtcggctggaaaggactcatcaacgatcccggcctcgacggcagctgtcgtatcggtgagggactgaccaccgcccgcgcgttgctgctcgacattgcccggctcggactgccggcggccaccgaatttctcgacccgatcacccccgagtacatcgtcgatctgatcagttggggggcgattggggcgcgcacggtcgaaagtcaggtgcacaggcaagtggcttcggcgctttcctgtccggtgggttttaaaaacggctcctccggcgacatcgccgttgccgtcgaagcggtgctctcggcgcgcaacgcccatcagttcctttcgcacacccgcgagggtcgcacggctatcgtgctgaccagcggcaatcccgattgccatgtcgtgttgcgcggcggcaaaaacggccccaaccactcggctgaacatctcgcgcaggcagggcggttgttgcgcgaggcgggcttgccggagcgggtgatggtcgactgcagccacgccaacagctccaaagatcaccgccgccagggggaagtctgcaaacagttggcggcacggattgccgagggggatatgcggatgatgggcctgatgatcgaaagtcacctagtcgaagggcggcaggagttaggcgacggctgcaacttgcgccacggtcagagcatcaccgatgcgtgcatcggctgggaacagacagagcaattgcttaccggcctacacgaggcggccggcgctagacggtgtaagccggccgtccgcgccgagttgctggtttga

SEQ ID NO: 1672 - protein, 372 aa, Gloeobacter violaceus PCC 7421
MPGGSRDVGEFAFEPLDDLRIVSVSEIPPPVQLREQLPLDAAAQNTVRRGRSQIRAVLGGFDSRLLVVVGPCSVHDADAAREYAQRLAECARRYADELLIAMRVYFEKPRTTVGWKGLINDPGLDGSCRIGEGLTTARALLLDIARLGLPAATEFLDPITPEYIVDLISWGAIGARTVESQVHRQVASALSCPVGFKNGSSGDIAVAVEAVLSARNAHQFLSHTREGRTAIVLTSGNPDCHVVLRGGKNGPNHSAEHLAQAGRLLREAGLPERVMVDCSHANSSKDHRRQGEVCKQLAARIAEGDMRMMGLMIESHLVEGRQELGDGCNLRHGQSITDACIGWEQTEQLLTGLHEAAGARRCKPAVRAELLV

SEQ ID NO: 1673 - DNA, 1053 bp, Photorhabdus luminescens subsp. laumondii TTO1; identical to SEQ ID NO: 1517
  CDS (1)..(1053): transl_table=11

SEQ ID NO: 1674 - protein, 350 aa, Photorhabdus luminescens subsp. laumondii TTO1
MNYQNDDIRIKEIKELLPPVALLEKFPATEKAALTVCKARKTIHQILTGEDERLLVVIGPCSIHDPKAAMEYAGRLNELREELKEDLEVVMRVYFEKPRTTIGWKGLINDPHMNHSFDINDGLRLARQLLRDINDMGLPAAGEYLDMISPQYLADLMSWGAIGARTTESQVHRELASGLSCPVGFKNGTDGAIKVAIDAINAAGSPHSFLSVTKWGHSAIVNTSGNNDCHIILRGGKEPNYSSEHVAVVKQNLEKAGLPARIMIDFSHANSSKQFKKQMDVCSDVSRQLIAGEKAIIGVMVESHLEEGNQNPDSGLPLVYGKSITDACIGWADTEILLRQLSSAIKARRG

SEQ ID NO: 1675 - DNA, 1047 bp, Photorhabdus luminescens subsp. laumondii TTO1
  CDS (1)..(1047): transl_table=11
atgtacaaaacagatggtttaaggactcaccgtgtcgatagtttagtcacacctcaaactcttgcaattcaatttcctgtatccgaaaaaatcgtcaataatgtgacagcgtcacggaaacgtattgccgatattctcagcgggaatgatccacggcttatggtaatcatcggtccttgttctattcatgatattgatgctgctttagattatgctcagcgactgaacaggttacgtgaaaaataccagcacagactggaaattattatgcgcacctattttgagaaaccacgcacagtggtgggctggaaaggtttaatttcagacccctatctcgacggttcttgccaggtaaatcggggtattactttggcccggaaattattggttgatgtcaatgagttgggtttacccacagcaaccgaatttctggatatggtgaccggccaatatattgccgatctgatcagttggggcgcgatcggagccagaacaacagaaagccagattcaccgagaaatggcatctgccctctcctgtccagttggctttaaaaatggaacggatggcaacatccgtatcgccatagatgcaatccgcgcagccggggtctgtcacacattcctctcgccggataagcgcggtcagatgaccatctatcaaaccgaaggcaacccatacggccacattattatgcgtggaggcaaacagcctaattacagtgccaaagatattgctacagcttgtactcaactacgtgaatttaatttaccagaacatttagttatcgatttcagtcatggtaattgtcaaaaaattcataaacgccaactgactatagcaaaagaggtgggtcaccagattcaagagggttctaccgctattgtcggtgtaatggttgaaagttttctggttgaaggcacccagcaagtcattcagggacaaccgctaaattacggtcaatcgatcaccgatccttgtctaaactggcaagatacagaacagcttattgacattctcgccgaagcagtaagttaccgtttctga

SEQ ID NO: 1676 - protein, 348 aa, Photorhabdus luminescens subsp. laumondii TTO1
MYKTDGLRTHRVDSLVTPQTLAIQFPVSEKIVNNVTASRKRIADILSGNDPRLMVIIGPCSIHDIDAALDYAQRLNRLREKYQHRLEIIMRTYFEKPRTVVGWKGLISDPYLDGSCQVNRGITLARKLLVDVNELGLPTATEFLDMVTGQYIADLISWGAIGARTTESQIHREMASALSCPVGFKNGTDGNIRIAIDAIRAAGVCHTFLSPDKRGQMTIYQTEGNPYGHIIMRGGKQPNYSAKDIATACTQLREFNLPEHLVIDFSHGNCQKIHKRQLTIAKEVGHQIQEGSTAIVGVMVESFLVEGTQQVIQGQPLNYGQSITDPCLNWQDTEQLIDILAEAVSYRF

SEQ ID NO: 1677 - DNA, 1245 bp, Vibrio vulnificus YJ016
  CDS (1)..(1245): transl_table=11
ttgaaaaccaaagcgaggcgctttggtttttttataatgtgtaatttattttttacatttgatgttttttattgtttacggttgatttttaattcaaccctgttaacttgtgttcaaacagatttcgactctcagggatatgagggtgtaaaaaataatatacaggtgagtgtcatgcagaaaagtgaactaagcaatattaatatcagcgatgaacaagtgctgattacgccagaacagctaaaacagaaactgccactgagcgacaacgcccgccgcttcattcaagagtcgcgtaataccgtcgccaatattattcataagcaagatcatcgtctgctggtggtttgtggtccttgttctattcacgatctggacgcggcaaaggattatgcgcgtcgcctaaaagcgctctccgccgagttaagcgatcaactgtatattgtgatgcgtgtttactttgaaaaacctcgtacaactgtgggttggaaagggctcatcaacgaccctcatctggatggtagcttcgatattgagcatggtctgcatgttggccgtcaattgctggtggagctggctgaaatggagatccctctggcgacagaagcactcgacccaattagtccgcaatacttggctgatacattcagttgggctgcgattggtgcgcgtacgacagaatcacaaactcaccgtgaaatggccagtggtttgtctatgccgattggttttaaaaatggcacggatggcagcttgtcaacggcgattaacgcaatgcaagcggcctcttcaagccaccgttttatggggatcaaccgtgaaggccaagtggcattgctgacgactcaaggtaacccaaatggtcacgtgattttgcgtggtggtaagcagaccaactacgattctgtgtcggtggcggagtgtgagcaagacatggccaaagtgggtttagatgcgtcattgatggtggattgtagccatgccaattcgcgcaaagattaccgtcgtcagcctttagtcgccgaagacgtgattcatcaaattcgcgaaggcaacaaatcgatcattggtttgatgattgaaagccacattaatgaaggtaatcaatcctcagatttaccgctttctgagatgcagtacggtgtttctattaccgatgcctgtatcaattggcaggcaactgaggcactattgcgtaaagcacacaaagagttagtgccacatttagaaaaccgtctcaaataa

SEQ ID NO: 1678 - protein, 414 aa, Vibrio vulnificus YJ016
MKTKARRFGFFIMCNLFFTFDVFYCLRLIFNSTLLTCVQTDFDSQGYEGVKNNIQVSVMQKSELSNINISDEQVLITPEQLKQKLPLSDNARRFIQESRNTVANIIHKQDHRLLVVCGPCSIHDLDAAKDYARRLKALSAELSDQLYIVMRVYFEKPRTTVGWKGLINDPHLDGSFDIEHGLHVGRQLLVELAEMEIPLATEALDPISPQYLADTFSWAAIGARTTESQTHREMASGLSMPIGFKNGTDGSLSTAINAMQAASSSHRFMGINREGQVALLTTQGNPNGHVILRGGKQTNYDSVSVAECEQDMAKVGLDASLMVDCSHANSRKDYRRQPLVAEDVIHQIREGNKSIIGLMIESHINEGNQSSDLPLSEMQYGVSITDACINWQATEALLRKAHKELVPHLENRLK

SEQ ID NO: 1679 - DNA, 1053 bp, Vibrio vulnificus YJ016
  CDS (1)..(1053): transl_table=11
atgccactaaaaacagatgaattgagaacccaacctttgggtccaatgccaactcccgctgagttgagccaagcccatccgattaccgacgatgtggccgagcgaattgcgaaatctcgcagacaaattgaagatattttaacgggtaaggacaaccgtcttttggtgattgtcggtccttgctctgtgcacgatactgaagccgcgattgattacgcgacgcgtttaagctcgattcaagagcagtatcgcgatgagctgttcatcgttatgcgtacctactttgaaaaaccacgcactgtggtgggctggaaaggcctcattaccgacccaaatctggatggctcgtatgcgctagaagctggcctgcataaagcacgtaagctattgctcgatatcaacaaacttggccttgccaccgcaaccgagtttcttgacatgatcaccggtcaatatattgctgatttgatcacttggggcgcgattggagctcgaaccactgaatcgcaaattcaccgtgaaatggcgtctgcactctcctgcccggttggctttaaaaacggcaccaacggcaacgtgaaaattgcgattgacgcaattcgcgcatcaaaagcttcgcattacttctactctccagataaaaatggccgcatgaccgtttaccgcaccagtggtaacccatatggacatattattctgcgtggtggtgatacaggccctaactttgacgcaaaatcggttgagtctgcctgtcaatcactggctgagttcgatttgccacaacgtttgatcgttgatttcagtcacgctaactgtgaaaagcaacatcgtaaacagctcgatgtcgcgcaagacatttgtaaccaactaaaagcgggcagcacttatatcgcaggcatcatggcagaaagcttcattaccgaaggcaatcagccgatgactgaccttgataacttgacctacggccaatcgatcactgacccttgcctaagctgggaacacacagcgcaaatgctggacatgcttgcgactgctgtaaaagaaagccgttaa

SEQ ID NO: 1680 - protein, 350 aa, Vibrio vulnificus YJ016
MPLKTDELRTQPLGPMPTPAELSQAHPITDDVAERIAKSRRQIEDILTGKDNRLLVIVGPCSVHDTEAAIDYATRLSSIQEQYRDELFIVMRTYFEKPRTVVGWKGLITDPNLDGSYALEAGLHKARKLLLDINKLGLATATEFLDMITGQYIADLITWGAIGARTTESQIHREMASALSCPVGFKNGTNGNVKIAIDAIRASKASHYFYSPDKNGRMTVYRTSGNPYGHIILRGGDTGPNFDAKSVESACQSLAEFDLPQRLIVDFSHANCEKQHRKQLDVAQDICNQLKAGSTYIAGIMAESFITEGNQPMTDLDNLTYGQSITDPCLSWEHTAQMLDMLATAVKESR

SEQ ID NO: 1681 - DNA, 1053 bp, Vibrio vulnificus YJ016
  CDS (1)..(1053): transl_table=11
atgttccaaacagatgatgtaagaattaataacgttaaagagttacttccaccagtagctgttttagagaagtacccagcgactgaaaccgcttcttcgacaactttccaatcgagaaacgacattcacaacattctcatcggcaaggacgatcgcctgctggttattgtcggcccttgctctatccacgatcctgtggccgcggttgaatacggcaagcgtttgaaaacgttgcgtgacgatctcaaaggtgagcttgaaattgttatgcgcgtttactttgaaaagccacgtaccactgtgggttggaaaggtttgattaatgacccgtaccttaacgacacctacaagttgaatgatggtttacgcatgggccgaaaactgttgttggatcttaccgatatgggtcttccaacggcgagtgagttccttgacatgatcacaccacagtatgtggctgatttgatcagttggggtgctattggtgcacgtaccacggaatctcaggttcaccgtgaactggcgtcgggtctttcttgtccggttggttttaaaaatggcacggatggcaacattaagattgcaagtgatgcgattcgctcagcaagtgcttctcaccatttcctatcggtaacgaaatacggccattctgctatcgttgaaaccgcgggtaatccagactgccacattattttgcgtggtggtaaagagccaaactacagtgcagcgcatgtttcagcggtaaaagaagagttagctacatcgggtttgccacaaaaagtgatgatcgacttcagccacgccaacagctccaagcagtataagcgtcaaatgttggtcgccgacgatgtctctgagcagctagcggctggtgaagaggcaatctttggggtgatgatcgaatcacatcttgtggaaggtcgacaagatcttgttgatggtaaagcggcgacttatggtcagtcgattaccgacgcttgtatcggttgggaagatactgaaactgtgcttcgccaattggcaaatgcagtggcagctcgtcgagcaaaatag

SEQ ID NO: 1682 - protein, 350 aa, Vibrio vulnificus YJ016
MFQTDDVRINNVKELLPPVAVLEKYPATETASSTTFQSRNDIHNILIGKDDRLLVIVGPCSIHDPVAAVEYGKRLKTLRDDLKGELEIVMRVYFEKPRTTVGWKGLINDPYLNDTYKLNDGLRMGRKLLLDLTDMGLPTASEFLDMITPQYVADLISWGAIGARTTESQVHRELASGLSCPVGFKNGTDGNIKIASDAIRSASASHHFLSVTKYGHSAIVETAGNPDCHIILRGGKEPNYSAAHVSAVKEELATSGLPQKVMIDFSHANSSKQYKRQMLVADDVSEQLAAGEEAIFGVMIESHLVEGRQDLVDGKAATYGQSITDACIGWEDTETVLRQLANAVAARRAK

SEQ ID NO: 1683 - DNA, 1095 bp, Rhodopseudomonas palustris CGA009
  CDS (1)..(1095): transl_table=11
gtgttgaccaccacagacgaccttcgccttcagaaaatcaccgagctgagtacgcctgccgaggtgatgggcgagattccgcgcacactgaccgcaacgcgtaccgttgcggcgagccgcagcgcgattcatgccatcctgaacggagccgacgaccggctcctcgtcgtcgtcggcccctgttcgattcacgatccggccgcagccatggactatgccagccgtctggcggcgctgcgcgagaccctggccgaccggctcgagatcgtgatgcgggtgtatttcgaaaagccgcgcaccacggtgggttggaagggactgatcaacgaccccgatctcgatggcagcttccggatcgacaaggggctacggttggcgcgggaagtactctcggccgtgaacaatctcggcctgccagcggcgaccgaattcctcgatctgatcacgcctcaatacatcgcggatctcgtcgcctggggcgcgatcggcgcgcgcaccaccgagagccagatccaccgcgaactcgcgtcaggcctgtcatgcccaatcggcttcaagaatggcaccgacggcaatgtccggatcgccgcggaggcggtgaagtccgcggcgcagccgcatcatttcatggcggtgaccaagggcgggcgcaatgcgatcgcggccaccactggtaacagcgactgccacgtcatcctgcgcggcggcgtcacaccgaactacgatgccgcaagtgtggaagccgccgcagcggtcctcggcaagatcggcctgccgccgcgcctgatgatcgacgccagccacgccaacagcagcaagcagccggacaaccagccgaaggtaacggccgatatcgggcgtcagatggcggctggcgagagccgcatcatcggcgtgatgatcgagagcaatctggtcgccggtcggcaggatgtggcgccgggtcggccgctgcaatacggccagagcatcaccgacggctgtatcgactgggcgacgaccgagacggtgctgcacgagctagccgatgcggtcgagagccggcgagctgcgcggcacgccgcaagcgctcagcagaaaggtgctgcggcgtga

SEQ ID NO: 1684 - protein, 364 aa, Rhodopseudomonas palustris CGA009
MLTTTDDLRLQKITELSTPAEVMGEIPRTLTATRTVAASRSAIHAILNGADDRLLVVVGPCSIHDPAAAMDYASRLAALRETLADRLEIVMRVYFEKPRTTVGWKGLINDPDLDGSFRIDKGLRLAREVLSAVNNLGLPAATEFLDLITPQYIADLVAWGAIGARTTESQIHRELASGLSCPIGFKNGTDGNVRIAAEAVKSAAQPHHFMAVTKGGRNAIAATTGNSDCHVILRGGVTPNYDAASVEAAAAVLGKIGLPPRLMIDASHANSSKQPDNQPKVTADIGRQMAAGESRIIGVMIESNLVAGRQDVAPGRPLQYGQSITDGCIDWATTETVLHELADAVESRRAARHAASAQQKGAAA

SEQ ID NO: 1685 - DNA, 1068 bp, Geobacter sulfurreducens PCA
  CDS (1)..(1068): transl_table=11
atgattcgcacgagcaacctgaagatcaaaagtattacccccatcattgcaccgggggaattacgccaggtgtttccccagtcggaggaggcggccgagttcgtcaactccagccgcgcccatatcaagaatatcctcaagggcaaggatccgcgcctgatggtggtggtgggcccctgttccattcacgatccgaaatcggctctggagtatgcggggcggctggcacgcctggcggccgaactgtcggatcagctattcatcgtgatgcgggtctacttcgaaaagccccgcactaccgtaggctggaagggactcatcaatgaccccgacatgaacggcacccatcagatatccaaggggctcggcatcgcccggcggctgctgtccgaaataacggaaatgctcctgccggtggcaaccgaaatgcttgaccccatcacgcccgactacctcgcggattgcatctcctggggagccatcggcgctcgtaccaccgagagccagacccaccgcgagatggccagcggcctctcgttccccgtgggattcaagaacggcaccgacggcaatctccagatagccatcgacgccatgaatgcggcactccattcccacagctttctcggcgtcaaccgggaggggcgcacctccatcattcagaccaccggcaaccccgatgtccacatcgtcctgcggggaggcaaaaaaccgaactatttccccgaagacatcagaaagaccgaagagatgctggaaaagggggggctcttccccaccatcatggtcgactgcagccacggcaactcggaaaaacgccacgagaagcagcccgacgtactctcttccgtcgtggaccagattgcggccggcaaccgctccatctccggcgtcatgatcgagagttttctggaagaagggaaccagtcgatccccagagatctctcaaccctcaagtacggcgtatccatcaccgacaagtgcattgactggaagaccaccgaaaccatcctgcgctcggcccacgaccgcctcaaggccgcgggaggcaggcccctgcacgggtaa

SEQ ID NO: 1686 - protein, 355 aa, Geobacter sulfurreducens PCA
MIRTSNLKIKSITPIIAPGELRQVFPQSEEAAEFVNSSRAHIKNILKGKDPRLMVVVGPCSIHDPKSALEYAGRLARLAAELSDQLFIVMRVYFEKPRTTVGWKGLINDPDMNGTHQISKGLGIARRLLSEITEMLLPVATEMLDPITPDYLADCISWGAIGARTTESQTHREMASGLSFPVGFKNGTDGNLQIAIDAMNAALHSHSFLGVNREGRTSIIQTTGNPDVHIVLRGGKKPNYFPEDIRKTEEMLEKGGLFPTIMVDCSHGNSEKRHEKQPDVLSSVVDQIAAGNRSISGVMIESFLEEGNQSIPRDLSTLKYGVSITDKCIDWKTTETILRSAHDRLKAAGGRPLHG

SEQ ID NO: 1687 - DNA, 1056 bp, Acinetobacter sp. ADP1
  CDS (1)..(1056): transl_table=11
atgaacgcgcttaatacattgatccagaaaaatacgacaaaagaaattacacttagcttgccacagcaattaaaagcaaaatattcgcttgctcccatttttttagagcagatcgcagagcatcgtcaaaccattcaaaatatccttgctggcaaagattcacggcttttggtcgtaactggtccatgttcgattcatgatcctgtttctgcgctgcaatacgcacaaaggcttgtcaaattacaagatcaagttaaagatcagatttttttagtgatgcgtgcttatctcgaaaaaccacgtacaacaattggctggaagggttttttatacgatccaaatcttgatggttcatcagatttacagctgggtttagaaaaatctcgcgcattatatttgcaaattattgaaatggggcttccaattgccagtgaaattttaagcccaatggcgactggctattttgatgatttactggcttggggagctattggggcacgtaccagtgaatctcagattcatcgtgaaatttcaagtcatatgccgtttccaattggttttaaaaatggtactgatggttcgattcagatcgcattggatgccattcaatctgcacaaaatgaacatcagtttttagggatgagtcagcttggccagcctgcaattttacaaagttctgggaatccactgccgcatttgatcttgcgtggagcaaatgatggaccaaattatgatattcagtccatttcgaatattagagcaaaacataagggcgaattacctgcgcttgtaattgactgtagtcatggcaatagttcaaaagatccgatgaaacaaccgcaagtacttcgacaaatcattgcagaaagaattgaaagtgatgttcgaggtgtgatgttggaaagccatttggtcgatggaaatcagaagatttcatgcgacataacctatggccaatctgtgactgatggttgccttgggtgggagaagacagagaatttacttttagaaatggctgatcaactcgcacaatgtcctttacgccaatcagcttaa

SEQ ID NO: 1688 - protein, 351 aa, Acinetobacter sp. ADP1
MNALNTLIQKNTTKEITLSLPQQLKAKYSLAPIFLEQIAEHRQTIQNILAGKDSRLLVVTGPCSIHDPVSALQYAQRLVKLQDQVKDQIFLVMRAYLEKPRTTIGWKGFLYDPNLDGSSDLQLGLEKSRALYLQIIEMGLPIASEILSPMATGYFDDLLAWGAIGARTSESQIHREISSHMPFPIGFKNGTDGSIQIALDAIQSAQNEHQFLGMSQLGQPAILQSSGNPLPHLILRGANDGPNYDIQSISNIRAKHKGELPALVIDCSHGNSSKDPMKQPQVLRQIIAERIESDVRGVMLESHLVDGNQKISCDITYGQSVTDGCLGWEKTENLLLEMADQLAQCPLRQSA

SEQ ID NO: 1689 - DNA, 1056 bp, Erwinia carotovora subsp. atroseptica SCRI1043
  CDS (1)..(1056): transl_table=11
atgaattaccaaaatgatgatttaagaattaaagagattaatgaacttttgccgccggttgctttgctagaaaagtttccagccacggagaaggccgcggaaacggtatcgttcgcgcgtacagccatccataaaattcttaacggcaatgatgaccgcctgctggtggtgattggtccttgctcgatccacgacacgaaagccgcgaaagagtatgccgcacgtctgctgacgctgcgtagcgagctgagcgacgatctggaagtggtcatgcgggtttattttgaaaaaccacgcaccacgattggctggaaagggctaatcaacgatccgcacatggataatagtttccagatcaacgatggtctacgcattgcgcgccagctgctgctggaaattaacgataccggtttacctgctgcgggtgaattcctggatatgattactccgcaatacctggcggatctgatgagctggggcgctattggcgcacgtactacagaatctcaggtacaccgtgaattagcgtctggcctgtcatgtcctgtgggctttaaaaacggcactgacggcacgatcaaagtagcgattgatgcgatcaacgcagccagtgcgccgcactgcttcctgtctgtcaccaaatggggacattcggctatcgtgaataccagtggtaacaacgattgccacatcattctgcgtggtggtaaaacgccgaactatagcgctgagcacgttaaagacgtgaaaattggcttggaaaaagcgggcctgacaccgcaggtcatgatcgatttcagccatgcgaacagcagcaagcagttcaaaaagcagatggaagtctgtactgatgtctgtgggcagatcgcacagggtgaaaaagcgattatgggcgtgatggtggaaagccatctggttgaaggcaaccagaatctggaaagcggcgaacctctggtttatggccgtagcgttaccgatgcctgtattagctgggaagacacagaatcactgttgcgccagttagcgtctgctgtacgagagcgccgcaataagtaa

SEQ ID NO: 1690 - protein, 351 aa, Erwinia carotovora subsp. atroseptica SCRI1043
MNYQNDDLRIKEINELLPPVALLEKFPATEKAAETVSFARTAIHKILNGNDDRLLVVIGPCSIHDTKAAKEYAARLLTLRSELSDDLEVVMRVYFEKPRTTIGWKGLINDPHMDNSFQINDGLRIARQLLLEINDTGLPAAGEFLDMITPQYLADLMSWGAIGARTTESQVHRELASGLSCPVGFKNGTDGTIKVAIDAINAASAPHCFLSVTKWGHSAIVNTSGNNDCHIILRGGKTPNYSAEHVKDVKIGLEKAGLTPQVMIDFSHANSSKQFKKQMEVCTDVCGQIAQGEKAIMGVMVESHLVEGNQNLESGEPLVYGRSVTDACISWEDTESLLRQLASAVRERRNK

SEQ ID NO: 1691 - DNA, 1047 bp, Erwinia carotovora subsp. atroseptica SCRI1043
  CDS (1)..(1047): transl_table=11
atgctacaaacagatgaactgcggagcgcgcgcatcgagagtctggttacgccccaaacgctacttgccagactcccgattacccctgacgttgccgaaaatgtcacctcctcacgcaagaaaattgaagccattctcaccggccacgatccccgtttactcgttgtgattggcccctgttcgatccatcacaccgacagcgccttggactatgcgcgccgtctggctgtgctacgcacgcagtatcaggatcggctggaaattgtcatgcgcacttattttgaaaaaccgcgcacggtggtcggttggaaggggcttatctccgatcccgcactcaatggctcgttccaggtgaacgaagggctggagattgctcgccgtctgctgctggacgtcaatcaacttggattgccgaccgcaacggaattcctcgatatggtcaccggccaatatatcgccgatttgattagctggggcgcgattggtgcgagaaccaccgaaagccaaatccaccgcgagatggcgtctgcactatcctgccctgtcggcttcaaaaacgggacggatggcaatacacgcatcgccgtcgatgcgatccgtgccgcacgcgcccaacacatgttcctctcgccggacaaacaaggcttcatgtcggtttacaaaacgcagggcaacccgtttggccacataattatgcgcggcgggaaaaaaccgaactatcacgcggaagatattgccgctgcctgcgcgcatctcagcgagttttctctgcccgaacatctggtgatcgatttcagccatgctaactgtcagaaacagcatcgccgccagctcgatgttgccgatgatatctgccagcaaattcgcgctggttcacgcgccatcgcaggcatcatggcggaaagtttcttaatcgaagggagtcagccggcgatcaacccgctggcgctgacgtatgggcaatccattaccgatccttgcctaagctggcaggacaccgaaacgctgctggcacgtctggcaagcgctgtcgatagccgattctag

SEQ ID NO: 1692 - protein, 348 aa, Erwinia carotovora subsp. atroseptica SCRI1043
MLQTDELRSARIESLVTPQTLLARLPITPDVAENVTSSRKKIEAILTGHDPRLLVVIGPCSIHHTDSALDYARRLAVLRTQYQDRLEIVMRTYFEKPRTVVGWKGLISDPALNGSFQVNEGLEIARRLLLDVNQLGLPTATEFLDMVTGQYIADLISWGAIGARTTESQIHREMASALSCPVGFKNGTDGNTRIAVDAIRAARAQHMFLSPDKQGFMSVYKTQGNPFGHIIMRGGKKPNYHAEDIAAACAHLSEFSLPEHLVIDFSHANCQKQHRRQLDVADDICQQIRAGSRAIAGIMAESFLIEGSQPAINPLALTYGQSITDPCLSWQDTETLLARLASAVDSRF

SEQ ID NO: 1693 - DNA, 1047 bp, Yersinia pseudotuberculosis IP 32953
  CDS (1)..(1047): transl_table=11
atgtacaagacagatgaactgcggaccgctcgcatcgatagcttgattacaccgcagcaactggctgaaaagttaccgatttctgaggttattgcagataacgtgacagcgtcacgtaaacgaatagagaaaatacttattggtgaagacccacgtctactcgtggtgattggcccctgctctattcacgaccttgatgcagccgttgattatgccacccggctcaaggtgctacgagaacgctatcaagaccggctggaaatcgtgatgcgcacctatttcgagaaaccacggactgtagtgggttggaaggggctgatttctgatccggcacttgacggctcatgccaggtgaacttgggtattgaactggcacgtaagctactgttagccgtgaatgaactcgggctgccgaccgctaccgagttcctcgatatggtaacaggccaatatattgccgacctcatcagttggggggcaataggcgcacgtaccaccgaaagccagatccaccgagagatggcctcggcactctcctgccccgtgggtttcaaaaatggtacagatggcaatgtgcgtattgctattgatgccattcgcgccgcacaagccagccatatgttcctttctccggataaaaccggccaaatgacgatttaccaaaccagtggtaacccctatgggcatattattatgcggggtggcaagcaacctaactatgatgcctctgatatcgcagccgcctgtgacagcttgcgggaatttgatttgccagaacatctggtggtggattttagccacggcaattgccagaagatgcatcgccgccagttggatgttgccgaaaatatcgggctacagatccgcgcgggttcaacagcgattgtcggtgttatggctgagagtttcctgattgagggcacacagaagattgttgccggacagcccttaacttatgggcaatccatcactgacccttgcctgaattgggatgatactgaacaactgttaagcctattggcagatgcagtaaacagccggttttaa

SEQ ID NO: 1694 - protein, 348 aa, Yersinia pseudotuberculosis IP 32953
MYKTDELRTARIDSLITPQQLAEKLPISEVIADNVTASRKRIEKILIGEDPRLLVVIGPCSIHDLDAAVDYATRLKVLRERYQDRLEIVMRTYFEKPRTVVGWKGLISDPALDGSCQVNLGIELARKLLLAVNELGLPTATEFLDMVTGQYIADLISWGAIGARTTESQIHREMASALSCPVGFKNGTDGNVRIAIDAIRAAQASHMFLSPDKTGQMTIYQTSGNPYGHIIMRGGKQPNYDASDIAAACDSLREFDLPEHLVVDFSHGNCQKMHRRQLDVAENIGLQIRAGSTAIVGVMAESFLIEGTQKIVAGQPLTYGQSITDPCLNWDDTEQLLSLLADAVNSRF

SEQ ID NO: 1695 - DNA, 1056 bp, Mannheimia succiniciproducens MBEL55E
  CDS (1)..(1056): transl_table=11
atgaaagatagtatccataatgttcatatcattgatgaaaaagtattaattacacctgccgaattaaaacaaaagctcccgctcccaatcgcactgcgtacacaaattgaaacacatcgccgtgaaattgccgatatagtacacaaaaaagacgatcgcttactggtggtcattgggccttgttccgtacatgacaccaaagcggcaatcgattatgccaaacgtctgaaagcgctttcagatgaattaaaggatcagctttatatcgttatgcgggtttattttgaaaaaccgcgtaccacggtaggctggaaagggctcattaatgacccgcgtatcgacggcacatttaatgtggaagaagggctgcatatcggtcgtaaattattgctggatttagctgaaatgggcttgccgttggcaacggaagcgttggatccgatgacgccgcaatatctcgccgatttattcagttggtcggctatcggcgcgcgtactaccgaatcgcaaactcaccgtgaactggcttccggattatctatggcagtcggctttaaaaacggcaccgacggtagtctggctaccgccattaatgccatgaaagccgcctcaatgggacacagttttatcggtattaaccagcaaggacaggtcaatttattacatacggagggcaatcctgacggtcatgttatcctgcgtggcggcaaaaaaccgaattaccaacaggaatttgtcaaccaatgcgaagaagaattagccaaagcaggtctggaaacggcgattatgatcgattgcagccacggtaattcaaataaagattataaacgccagccttcagttgcgaaagatgcggtaaatcaaattgtggcggggaataaatccattatcggtttaatgattgaaagcaacatcaatgcgggtaaccaaagctcggaacaaaaggtttccgagatgaaatacggtgtttccattaccgatgcctgtattgattgggaaacaacggataatttattacgtaaaattgccgccgcattgaaaaatagagcggagtaa

SEQ ID NO: 1696 - protein, 351 aa, Mannheimia succiniciproducens MBEL55E
MKDSIHNVHIIDEKVLITPAELKQKLPLPIALRTQIETHRREIADIVHKKDDRLLVVIGPCSVHDTKAAIDYAKRLKALSDELKDQLYIVMRVYFEKPRTTVGWKGLINDPRIDGTFNVEEGLHIGRKLLLDLAEMGLPLATEALDPMTPQYLADLFSWSAIGARTTESQTHRELASGLSMAVGFKNGTDGSLATAINAMKAASMGHSFIGINQQGQVNLLHTEGNPDGHVILRGGKKPNYQQEFVNQCEEELAKAGLETAIMIDCSHGNSNKDYKRQPSVAKDAVNQIVAGNKSIIGLMIESNINAGNQSSEQKVSEMKYGVSITDACIDWETTDNLLRKIAAALKNRAE

SEQ ID NO: 1697 - DNA, 1155 bp, Mannheimia succiniciproducens MBEL55E
  CDS (1)..(1155): transl_table=11
ttgataagctttaaagtgcggttaaatttttctatttttcggatgatatacagagagttgattatgcctacaaaaaacaaaaataatattcgtgtcgcaaacgacgataccagaattgccaatatcgaacagttgcttccgccggtcgctttattggaaaaatatccggcaagcaatgtcgccgttaaaacggtcagaaacgcccgcaataaagcccatcaaattattcacggtgaagatgatcgcctgttggtgattatcggtccttgttcgattcatgatcctaaagcggcgcttgaatatgccaaccgcatggcgaaaatgcgcgaaaaatataaagataccttagaaatcatcatgcgcgtttattttgaaaaaccgcgtactaccgtgggttggaaagggttaattaacgatccgtatttaaacgatacctatgcattaaacgacggtttacgtattgcgcgcaaactattatcagacatcaatgatctcggtttgccgactgcgggtgaatttttagacatgatcaccccgcaatatgtggctgatttcatgagctggggcgcaattggcgcccgtaccacggaatcgcaggttcatcgtgaactggcttccggtttgtcttgtgcggtgggctttaaaaacggcacaaacggcggtgtgaaaatcgctttagacgctattggtgcggcggaagcttcccaccatttcttatcggttactaaattcgggcattcggcgattgtttcaacaaaaggtaatctggattgccatattattttacgcggcggtgataaaggtacgaattatgatgcggaaaatatcgcaaaagtttgtgctaatatcgagaaaagcggccgtatcggtcatgtaatgatcgacttcagccatgctaacagcagtaaacagttcaaaaaacaagtggaagtttgtcatgatgtcgcaaaacaaatcgcacagggttcaaaccaaattttcggcgtgatggttgaaagccacttggttgaaggtcgtcaggatttagtaaacggaaaagcggaaacttacggtcaaagtatcaccgatgcctgtatcggctgggatgacacggaaatcgtgttacaagaactgtccgatgcggtagccgctcgtcgcaaagtcaacggcaaataa

SEQ ID NO: 1698 - protein, 384 aa, Mannheimia succiniciproducens MBEL55E
MISFKVRLNFSIFRMIYRELIMPTKNKNNIRVANDDTRIANIEQLLPPVALLEKYPASNVAVKTVRNARNKAHQIIHGEDDRLLVIIGPCSIHDPKAALEYANRMAKMREKYKDTLEIIMRVYFEKPRTTVGWKGLINDPYLNDTYALNDGLRIARKLLSDINDLGLPTAGEFLDMITPQYVADFMSWGAIGARTTESQVHRELASGLSCAVGFKNGTNGGVKIALDAIGAAEASHHFLSVTKFGHSAIVSTKGNLDCHIILRGGDKGTNYDAENIAKVCANIEKSGRIGHVMIDFSHANSSKQFKKQVEVCHDVAKQIAQGSNQIFGVMVESHLVEGRQDLVNGKAETYGQSITDACIGWDDTEIVLQELSDAVAARRKVNGK

SEQ ID NO: 1699 - DNA, 1044 bp, Legionella pneumophila subsp. pneumophila str. Philadelphia 1
  CDS (1)..(1044): transl_table=11
atgagttattccatcttaaaaaaactgccaccaatagaaaaaattatccgggaattgccactatcccaccccgcctatctacaaattgcccaagaccgacaagaggtcaaagctattttggaagggcgagataaacgtcttttgatgatagttggtccttgttcagcatggcctaaaaaagcggtattggaatacgctgagcgtttggtacaactcaacagcaaagtaaaacacgctttaaaattaatcatgcgcgtttacattcaaaagccaagaaccaccaaaggctggactggaccggtgaatcaacccgatttattttcaactcctgatattgaggcaggtataaaatatacccgggacatgatgataaaagtcattcaaatggggctccctatcgctgatgaggctcttttcacccataatgccaaaggatttcttgaacttctgtcctgggttgcaataggcgcccgtagttcagaggatcaagagcatcgaatttttgcctccgcccttgactgtgccgtaggattaaaaaaccctacacatggttcactcgctgtcggagtaaacagcctggttgcatcacagcatcctcatgtcgctgtcttcgatggctatgaagtacaaacccatggtaatcatcatgctcatctcgttctgcgtggttcaaaccaagctcccaattactctgtttctcatctggaggaagtcatgtactacatgggcatgcatcagatagtgaacccttctgtcattattgatgttagccatgacaactgtctggtgaatgggaaaaaaaatcatcagctacaaccagagattgcatttaatattctggaaagcatcaaaaacagacctgatttaaaacaactggtcaagggattcatggtagaaagtttcatcaaagaaggtaatcaaaaattagattctatcaatcccgataacattgatttaagcgggttatccgttaccgatccttgcctcagttgggagaagacagaatcgttcctgttggaactggcagagagggaagcgttatga

SEQ ID NO: 1700 - protein, 347 aa, Legionella pneumophila subsp. pneumophila str. Philadelphia 1
MSYSILKKLPPIEKIIRELPLSHPAYLQIAQDRQEVKAILEGRDKRLLMIVGPCSAWPKKAVLEYAERLVQLNSKVKHALKLIMRVYIQKPRTTKGWTGPVNQPDLFSTPDIEAGIKYTRDMMIKVIQMGLPIADEALFTHNAKGFLELLSWVAIGARSSEDQEHRIFASALDCAVGLKNPTHGSLAVGVNSLVASQHPHVAVFDGYEVQTHGNHHAHLVLRGSNQAPNYSVSHLEEVMYYMGMHQIVNPSVIIDVSHDNCLVNGKKNHQLQPEIAFNILESIKNRPDLKQLVKGFMVESFIKEGNQKLDSINPDNIDLSGLSVTDPCLSWEKTESFLLELAEREAL

SEQ ID NO: 1701 - DNA, 1074 bp, Burkholderia mallei ATCC 23344
  CDS (1)..(1074): transl_table=11
atgcccccgcacaataccgacgacgtccgcatccgtgaactgaaggagctgactccgcccgcccacctgatccgcgaattcgcgctcggcgaggcggtgtcggagctcatctacaacgcgcgccaggcgatgcaccggatcctgcacgggatggacgatcgcctgatcgtcatcatcgggccgtgctcgatccacgacacgaaggcggcgctcgaatacgcgggccggctcgtccaggagcgcgagcgcttcgcaagcgaactcgagatcgtaatgcgcgtgtacttcgagaagccgcgcacgacggtcggctggaaggggctcatcaacgatccgcacctggataacagcttcaagatcaacgacggcctgcgcaccgcgcgcgagctgctgctgcagatcaacgagatggggctgcccgccggcaccgaatacctcgacatgatcagcccgcaatacatcgcggacctgatctcgtggggcgcgatcggcgcgcgcacgaccgaatcgcaggtgcaccgcgagctcgcgtcggggctgtcgtgcccggtcggcttcaagaacggcaccgacggcaacgtgaagatcgcggtcgacgcgatcaaggccgcatcgcagccgcaccatttcctgtcggtgacgaagggcgaccattcggcgatcgtgtcgacggccggcaacgaggactgccacgtgatcctgcgcggcggcaaggcgccgaactacgatgccgacagcgtgaacgccgcgtgcgcggacatcggcaaggccggcctcgccgcgcgcctgatgatcgacgcgagccatgcgaacagctcgaagaagcacgagaaccagattccggtatgcgcggacatcggccgccagatcgccgcgggcgacgagcgcatcgtcggcgtgatggtcgagtcgcacctcgtcgaaggccgccaggacctgaaggaaggctgcccgctcacgtacggccagagcatcaccgatgcatgcatcaactgggacgacagcgtgaaggtgctcgaagggctcgccgaagcggtgaaggcgcggcgcgtcgcgcgcggcagcggcaactga

SEQ ID NO: 1702 - protein, 357 aa, Burkholderia mallei ATCC 23344
MPPHNTDDVRIRELKELTPPAHLIREFALGEAVSELIYNARQAMHRILHGMDDRLIVIIGPCSIHDTKAALEYAGRLVQERERFASELEIVMRVYFEKPRTTVGWKGLINDPHLDNSFKINDGLRTARELLLQINEMGLPAGTEYLDMISPQYIADLISWGAIGARTTESQVHRELASGLSCPVGFKNGTDGNVKIAVDAIKAASQPHHFLSVTKGDHSAIVSTAGNEDCHVILRGGKAPNYDADSVNAACADIGKAGLAARLMIDASHANSSKKHENQIPVCADIGRQIAAGDERIVGVMVESHLVEGRQDLKEGCPLTYGQSITDACINWDDSVKVLEGLAEAVKARRVARGSGN

SEQ ID NO: 1703 - DNA, 1119 bp, Burkholderia mallei ATCC 23344
  CDS (1)..(1119): transl_table=11
atgcaaaacatcgacaatccgcaacgcgatcgggaaaccggcttcgccgacgcgacgcaggacacgacgcgcatcgacgacgtgcgcatcggcgcggtgcgcccgctcatctcgcccgcgctgctgcaggacgaactgccggtgccgagcgccgtccaggcgctcgtcgaagcgagccgcgacgcgatcggcgacgtgctgcacggccgcgacgaccgcctgctcgcgatcgtcggcccgtgctcgatccacgatcacgatcaggcgctcgactacgcgcgccggctgaaaagcgccgccgacgcgctgcgcgacgacctgctgatcgtgatgcgcgtgtatttcgagaagccgcgcacgacggtcggctggaagggctacatcaacgatccgcgcctcgacggcagcttccgcatcaacgaagggctgcgcgccgcgcgccggctgctgatcgacatcaacgcgctcggcctgcccgccggcaccgaattcctcgatctgctgagcccgcagtacatcgcggatctgatcgcctggggcgcgatcggcgcgcgcacgaccgagagccagagccaccggcagctcgcgtcggggctgagctgcccgatcggcttcaagaacggcaccgacggcggcgtgcaggtcgcggccgacgcgatcgtcgcggcgcgcgcgagccacgcgttcatgggcatgacgaagatggggatggccgcgattttcgagacgcgcggcaacgacgccgcgcacgtgatcctgcgcggcggcaagcggggcccgaactacgatcgcgcgagcgtcgacgaggcgtgcgcggtgctgcgcgcggcgggccagcgcgagcaggtgatgatcgactgctcgcacgcgaattcgaacaagtcgcacctgcggcaggtcgacgtcgccgaggacctcgcgcgccagttgtcggacggcgagcgacgcatcaccggcgtgatggtcgagagcaacctggaggccggccggcaggacctgaagcccggcgtgccgctgcaatacggcgtgtcgatcaccgacgcgtgcctgagctgggcgcagaccgagcccgtgctcgacacgctcgcgcaggcggtgcggcggcggcgcgccgcctga

SEQ ID NO: 1704 - protein, 372 aa, Burkholderia mallei ATCC 23344
MQNIDNPQRDRETGFADATQDTTRIDDVRIGAVRPLISPALLQDELPVPSAVQALVEASRDAIGDVLHGRDDRLLAIVGPCSIHDHDQALDYARRLKSAADALRDDLLIVMRVYFEKPRTTVGWKGYINDPRLDGSFRINEGLRAARRLLIDINALGLPAGTEFLDLLSPQYIADLIAWGAIGARTTESQSHRQLASGLSCPIGFKNGTDGGVQVAADAIVAARASHAFMGMTKMGMAAIFETRGNDAAHVILRGGKRGPNYDRASVDEACAVLRAAGQREQVMIDCSHANSNKSHLRQVDVAEDLARQLSDGERRITGVMVESNLEAGRQDLKPGVPLQYGVSITDACLSWAQTEPVLDTLAQAVRRRRAA

SEQ ID NO: 1705 - DNA, 1074 bp, Burkholderia pseudomallei K96243
  CDS (1)..(1074): transl_table=11
atgcccccgcacaataccgacgacgtccgcatccgtgaactgaaggagctgactccgcccgcccacctgatccgcgaattcgcgctcggcgaggcggtgtcggagctcatctacaacgcgcgccaggcgatgcaccggatcctgcacgggatggacgatcgcctgatcgtcatcatcgggccgtgctcgatccacgacacgaaggcggcgctcgaatacgcgggccggctcgtccaggagcgcgagcgcttcgcaagcgagctcgagatcgtgatgcgcgtgtacttcgagaagccgcgcacgacggtcggctggaaggggctcatcaacgatccgcacctggataacagcttcaagatcaacgacggcctgcgcaccgcgcgcgagctgctgctgcagatcaacgagatggggctgcccgccggcaccgaatacctcgacatgatcagcccgcagtacatcgcggacctgatctcgtggggcgcgatcggcgcgcgcacgaccgaatcgcaggtgcaccgcgagctcgcgtcggggctgtcgtgcccggtcggcttcaagaacggcaccgacggcaacgtgaagatcgcggtcgacgcgatcaaggccgcatcgcagccgcaccatttcctgtcggtgacgaagggcggccattcggcgatcgtgtcgacggccggcaacgaggactgccacgtgatcctgcgcggcggcaaggcgccgaactacgatgccgacagcgtgaacgccgcgtgcgcggacatcggcaaggccggcctcgccgcgcgcctgatgatcgacgcgagccatgcgaacagctcgaagaagcacgagaaccagattccggtatgcgcggacatcggccgccagatcgccgcgggcgacgagcgcatcgtcggcgtgatggtcgagtcgcacctcgtcgaaggccgccaggacctgaaggaaggctgcccgctcacgtacggccagagcatcaccgatgcatgcatcaactgggacgacagcgtgaaggtgctcgaagggctcgccgaagcggtgaaggcgcggcgcgtcgcgcgcggcagcggcaactga

SEQ ID NO: 1706 - protein, 357 aa, Burkholderia pseudomallei K96243
MPPHNTDDVRIRELKELTPPAHLIREFALGEAVSELIYNARQAMHRILHGMDDRLIVIIGPCSIHDTKAALEYAGRLVQERERFASELEIVMRVYFEKPRTTVGWKGLINDPHLDNSFKINDGLRTARELLLQINEMGLPAGTEYLDMISPQYIADLISWGAIGARTTESQVHRELASGLSCPVGFKNGTDGNVKIAVDAIKAASQPHHFLSVTKGGHSAIVSTAGNEDCHVILRGGKAPNYDADSVNAACADIGKAGLAARLMIDASHANSSKKHENQIPVCADIGRQIAAGDERIVGVMVESHLVEGRQDLKEGCPLTYGQSITDACINWDDSVKVLEGLAEAVKARRVARGSGN

SEQ ID NO: 1707 - DNA, 1092 bp, Methylococcus capsulatus str. Bath
  CDS (1)..(1092): transl_table=11
atgcccagcgtgtacaacaccgacgatcttcgcatctgcgagatcaaggaagtcattccgcccgtccaggttcatgaggaattcccgatcacggaccgggccgcactcacgacactgaccgcccgccgagggattcacgcaatcctttccaaggaggacgaccgcctgctggtggtgatcgggccctgttcgatccatgaccccaaggccgcgctcgaatacggggagcggctgctgccactccgccagaaactggcgagacatctggaaatcgtgatgcgggtctatttcgagaagccgcgaacgaccgtcggctggaagggcctgatcaatgatcccgatctggacgagagtttcaacatcaacaaaggcttgcgcctcgcccgcaagctgttgctcgatctgaacgaactgggcatgcccgcggccaccgagtacctcgatctcatcaccccgcagtatgtctccgacctgatcgcttggggcgccatcggtgctcgtaccacggagagccagtctcaccgtgaactggcatcggggctgtcatgtccggttggattcaagaacgccaccgacggcacgatcaaggttgctgtcgacgccataggtgcggcacggcggccacatcatttcctgtctttgaccaaggccggtcattcggcgatcttctccacgaccggtaacgccgactgtcacatcatccttcgtggcggagcccggccgaattacgacgcggccagcgtcgaagcggcggccagggcgctggaagccgtcggcctgccgcccaacatcatggtggactgcagccatgccaacagcatgaaggattacctgaagcagctgcgggtggccgaggacgtggccgaacagatagacggcggcgacaggcggatcatcggcttgatggtggaaagtcacctcaagccgggcaatcagaaactccacaagggcatggttcccgaatacggcgtcagcatcaccgatgcctgcatcggctgggatgacagcgtggccgtgctggaacggctcgccgccgcggtggagagccggcgcggccggtcggcaggcatccggaacgtgcggggggcctga

SEQ ID NO: 1708 - protein, 363 aa, Methylococcus capsulatus str. Bath
MPSVYNTDDLRICEIKEVIPPVQVHEEFPITDRAALTTLTARRGIHAILSKEDDRLLVVIGPCSIHDPKAALEYGERLLPLRQKLARHLEIVMRVYFEKPRTTVGWKGLINDPDLDESFNINKGLRLARKLLLDLNELGMPAATEYLDLITPQYVSDLIAWGAIGARTTESQSHRELASGLSCPVGFKNATDGTIKVAVDAIGAARRPHHFLSLTKAGHSAIFSTTGNADCHIILRGGARPNYDAASVEAAARALEAVGLPPNIMVDCSHANSMKDYLKQLRVAEDVAEQIDGGDRRIIGLMVESHLKPGNQKLHKGMVPEYGVSITDACIGWDDSVAVLERLAAAVESRRGRSAGIRNVRGA

SEQ ID NO: 1709 - DNA, 1083 bp, Nocardia farcinica IFM 10152
  CDS (1)..(1083): transl_table=11
atgactaccgcagccgatgtcgacgcgcggcattccgatctcgacgaccagcgcaccctgtcggtgagcccgttgcgctcgcccgccgaggtgcgcatggtgcacccgatcaccgacgacctcgccgataccgtccgggcgggccgtaaggccaccgtcgaggtgctcgacggcaccgacgaccgcctgatggtgatcgtgggcccgtgctcggtgcacgaccccgccgccgccctcgactacgcccggcgcctggccgccaaggccgccgaactcgacgaccgcctgcacgtggtgatgcgggtgtacttcgagaagccgcgcaccagcctgggctggaagggcctggtcaacgatccgcacctggacggctccttcgacgtcaacaccggtctgggcatcggccgcaagttgctggtcgacatcaccgcgctcggcctgccggtcgcgtgcgagttcctcgatccgatcaccccgcagtacatcgccgatctggtgtcctacggcgcgatcggcgcgcgcaccgcggccagccaggtgcaccgccagctcagcagcgcgctgtccatgccggtcggcatcaagaacggcaccgacggtgacgtccaggtcgcggtcgacggtgtgcgggcggccgcggccagccacgtcttccccggtaccgatctcgacgggcgcgccgcgctgatccgcaccaccggcaacccggactgccacgtcatcctgcgcggcggcagcaacggcaccaactacgacgcggcctcggtggccgaggcgtgcctgcggctggagaaggccgggctggcgcgccgggtcgtcgtggacgccagccacggcaacagcaacaaggaccacaacaagcaggtcgacgtggtggccgacatcgccgagcggatcgcgggcggtgagcgcgaggtcgtcggcgtgatgctggagagcttcctggtggcgggccgccaggacctcaccctcggccggtcggcggatctggtctacggccagtcgatcaccgacgcctgcctggactgggagaccaccgccgcacagctcgaccgcctggccgaggccgtcgcggcgcgctag

SEQ ID NO: 1710 - protein, 360 aa, Nocardia farcinica IFM 10152
MTTAADVDARHSDLDDQRTLSVSPLRSPAEVRMVHPITDDLADTVRAGRKATVEVLDGTDDRLMVIVGPCSVHDPAAALDYARRLAAKAAELDDRLHVVMRVYFEKPRTSLGWKGLVNDPHLDGSFDVNTGLGIGRKLLVDITALGLPVACEFLDPITPQYIADLVSYGAIGARTAASQVHRQLSSALSMPVGIKNGTDGDVQVAVDGVRAAAASHVFPGTDLDGRAALIRTTGNPDCHVILRGGSNGTNYDAASVAEACLRLEKAGLARRVVVDASHGNSNKDHNKQVDVVADIAERIAGGEREVVGVMLESFLVAGRQDLTLGRSADLVYGQSITDACLDWETTAAQLDRLAEAVAAR

SEQ ID NO: 1711 - DNA, 1044 bp, Legionella pneumophila str. Paris
  CDS (1)..(1044): transl_table=11
atgagttattccatcttaaaaaagctgccaccaatagaaaaaatcatccgggaattgccactatcccaccccgcctatctacaaattgctcaagaccggcaagagatcaaagctattttggaagggcgagataaacgtcttttgatgatagttggtccttgctcagcatggcctaaaaaagcggtattggaatacgctgagcgtttggtacaactcaacagcaaagtaaaacacgctttaaaattaatcatgcgcgtttacattcaaaagccaagaaccaccaaaggctggactggaccggtgaatcaacccgatttattttcaactcctgatattgaggcaggtataaaatatacccgggacatgatgataaaagtcattcaaatggggctccctatcgctgatgaggctcttttcacccataatgccaaaggatttcttgaacttctgtcctgggttgcaataggcgcccgtagttcagaggatcaagagcatcgaatttttgcctccgcccttgactgtgccgtaggattaaaaaaccctacacatggttcactcgctgtcggagtaaatagcctggttgcatcacagcatcctcatgttgctgtcttcgatggctatgaagtgcaaacccatggtaatcatcatgctcatctcgttctgcgtggttcaaaccaagctcccaattactccgtttctcatctggaggaagtcatgtactacatgggcatgcatcagatagtgaacccttctgtcattattgatgttagccatgacaactgtctggtgaatgggaaaaaaaatcatcagctacaaccagagattgcatttaatattctggaaagcatcaaaaatagacctgatttaaaacaactggtcaaaggattcatggtagaaagtttcatcaaagaaggtaatcaaaaattagattctatcaatcccgataacattgatttaagcgggttatccgttaccgatccttgcctcagttgggagaagacagaatcgttcctgttggaactggcggagagggaagcattatga

SEQ ID NO: 1712 - protein, 347 aa, Legionella pneumophila str. Paris
MSYSILKKLPPIEKIIRELPLSHPAYLQIAQDRQEIKAILEGRDKRLLMIVGPCSAWPKKAVLEYAERLVQLNSKVKHALKLIMRVYIQKPRTTKGWTGPVNQPDLFSTPDIEAGIKYTRDMMIKVIQMGLPIADEALFTHNAKGFLELLSWVAIGARSSEDQEHRIFASALDCAVGLKNPTHGSLAVGVNSLVASQHPHVAVFDGYEVQTHGNHHAHLVLRGSNQAPNYSVSHLEEVMYYMGMHQIVNPSVIIDVSHDNCLVNGKKNHQLQPEIAFNILESIKNRPDLKQLVKGFMVESFIKEGNQKLDSINPDNIDLSGLSVTDPCLSWEKTESFLLELAEREAL

SEQ ID NO: 1713 - DNA, 1083 bp, Azoarcus sp. EbN1
  CDS (1)..(1083): transl_table=11
atgtccgcctcagtcaagattcacatcgatgatgtccgcatccaggagatcaaggaactgattccgcccgcccacgtgctgcgcgaatttccggcgacgccgaaggccgccgaagtggcgtacgaggcgaggcaggggatccaccgcatcctgttcggcgcggacgaccgcctgctggtcgtcatcggaccatgctcgatccacgatctggacgcggcgctcgaatacgcgcgcaagctcaaggccgaggcggtgcgccacaaggacgatctgctcgtcgtgatgcgggtgtatttcgagaaaccgcgcacgacggtcggctggaaaggcctgatcaacgatccctacctcgacaacagcttccgcatcaacgaaggcgtgcggctcgcgcgcaagctgctgtgggagatcagcgagatggggctggcggcgggcacggagttcctcgacatgatcacgccgcagtacatcgccgacctgatcgcgtggggcgcgatcggcgcccgcaccaccgaaagccaggtgcaccgcgaactcgcgtccgggctgtcgtgcccggtcggcttcaagaacggcaccgacggcaatgtcaggatcgccgtcgacgcgatcaaggctgcgcagtcgccgcatcatttcctctccgtcaccaaggcggggcattcggcgatcgtcacgacgctcggcaacgaggactgccacgtcatcctgcgcggcggcaagagcaccaactacgatgccgccagcgtcgatgcggcttgcaaggagctcgctgcttcgggcgtgccgggcaaggtgatgatcgatttctcgcatgccaacagccgcaagcaacatcgcctgcagatcgaggtcgcgcgcgatgtcggcgcgcagatggcgaacggcgacgaccgcctcatcggcgtgatggtcgagtcgcacctgaaggaaggccgccaggacctgatcccgggcaaggagctcgagtacggcaagagcatcaccgacgcgtgcctgggctgggaagacagcgtcaccgtgctcgaaatccttgccgaggcggtacgccagcggcgcgtcaaacgcgccgacctggagtga

SEQ ID NO: 1714 - protein, 360 aa, Azoarcus sp. EbN1
MSASVKIHIDDVRIQEIKELIPPAHVLREFPATPKAAEVAYEARQGIHRILFGADDRLLVVIGPCSIHDLDAALEYARKLKAEAVRHKDDLLVVMRVYFEKPRTTVGWKGLINDPYLDNSFRINEGVRLARKLLWEISEMGLAAGTEFLDMITPQYIADLIAWGAIGARTTESQVHRELASGLSCPVGFKNGTDGNVRIAVDAIKAAQSPHHFLSVTKAGHSAIVTTLGNEDCHVILRGGKSTNYDAASVDAACKELAASGVPGKVMIDFSHANSRKQHRLQIEVARDVGAQMANGDDRLIGVMVESHLKEGRQDLIPGKELEYGKSITDACLGWEDSVTVLEILAEAVRQRRVKRADLE

SEQ ID NO: 1715 - DNA, 1113 bp, Francisella tularensis subsp. tularensis SCHU S4
  CDS (1)..(1113): transl_table=11
atgataggtgataaaaactttgataaagtttctaatataaatataaaaaaggaaaaagtattgattcctgcagaagttctaatccaagatatacctcttttaaagacttcttttgaaactgtaagaaaatctcgtaaagaaatagctaatatcatccatggaaatgatgatagagttgctgtagttgtaggaccttgctctattcatgatcctgctgctgcaattgagtatgctactaaactcaaagagcaagttaagaaatttcataaagatatacttattataatgagggtatattttgaaaaaccacgtactacgattggttggaaaggatttatcaatgaccctgatttagataactcatataatatcaacaaaggtttacgtcttgcgcgtaatttattatcagatttaactaatatgggactaccgtgtgcaactgaatttctagatgtaattactccacaatactttgctgagctaatcacttggggagcaattggcgctagaactgttgaaagtcaggtacatagagaattagcttctggtctttctgcatcgattggttttaaaaatgccactaatggtgatgtccaagtagctgtagatgctgtaaaatctgccacttatccccatcacttcttaagtacgacaaaatctggttctacagcaatatttgcaactaaaggtaaccaaaatggtcatgtaattcttcgtggtggtgcctctggtcctaactttagtaaagagcatgttgatgactgtattgctaaactaaaaaaagctgatattaatactaaggtaatgattgactgtagtcacggcaatagtcaaaaagatcattctaagcaaattagcgtattagctgatatttgtgagcaaataaagcacagtaacgatatttttggggtaatgatagaaagtaatcttgtggctggtaatcaagatatcaataaaaaacctctcacttatgggcaaagtgtcacagataaatgcgttgactttgaagaaacagttaagatgctagaaatgttagctgaagcagtccaggtaagacgtggttctcaaactaaacaacaagttaaagaagagtcacaattttctttactgtaa

SEQ ID NO: 1716 - protein, 370 aa, Francisella tularensis subsp. tularensis SCHU S4
MIGDKNFDKVSNINIKKEKVLIPAEVLIQDIPLLKTSFETVRKSRKEIANIIHGNDDRVAVVVGPCSIHDPAAAIEYATKLKEQVKKFHKDILIIMRVYFEKPRTTIGWKGFINDPDLDNSYNINKGLRLARNLLSDLTNMGLPCATEFLDVITPQYFAELITWGAIGARTVESQVHRELASGLSASIGFKNATNGDVQVAVDAVKSATYPHHFLSTTKSGSTAIFATKGNQNGHVILRGGASGPNFSKEHVDDCIAKLKKADINTKVMIDCSHGNSQKDHSKQISVLADICEQIKHSNDIFGVMIESNLVAGNQDINKKPLTYGQSVTDKCVDFEETVKMLEMLAEAVQVRRGSQTKQQVKEESQFSLL

SEQ ID NO: 1717 - DNA, 1056 bp, Neisseria gonorrhoeae FA 1090
  CDS (1)..(1056): transl_table=11
atgacacaccattaccccacagacgatattaagattaaagaagttaaagagttgttgccgccgattgcccatctttacgagctgccgatttccaaagaggcttcgggcttggttcaccgcacccgtcaggaaatttccgatttggttcacggcagggacaggcggctgttggtcattatcgggccgtgttcgattcacgatccgaaagcggcgttggaatatgcggaacgtctgttgaaactccgcaagcggtatgaaaacgagcttttgatcgtgatgcgcgtttatttcgagaagccgagaacgacggtgggttggaaaggtttgattaacgacccgcatttggacggtacgttcgacatcaatttcggtttgcgtcaggcgcgcagtctgttgttgtccctgaataatatgggcatgcctgcctctaccgaatttttggatatgattacaccccagtattatgccgacctgatttcttggggggcaatcggcgcgcggacgaccgaaagccaagtccaccgcgaattggcaagcggtctgtcctgccccgtcggctttaaaaacggtacggacggcaatttgaagattgcgatcgacgcaatcggtgcggcgagccattcgcatcatttcttgtctgtaaccaaggccgggcattccgccattgtccataccggcggcaatcccgactgtcatgtcattttgcgcggcggaaaagagccgaattatgatgcgggacacgtcagcgaggcggtggaacaactgcgtgcggcaggggtaaccgacaagctgatgatcgattgcagccacgccaacagccgcaaggattacacccggcagatggaagtggcacaagacattgccgaccaattggaacaggacggcggcaatatcatgggcgtgatggtggaaagccatttggtcgaaggcaggcaggacaagccggaagtgtacggcaagagcattaccgatgcgtgtatcggttggggcgcgactgaagaattgttggcattgttggcgggtgcgaacacaaaacgtatggcgcgcgcaggttga

SEQ ID NO: 1718 - protein, 351 aa, Neisseria gonorrhoeae FA 1090
MTHHYPTDDIKIKEVKELLPPIAHLYELPISKEASGLVHRTRQEISDLVHGRDRRLLVIIGPCSIHDPKAALEYAERLLKLRKRYENELLIVMRVYFEKPRTTVGWKGLINDPHLDGTFDINFGLRQARSLLLSLNNMGMPASTEFLDMITPQYYADLISWGAIGARTTESQVHRELASGLSCPVGFKNGTDGNLKIAIDAIGAASHSHHFLSVTKAGHSAIVHTGGNPDCHVILRGGKEPNYDAGHVSEAVEQLRAAGVTDKLMIDCSHANSRKDYTRQMEVAQDIADQLEQDGGNIMGVMVESHLVEGRQDKPEVYGKSITDACIGWGATEELLALLAGANTKRMARAG

SEQ ID NO: 1719 - DNA, 1089 bp, Haemophilus influenzae 86-028NP
  CDS (1)..(1089): transl_table=11
atggctaaagagaaaattgaaattgtcgtggcaaacgacgatacgcgaattgaaaaagtcgatcaggtgttaccacccattgccttattagaaaaatacccagcaagtgaacaggctgcggcgttagtgaagcaaactcgtcatgaggcacataatattattcatggtaaagatgatcgtttattagtcgtgattgggccttgctctattcatgatccgaaagttgccattgaatatgcgactcgtttaaaaccattacgtgaaaaatacaaagatagccttgaaattattatgcgtgtgtattttgagaaaccgcgtacaacggtgggttggaaaggtttaattaatgatccatatttgaatgatacttatcgtttaaatgatgggttacgcattgcacggaaattactttcagatattaatgatcttggtgtgcctgcagcgggcgagtttttagatatgattacacctcagtatttggcagattttatgagctggggggcgattggggctagaacaacagaatcacaagttcatcgtgagttggcttcaggtttatcttgtgctgttgggtttaaaaatgccactaatggtggtgtgaaagtcgctttagatgcaattggtgcggcggaagctccccactatttcttatctgtcactaaatttggtcattctgcaattgtttctacaaaagggaatgaagattgccatattattttacgaggtggagataaaggtcctaactatagtgctgaagatgtagaaaaagtttgtgctgatattgaaaaaacagggcgtattccacacgttatggttgattttagccatgcaaacagcagtaaacaatataaaaagcaaatggatgtttgccaagacgtatgtaatcagattgcatttggttctaaacaaatctttggcgtaatggtggaaagccatttagtggaaggtcgtcaagatttagttgatggcaaagcgcagacttatggacaaagtattacggatgcgtgcattggatgggaagattctgaaagattattgcaacaactttctgatgcagttattgctagacgtaaagcgacgagtaattaa

SEQ ID NO: 1720 - protein, 362 aa, Haemophilus influenzae 86-028NP
MAKEKIEIVVANDDTRIEKVDQVLPPIALLEKYPASEQAAALVKQTRHEAHNIIHGKDDRLLVVIGPCSIHDPKVAIEYATRLKPLREKYKDSLEIIMRVYFEKPRTTVGWKGLINDPYLNDTYRLNDGLRIARKLLSDINDLGVPAAGEFLDMITPQYLADFMSWGAIGARTTESQVHRELASGLSCAVGFKNATNGGVKVALDAIGAAEAPHYFLSVTKFGHSAIVSTKGNEDCHIILRGGDKGPNYSAEDVEKVCADIEKTGRIPHVMVDFSHANSSKQYKKQMDVCQDVCNQIAFGSKQIFGVMVESHLVEGRQDLVDGKAQTYGQSITDACIGWEDSERLLQQLSDAVIARRKATSN

SEQ ID NO: 1721 - DNA, 1059 bp, Colwellia psychrerythraea 34H
  CDS (1)..(1059): transl_table=11
atgtatcaaactgacgatgtacgcatcaataaaattaaagatcttttacctccaattgctttattggaacgatttcctgcgtcagagcaagcaactaaatcagtcgttgctggcagaactgctattcacaatattctcaaaggtaaagatgatcgcttattagtggttattggaccttgttctatacatgatcctgaagcggcacttgaatacgggcaacgcttagtaaagcttcgtgaagagtacaaagatagtcttgagattgtcatgcgtgtttattttgaaaaaccacgtactaccgttggttggaagggcttaattaatgacccttatatggataacagctttaaattgaatgatggtttacgtttaggtcgtaagttactagtagaactaaatgaccttggtttacctacggcgggcgagttcttagatatgatcacaccgcaatatatggcagatcttatgtgttggggagccattggcgctcgtactactgaatcacaagttcaccgtgaattagcatcaggactttcatgtccagttggatttaaaaacggaactgacggtaccattaaaattgcgattgatgccataggctcagcttctgcatcacatcactttttatcagttacaaaatttggccatgctgccattgttgaaacgacaggtaatagtgattgtcatatcattttacgtggtgggagaacgactaattttgatgctgatagtgttaaagcggtaaccgagcaattaactacctctgatttaaacactaaggtaatgattgattttagccatgctaactcgagcaaaaaatttgaaaatcaaatgatagtctctactgatgtcagtgagcaaattagccaaggcaatgaaaatatctttggtgttatggttgaaagtcatttagttgaaggtaatcaaagtctagttaaaggtagagcagccgtgtatggacaaagtattactgatgcttgtattggctgggatgatactgaaaaattattaagccagttaaatggagccgttgttagtcgccgaagcgttatagactaa

SEQ ID NO: 1722 - protein, 352 aa, Colwellia psychrerythraea 34H
MYQTDDVRINKIKDLLPPIALLERFPASEQATKSVVAGRTAIHNILKGKDDRLLVVIGPCSIHDPEAALEYGQRLVKLREEYKDSLEIVMRVYFEKPRTTVGWKGLINDPYMDNSFKLNDGLRLGRKLLVELNDLGLPTAGEFLDMITPQYMADLMCWGAIGARTTESQVHRELASGLSCPVGFKNGTDGTIKIAIDAIGSASASHHFLSVTKFGHAAIVETTGNSDCHIILRGGRTTNFDADSVKAVTEQLTTSDLNTKVMIDFSHANSSKKFENQMIVSTDVSEQISQGNENIFGVMVESHLVEGNQSLVKGRAAVYGQSITDACIGWDDTEKLLSQLNGAVVSRRSVID

SEQ ID NO: 1723 - DNA, 1053 bp, Colwellia psychrerythraea 34H
  CDS (1)..(1053): transl_table=11
atgaccattaaaactgatgaattacgcaccacgctaattgaaaatttagtctcccctgcacagcttgctgaagaaattcctttaagtacggcaactgcagattttattatgcaaagccgcaaagaaattgaagcggtcattagtggtgaagacaagcgtttattagtcattatcggcccttgctctattcacgacaccacagctgcaattgattacgctaaaaaactcaccgtattacgtgacaagtataaaaatgaattactcattgttatgcgcgtttactttgaaaaaccacgtactaccgttggttggaaaggtttaattagcgatcctgatttagacaagtcatttcatgttgccaaagggttaaaacttgcccgtaacttattagtcgaaattaatgacttaggactacctgcaggtactgaatttttagatatggttaccggtcagtatatttctgatttaatcagctggggcgctattggtgcgcgtacaactgaaagccaagttcaccgagaattagcttctgcgctgtcttgcccagttggctttaaaaatggtactgacggtaatgttaaaattgcccttgacgctattcaagcttcaagcgttccacacgtattatattctccggataaaagtggtcaaatgtgtatttaccaaacccatggtaatccatttgctcatgtaattttacgtggtggcaaagtacctaattatcatgctgctgatattaaagatactcgccagagacttgaaaaagcatcattaccgcaaagtattatggttgattgtagccatggtaatagctataaagatcacaataaacaaattgatgttgcgcgctctattgctgatcagataagccaaggtgaagacagcctttttggtgtcatgattgaaagctttattgaagaaggtaatcaagcagtaaaggctggtacgccgttaacctacggaaaaagtattactgatgcttgtattgatttaactgtcagtgacactatattagcgttattggctgattcggtgaaaacacgtttcgaataa

SEQ ID NO: 1724 - protein, 350 aa, Colwellia psychrerythraea 34H
MTIKTDELRTTLIENLVSPAQLAEEIPLSTATADFIMQSRKEIEAVISGEDKRLLVIIGPCSIHDTTAAIDYAKKLTVLRDKYKNELLIVMRVYFEKPRTTVGWKGLISDPDLDKSFHVAKGLKLARNLLVEINDLGLPAGTEFLDMVTGQYISDLISWGAIGARTTESQVHRELASALSCPVGFKNGTDGNVKIALDAIQASSVPHVLYSPDKSGQMCIYQTHGNPFAHVILRGGKVPNYHAADIKDTRQRLEKASLPQSIMVDCSHGNSYKDHNKQIDVARSIADQISQGEDSLFGVMIESFIEEGNQAVKAGTPLTYGKSITDACIDLTVSDTILALLADSVKTRFE

SEQ ID NO: 1725 - DNA, 1080 bp, Dechloromonas aromatica RCB
  CDS (1)..(1080): transl_table=11
atgatgccgcaaagtaaaccgaataccgacgaccttcgcatcaaggaaatcaaggagctggtgccgccagcccacgttttccgcgagtatccggtgtccactcgggcggcgcaaacgacctatgtcgcccgccaggcaattcaccgcgtgctgcatggcgccgacgaccgcctgctggtcgtcatcggcccctgctcgatccatgactacgaactggccatggattacgccaagaaactggccaaggaagccgagaaatacgccgaggacctgatcgtcgtcatgcgcgtctattttgaaaagccgcggaccacagttggctggaaaggcctgatcaacgatccgcgcatggacaacaccttccgcatcaacgaaggcctgcgtctggcccgccgcatcctgcttgaggtcaatgagctggacctgccttgcgccaccgagttcctcgacaccatcacgccgcaatacaccgccgacctgatcgcctggggcgccatcggtgcgcgcaccaccgagtcgcaggtgcaccgcgagctggcttccggcctttcctgcccggtcggtttcaagaacggcaccgacggcaacatgcgcattgccgtggatgcgatccgctcggccaactcgccacaccatttcctgtcggtgaccaagtccggccacaccgccatcgtgtcgacgatgggcaacgaggactgccacgtcatcctgcgcggcggcaaggaaccgaactacgacgcggccagcgtcgatgccgcatgcaccgaaatcgctaaatccggcctcgccgcccggctgatggtcgatttctcgcacggcaacagccgcaagcaatacaagctgcaaatggaagtctgcgacagcgtggccgagcagatcgccggtggcgaagaccgcattgttggcgtcatggtcgaatcgcacctcgtcgaaggccgccaggacatctcgccggacaagccgctgacctacggccagagcgtgactgatgcctgtatcaactgggatgacagcctgaaagtgctcgagaaactggcagctgccgtcagggcaagacgagtcgccgaagcgtcagagtaa

SEQ ID NO: 1726 - protein, 359 aa, Dechloromonas aromatica RCB
MMPQSKPNTDDLRIKEIKELVPPAHVFREYPVSTRAAQTTYVARQAIHRVLHGADDRLLVVIGPCSIHDYELAMDYAKKLAKEAEKYAEDLIVVMRVYFEKPRTTVGWKGLINDPRMDNTFRINEGLRLARRILLEVNELDLPCATEFLDTITPQYTADLIAWGAIGARTTESQVHRELASGLSCPVGFKNGTDGNMRIAVDAIRSANSPHHFLSVTKSGHTAIVSTMGNEDCHVILRGGKEPNYDAASVDAACTEIAKSGLAARLMVDFSHGNSRKQYKLQMEVCDSVAEQIAGGEDRIVGVMVESHLVEGRQDISPDKPLTYGQSVTDACINWDDSLKVLEKLAAAVRARRVAEASE

SEQ ID NO: 1727 - DNA, 1062 bp, Thermobifida fusca YX
  CDS (1)..(1062): transl_table=11
atgtcgaggactaacgacacacgtgtcgtcagctaccagccactcgtcgctccccacgacctcctggccgaactgccgatgggccccgagcgcacggcactagtcgaggaagccagagccgaggtgaaaaaagtactcgatggggaggacgaccggctgctggttgtcgtgggaccgtgctccgtgcacgaccccgagtccgccctggactatgcacgccgtctcaaggcgctgatcccgtccgtctcctctgaattgtgcgtggtcatgcgggtgtacttcgaaaagccgcgcaccaccctgggatggaagggcctgatcaacgaccccgggctcgacgggagcttcgacgtccaccggggcctgcggaccgcacgcaaactgctgctcgacatcggctccctgggcgtgcccgccggcaccgaattcctcgacccgatcaccccgcagtacatcgcggacgcggtgacctggggagcgatcggtgcgcgcaccacggaaagccaggtgcaccgccagctcagcagcggcctcagcatgcccgtgggcttcaagaacggcaccgacggcaacgtccaggtcgccgtggacgcctgccgggccgcagccagctcgcacaccttcttcggcgtggacccgagcggcagcggcgcggtcgtgtccacctccggcaacccggactgccacgtcatcctgcggggcggccgctccggccccaactacgacgcggacagtgtcgccgccgcgctcgacaccatcgaggccgcgggcctgccgcgccgcctcatgatcgacgccagccacgccaacagcggcaaggaccacctgcgccagccgggcgtggcccaggccatcgccgcccaagtcgcggaaggccagaccggaatcatcggggtcatgctggagagcttcctggtgcccggcgcccagaagctcggcgacccggccaagctcacctacggccagagcattacggacaagtgcatgggttgggagaccaccgaggaggtcctggcccatctggccgacgccgtgcgcagccgccgcaaggccacgtcctaa

SEQ ID NO: 1728 - protein, 353 aa, Thermobifida fusca YX
MSRTNDTRVVSYQPLVAPHDLLAELPMGPERTALVEEARAEVKKVLDGEDDRLLVVVGPCSVHDPESALDYARRLKALIPSVSSELCVVMRVYFEKPRTTLGWKGLINDPGLDGSFDVHRGLRTARKLLLDIGSLGVPAGTEFLDPITPQYIADAVTWGAIGARTTESQVHRQLSSGLSMPVGFKNGTDGNVQVAVDACRAAASSHTFFGVDPSGSGAVVSTSGNPDCHVILRGGRSGPNYDADSVAAALDTIEAAGLPRRLMIDASHANSGKDHLRQPGVAQAIAAQVAEGQTGIIGVMLESFLVPGAQKLGDPAKLTYGQSITDKCMGWETTEEVLAHLADAVRSRRKATS

SEQ ID NO: 1729 - DNA, 1071 bp, Prochlorococcus marinus str. NATL2A
  CDS (1)..(1071): transl_table=11
atgtccacctcatcatatttttcaatggtggatagcacctccgaccttcatgtggtcgagactcgtccattaatgtcaccagcattaattcatagagatttgcctttagataaggcatcctctggagttgtctctactactcgcaataagattcaatcaattcttcatggtaatgatccaagaattttggtcattgttggaccgtgttcggttcatgatgttgatgcggccattgaatatgcaaatcgtttagccccattgagggagagatatagtcaaaagcttgagattgttatgcgtgtttactttgagaaaccacgcacaactgttggctggaaaggacttattaatgaccctcatcttgataattcttacgatattaatactggcttaagaaaggcaagaggtctattacttgatttagccaaagcaggaatgccggctgcaactgaattacttgatccagttgttcctcaatatattgctgatttaattagttggactgctattggagcaagaacgacagagagtcagactcatcgtgaaatggcgtctggattatcaatgccggttggttataagaatggtactgatgggacagctacgattgcgattaatgcaatgcaagcggcctcaaaacctcatcattttttaggaattaatcatgatggtcatgcctcaatagttagtactacaggtaatccaaatggtcatcttgttttaagaggtggtaagaatggaactaactaccatcttgatgcaattaatttaattgcagatgaattagcacaatttaatatgcctggaaaagtgatggttgattgtagtcatggtaattctaataaagattttcgtagacaatcagaagttttaaaagacgtagcagcacagataagaggtggatcaaagaatctaatgggcgtaatgatagaaagtcatcttgttgagggtaatcagaaattaaattcagatttgtcaaaacttacctatgggcaaagtgttacggatgcatgcataaacttttctacaactgaaattttattagaagaactagctgaatcggtcaaataa

SEQ ID NO: 1730 - protein, 356 aa, Prochlorococcus marinus str. NATL2A
MSTSSYFSMVDSTSDLHVVETRPLMSPALIHRDLPLDKASSGVVSTTRNKIQSILHGNDPRILVIVGPCSVHDVDAAIEYANRLAPLRERYSQKLEIVMRVYFEKPRTTVGWKGLINDPHLDNSYDINTGLRKARGLLLDLAKAGMPAATELLDPVVPQYIADLISWTAIGARTTESQTHREMASGLSMPVGYKNGTDGTATIAINAMQAASKPHHFLGINHDGHASIVSTTGNPNGHLVLRGGKNGTNYHLDAINLIADELAQFNMPGKVMVDCSHGNSNKDFRRQSEVLKDVAAQIRGGSKNLMGVMIESHLVEGNQKLNSDLSKLTYGQSVTDACINFSTTEILLEELAESVK

SEQ ID NO: 1731 - DNA, 1080 bp, Ralstonia eutropha JMP134
  CDS (1)..(1080): transl_table=11
atgctgaagaacaccgacgacctgcgcattcgtgaactcaaggaactgctgccgcccgcgcacctgatccgcgagttcgcctgctccgaaaaggcttcggacgtgatctacgccgcgcgccagtccatgcatcggatcctgcacggcatggatgaccgcctgatcgtcatcatcggtccgtgctcgatccacgacaccaaggccgcgctcgaatacgcgaagctgctgaaggtccagcgcgagcgctttgccaacgagcttgaaatcgtgatgcgggtctacttcgaaaaaccgcgtaccacggtgggctggaagggcctgatcaacgacccgttcatggacggcagcttcaagatcaacgacggcctgcgcaccgcgcgcgaactgctgctgaatatcagcgaactaggcgtgccgaccggcaccgagtatctcgacatgatcagcccgcagtacatcgccgacctcgtgagctggggcgcgatcggcgcgcgtacgacggagtcgcaggtgcaccgcgagctggcgtcgggactgtcgtgcccggtaggcttcaagaacggcaccgatggcaatgtgaagatcgccgtcgatgctatcaaggctgcatcgcagccgcaccatttcctgtcggtgaccaaaggcggccattcggcgatcgtgtcgacctccggcaacgaggactgccacattatcctgcgcggcggcaaggcgccgaactacgacgccgcgagcgtgcaggaagcctgcgatgcgatcgccaaggcgggcctggccgctcgcctgatgatcgatgcctcgcacgccaacagcagcaagaagcacgagaatcagattcccgtgtgcgaagacatcggccgccagctcgccgccggtgatgaccgcatcgtcggcgtgatggtcgaatcgcacctggtggcaggccgtcaggaccatgcccagggtacgccggtagaaagcctgacctacggccagtcggtaaccgacgcgtgcatcggctgggacgattcggtcaaggtgctggaaacgctggccgaggccgtcaaggcccgccgactggcaagcggcagcggcaactga

SEQ ID NO: 1732 - protein, 359 aa, Ralstonia eutropha JMP134
MLKNTDDLRIRELKELLPPAHLIREFACSEKASDVIYAARQSMHRILHGMDDRLIVIIGPCSIHDTKAALEYAKLLKVQRERFANELEIVMRVYFEKPRTTVGWKGLINDPFMDGSFKINDGLRTARELLLNISELGVPTGTEYLDMISPQYIADLVSWGAIGARTTESQVHRELASGLSCPVGFKNGTDGNVKIAVDAIKAASQPHHFLSVTKGGHSAIVSTSGNEDCHIILRGGKAPNYDAASVQEACDAIAKAGLAARLMIDASHANSSKKHENQIPVCEDIGRQLAAGDDRIVGVMVESHLVAGRQDHAQGTPVESLTYGQSVTDACIGWDDSVKVLETLAEAVKARRLASGSGN

SEQ ID NO: 1733 - DNA, 1134 bp, Ralstonia eutropha JMP134
  CDS (1)..(1134): transl_table=11
atgaataccccacaggcatccacaaacagcatcggcgagggctggccacatccctccgaccgcaccagcggcaccgacgatgcccgcgtcgacgacatcattccgctgcccccgcccgagcatctgatccggttcttccccattgccgggacgccgatcgaatcgctggtcacggcaacgcggcagagcatttcccggatcctgcacggccaggatgaccgcctgctcgtgatcatgggaccgtgctcgatccacgatccgcgcgccgcgctcgactacgcgcagcgcttgatggcacagcgcgtgcgctacgcggatacgctcgaaatcgtgatgcgtgtgtacttcgagaagccccgcaccaccgtgggctggaagggtctgatcaacgacccgtatctcgacgaaagctaccggatcgacgaggggcttcggatggcgcgccatctgctgctggacatcaaccgcctcgggctaccggcggccggcgagttcctggatgtcatctcgccgcagtacatcggcgacctgatcagctggggcgcaatcggcgcccgcacgacggaaagccaggtgcaccgggaactggcgtcgggcacctcggcaccgatcggattcaagaacggcaccgacggcaatatcaagatcgccatcgatgcaatccaggccgcctcccgtccgcatcacttcctgggcgtccataagaacgggcaggtcgcgaccgttcacacccggggcaaccccgactgccacgtcattctgcgcggcggcaaggtgccgaactatgatgccgattccgtggcagccgcctgcaaggatctcgacgcggccggactggaccgccggctgatggtcgattgcagccacgccaacagcagcaagcagcacttgcggcagatcgacgtcgcacgcgacgtagcgcggcaggtcagcggcggcagccggtcagtgtttggcgtgatggtcgaaagccatctgatcggtggtgcgcaaaaattcacgccggggcagcacaacccgtcggaactgacgtacgggcagagcattaccgacgcctgcatcggctgggacgactccctcgcggtgctcgacatgcttgccgaggcggtcgctgcgcgcaggcagaaagcctga

SEQ ID NO: 1734 - protein, 377 aa, Ralstonia eutropha JMP134
MNTPQASTNSIGEGWPHPSDRTSGTDDARVDDIIPLPPPEHLIRFFPIAGTPIESLVTATRQSISRILHGQDDRLLVIMGPCSIHDPRAALDYAQRLMAQRVRYADTLEIVMRVYFEKPRTTVGWKGLINDPYLDESYRIDEGLRMARHLLLDINRLGLPAAGEFLDVISPQYIGDLISWGAIGARTTESQVHRELASGTSAPIGFKNGTDGNIKIAIDAIQAASRPHHFLGVHKNGQVATVHTRGNPDCHVILRGGKVPNYDADSVAAACKDLDAAGLDRRLMVDCSHANSSKQHLRQIDVARDVARQVSGGSRSVFGVMVESHLIGGAQKFTPGQHNPSELTYGQSITDACIGWDDSLAVLDMLAEAVAARRQKA

SEQ ID NO: 1735 - DNA, 1077 bp, Thiobacillus denitrificans ATCC 25259
  CDS (1)..(1077): transl_table=11
atgtctgccacccgaaccgacgacacccgcatcgagcaaagcggcgaactgcttgcgccgatgcagatcatgcgcgagctgcgcgcgagcgaggccgtccatgcgcacgtcgcgcgcgcgcgcggcgcgatccacgacgtcctgcgtggcgccgacgaccgcatgttcgtcgtcgtcggcccctgctcgatccacgaccccgaggccgcgctcgactacgcgcgcaagctcaagcccctcgctgacgagctcgcgcacgaactcatcgtcgtgatgcgggtgtatttcgagaagccgcgcacgaccgtcggctggaaagggctcatcaacgatccccatctcgacgagagcttcgacatcaacgagggcctgcggctcgcgcgaaaattgttgctggagatcaacgaaatcggactgccctgtgcgaccgaattcctcgacctgatctcgccgcagtacatcgccgacctcgtgagctggggtgcgatcggtgcgcgcacgaccgagtcgcagtcgcatcgccagctcgcgtcggggctgtcgtgtcccgtcggcttcaagaacggcaccgacggcagtctgcggatcgcggtcgacgcgatcaaggccgcggcggcgcgccaccatttcatctcggtcaccaagtcgggccacgtcggcgtcttcagcacctcgggcaacgaggacgcccacgtcatcctgcgcggcggcaaggcgccgaactacgacgcggcgagcgtcaatctcgcgagcggcgagctggcggcggcgggtctcagacagcaactgatgatcgatttctcgcacgccaattcgagcaagcagtaccagcgccagatcgaagtcgccgccgacgtcgccgctcaaatcgcgggcggcgacacccgcatcatcggggcgatggtcgagagccacctcaatccgggccgtcaggacctcgtcccggggcagtcgctcgagtatgcgaagtcgatcaccgacgcgtgcatcgggtgggaggacacgattcccctgctgcgcacgctcgccgacgcggtgaaaaaacgccggctggccgcgccggcggatgaggaatga

SEQ ID NO: 1736 - protein, 358 aa, Thiobacillus denitrificans ATCC 25259
MSATRTDDTRIEQSGELLAPMQIMRELRASEAVHAHVARARGAIHDVLRGADDRMFVVVGPCSIHDPEAALDYARKLKPLADELAHELIVVMRVYFEKPRTTVGWKGLINDPHLDESFDINEGLRLARKLLLEINEIGLPCATEFLDLISPQYIADLVSWGAIGARTTESQSHRQLASGLSCPVGFKNGTDGSLRIAVDAIKAAAARHHFISVTKSGHVGVFSTSGNEDAHVILRGGKAPNYDAASVNLASGELAAAGLRQQLMIDFSHANSSKQYQRQIEVAADVAAQIAGGDTRIIGAMVESHLNPGRQDLVPGQSLEYAKSITDACIGWEDTIPLLRTLADAVKKRRLAAPADEE

SEQ ID NO: 1737 - DNA, 1074 bp, Burkholderia sp. 383
  CDS (1)..(1074): transl_table=11
atgcccccgcacaacaccgacgacgtccgcattcgcgaactcaaggaactgacgccgcccgcccacctgatccgcgaattcgcgtgctccgaagccgcgtccgagctgatctacaactcgcgccagtcgatgcaccgcatcctgcacgggatggacgaccggctgatcgtcgtggtcgggccgtgctcgatccatgacacgaaggcggcgatcgagtacgcgggccggctggtgaaggagcgcgagcgcttcaagggcgaactggaaatcgtgatgcgcgtgtacttcgagaagccacgcacgacggttggctggaagggcctcatcaacgatccgcacctcgacaacagcttcaagatcaacgaggggctgcgcaccgcgcgcgagttgctgctgcagatcaacgagatgggcctgccggccgcgaccgaatacctcgacatgatcagcccgcagtacatcgccgacctgatctcgtggggcgcgatcggcgcgcgtacgacggaatcgcaggtgcaccgcgagctcgcgtcggggctgtcgtgcccggtcggcttcaagaacggcaccgacggcaacgtgaagatcgcggtcgacgcgatcaaggccgcatcgcagccgcaccatttcctgtcggtgacgaagggcggccattcggcgatcgtgtcgacggccggcaacgaggactgccacgtgatcctgcgcggcggcaaggcaccgaactacgacgcggacagcgtgaacgccgcgtgcgcggacatcggcaaggccggcctcgccgcgcgcctgatgatcgacgcgagccacgcgaacagctcgaagaagcacgagaaccagatccccgtctgcgccgacatcggccgccagatcgcggccggcgacgcccgcatcgtcggcgtgatgatcgaatcgcatctcgtcgaggggcgccaggacctgaaggaaggctgcgagctgatctacggccagagcatcaccgatgcgtgcatcgcgtgggacgacagcgtgaaggtgctcgaaggcctcgcggaatcggtgaaggcgcgccgcgtcacacgcggcagcgggaactga

SEQ ID NO: 1738 - protein, 357 aa, Burkholderia sp. 383
MPPHNTDDVRIRELKELTPPAHLIREFACSEAASELIYNSRQSMHRILHGMDDRLIVVVGPCSIHDTKAAIEYAGRLVKERERFKGELEIVMRVYFEKPRTTVGWKGLINDPHLDNSFKINEGLRTARELLLQINEMGLPAATEYLDMISPQYIADLISWGAIGARTTESQVHRELASGLSCPVGFKNGTDGNVKIAVDAIKAASQPHHFLSVTKGGHSAIVSTAGNEDCHVILRGGKAPNYDADSVNAACADIGKAGLAARLMIDASHANSSKKHENQIPVCADIGRQIAAGDARIVGVMIESHLVEGRQDLKEGCELIYGQSITDACIAWDDSVKVLEGLAESVKARRVTRGSGN

SEQ ID NO: 1739 - DNA, 1131 bp, Burkholderia sp. 383
  CDS (1)..(1131): transl_table=11
atgcagaacctcgacaatccttcccacgatcgcgaggtaggcagcgccgacgcgacgcaggacaccacccgcatcgacgacgtccgcatcggcgccgtgcgcccgctgatttccccggcgctgctgctggacgaactgccggtgccggccgccacgcagacgctcgtcgaggatacgcgccgcgcgatcggcgacatcctgcacggccgcgacgaccggctgctgctcgtcgtcggcccctgctcgatccacgatcacgaccaggcactcgactacgcgcgccgcctgaaggtcgccgccgatgcgctgaaggacgacctgctgatcacgatgcgcgtctacttcgagaagccgcgtacgacggtcggctggaagggctacatcaacgatccgcgcctcgacggcagcttccgcatcaacgaagggctgcgcgccgcgcggcaattgctgctcgacatcaacgcgctgggcctgccggcgtcgaccgaattcctcgacctgctgagcccgcagtacatcgccgacctgatcgcgtggggcgcgatcggcgcgcgcacgaccgagagccagagccatcgccagctcgcgtcgggcctgagctgcccgatcggcttcaagaacggcaccgacggcggcgtgcaggtggcgtccgacgcgatcgtcgccgcggcggcgagccatgcgttcatggggatgacgaagatggggatggccgcgatcttcgagacgcgcggcaacgacgacgcgcacgtgatcctgcgcggcggcaagaacggcccgaactacgacgccgagcatgtcgaggcgagttgcgcggtgctgcgcaaggccggcttgcgcgagcaggtgatggtcgattgctcgcacgcgaactcgaacaagtcgcacgaccggcagatcgacgtcgcgcaggatctcgcgcggcaactgtcgcagggcgaacagcggatcgtcggcgtgatggtcgagagccatctcgaagccgggcgccaggacctgaagccgggtgtgccgctgaagtacggcgtatcgatcacggacgcatgcctgagctggacgcagacggaacccgttctcgacgtactggccgatgctgtgcggcaacggcgcgcacagtcgcgcaacgtgtga

SEQ ID NO: 1740 - protein, 376 aa, Burkholderia sp. 383
MQNLDNPSHDREVGSADATQDTTRIDDVRIGAVRPLISPALLLDELPVPAATQTLVEDTRRAIGDILHGRDDRLLLVVGPCSIHDHDQALDYARRLKVAADALKDDLLITMRVYFEKPRTTVGWKGYINDPRLDGSFRINEGLRAARQLLLDINALGLPASTEFLDLLSPQYIADLIAWGAIGARTTESQSHRQLASGLSCPIGFKNGTDGGVQVASDAIVAAAASHAFMGMTKMGMAAIFETRGNDDAHVILRGGKNGPNYDAEHVEASCAVLRKAGLREQVMVDCSHANSNKSHDRQIDVAQDLARQLSQGEQRIVGVMVESHLEAGRQDLKPGVPLKYGVSITDACLSWTQTEPVLDVLADAVRQRRAQSRNV

SEQ ID NO: 1741 - DNA, 1068 bp, Synechococcus sp. CC9605
  CDS (1)..(1068): transl_table=11
atggccaccacctccgatttgcatgtggtggagacacgtcccctggtggcccctgctgtgttgcatcaggaactgcccatggacgcggcggcgctcgagaccgtggcgtcagctcgccgacgcattcaagactttctcagtggccgtgatcagcgcttgctggtggtggtgggcccttgctctgttcacgacgtcaaagctgcccgggagtacgcccagcgcctggctccgatccgcgagcgcttgaaggatcagctcgaggtggtgatgcgggtgtatttcgagaagccgcgcaccacggttggttggaagggacttatcaatgacccccacctcgataactcctacgacatcaacaccggtctgcggcgagcccgaggactgctgttggatctcgcccgggaggggatgcctgctgcaacggaactgctcgatcccgtggttccccagtacatcgctgatttgatcagctggactgcgattggcgccaggacgacggaaagtcagacccaccgcgaaatggcctcagggctgtcgatgccgatcggctacaagaacagcaccaacggcagcgccaccatcgcgatcaatgccatgcaggcagcggggaagccacatcacttcctcggaatcaatcgcgatgggcatgcttcgatcgttagcaccacgggcaacccctacggccacctcgtgctgcggggcggcagccagggcagcaattaccacctggaggctgtgcaggaagccgcagccgagttgagccaggccggtctgcaggatcgactgatggtggattgcagccatgccaacagcaacaaagacttccgtcgacaggcagacgtgctggccagcgttgctgagcagttgcgagggggctccaaccacgtgatgggcgtgatgattgagagccatctggtggaaggcaaccagaagctcaacgccgacctgacgcagctgacctatggccagagcgtcacggatgcctgcatcagcctcgagaccaccgaaaccttgctggaggatctggccgcggccgtggccagtcgcaaacagacggtcaccgcatga

SEQ ID NO: 1742 - protein, 355 aa, Synechococcus sp. CC9605
MATTSDLHVVETRPLVAPAVLHQELPMDAAALETVASARRRIQDFLSGRDQRLLVVVGPCSVHDVKAAREYAQRLAPIRERLKDQLEVVMRVYFEKPRTTVGWKGLINDPHLDNSYDINTGLRRARGLLLDLAREGMPAATELLDPVVPQYIADLISWTAIGARTTESQTHREMASGLSMPIGYKNSTNGSATIAINAMQAAGKPHHFLGINRDGHASIVSTTGNPYGHLVLRGGSQGSNYHLEAVQEAAAELSQAGLQDRLMVDCSHANSNKDFRRQADVLASVAEQLRGGSNHVMGVMIESHLVEGNQKLNADLTQLTYGQSVTDACISLETTETLLEDLAAAVASRKQTVTA

SEQ ID NO: 1743 - DNA, 1065 bp, Synechococcus elongatus PCC 7942
  CDS (1)..(1065): transl_table=11
atgaaacagacttccgatctccacgtcgtcgagacgcgttccttgatcagtcctgcggaaattcaccagaagctgcccctttccgagacagcagcagacttggtggcttctacccgcgatcgcgttcgtagcattttgcgcaatagcgatcgccgcctgttggtgattgtcgggccctgctccattcacgacgtcaacgcagcttacgactacggccaaaagctcttgccactgcgcgaagagctggcggatgaacttgaaatcgtgatgcgggtctactttgaaaagccccgcacgacggtcggctggaaaggattgatcaacgatccccacctcgacggcagctacgacatcaataccggcatccagcgggctcgcaagttattgctcggtttggcagatatgggcttgcccgccgcgacagaactgctcgacccgattattccgcagtacatcgctgatgtaattgcttggacggcgattggggcgcgaaccaccgaaagtcaaactcaccgcgaaatggcttcgggcctgtcgatgccgatcggcttcaaaaatggcaccgatggtagcttccatatcgcagccaatgccatgctttccgccagccagccccaccatttcctgggaattaaccatgacggtctggccagcattgtctcgaccaccggcaatccagacggtcatttagtgctgcgcggcggcagcaaaggtccaaattacgcagcagcggacattgaagaagcagcctatcaactggctagcatgggcctccatgcacgagtgatggtggactgcagccacggcaactccaacaaggactatcgccgtcagtcagtggtgctctcagatctggccgaacaggttgctgagggatcgcgtcacctgatgggcgtgatgattgaaagccacctggttgaaggcaatcaacccatcccagccgacttgtcagagttgcgctacggccaaagcatcaccgatccctgcgtcgactttccgaccacagagaaaatgctgcgggagctagcccgagcccagcgcggcttagtcccgtccttggcttaa

SEQ ID NO: 1744 - protein, 354 aa, Synechococcus elongatus PCC 7942
MKQTSDLHVVETRSLISPAEIHQKLPLSETAADLVASTRDRVRSILRNSDRRLLVIVGPCSIHDVNAAYDYGQKLLPLREELADELEIVMRVYFEKPRTTVGWKGLINDPHLDGSYDINTGIQRARKLLLGLADMGLPAATELLDPIIPQYIADVIAWTAIGARTTESQTHREMASGLSMPIGFKNGTDGSFHIAANAMLSASQPHHFLGINHDGLASIVSTTGNPDGHLVLRGGSKGPNYAAADIEEAAYQLASMGLHARVMVDCSHGNSNKDYRRQSVVLSDLAEQVAEGSRHLMGVMIESHLVEGNQPIPADLSELRYGQSITDPCVDFPTTEKMLRELARAQRGLVPSLA

SEQ ID NO: 1745 - DNA, 1119 bp, Burkholderia thailandensis E264
  CDS (1)..(1119): transl_table=11
atgcaaaacatcgacaacccgcagcgcgaccgggaagccggctgcgccgacgcgacgcaggacacgacgcgcatcgacgacgtgcgcatcggcgcggtgcgcccgctcatctcgccggcgctgctgcaggacgaactgcccgtgccgggcgccgtccagacgctcgtcgaagcgagccgcgacgcgatcggcggcgtgctgcacggccgcgacgatcgcctgctcgcgatcgtcggcccgtgctcgatccacgatcacgaccaggcgctcgactacgcgcgccggctgaaggccgccgccgacgcgctgcgcgacgacctgctgatcgtgatgcgcgtgtatttcgagaagccgcgcacgacggtcggctggaagggctacatcaacgatccgcgcctcgacggcagcttccgcatcaacgaagggctgcgcgccgcgcgccggctgctcatcgacatcaacgcgctcggcctgcccgccggcaccgaattcctcgatctgctgagcccgcagtacatcgcggacctgatcgcgtggggcgcgatcggcgcgcgcacgacggagagccagagtcaccggcagctcgcgtcggggctgagctgcccgatcggcttcaagaacggcaccgacggcggcgtgcaggtcgcggccgacgcgatcgtcgcggcgcgcgcgagccacgcgttcatgggcatgacgaagatgggaatggcggcgatcttcgagacgcgcggcaacgacaccgcgcacgtgatcctgcgcggcggcaagaagggcccgaactacgatcgcgcgagcatcgacgaagcgtgcgcggcgctgcgcgcggcggacctgcgcgaacaggtgatggtcgactgctcgcatgcgaattcgaacaagtcgcacctgcggcagatcgacgtcgccgaggacctcgcgcggcagttgtcggacggcgagcggcgcattaccggcgtgatggtcgagagcaacctggaggccggccggcaggatctgaagcccggcgcgccgctgcaatacggcgtgtcgatcaccgacgcatgcctgagctgggcgcagaccgagcccgtgctcgacacgctcgcgcaggcggtgcggcggcggcgcaccgcctga

SEQ ID NO: 1746 - protein, 372 aa, Burkholderia thailandensis E264
MQNIDNPQRDREAGCADATQDTTRIDDVRIGAVRPLISPALLQDELPVPGAVQTLVEASRDAIGGVLHGRDDRLLAIVGPCSIHDHDQALDYARRLKAAADALRDDLLIVMRVYFEKPRTTVGWKGYINDPRLDGSFRINEGLRAARRLLIDINALGLPAGTEFLDLLSPQYIADLIAWGAIGARTTESQSHRQLASGLSCPIGFKNGTDGGVQVAADAIVAARASHAFMGMTKMGMAAIFETRGNDTAHVILRGGKKGPNYDRASIDEACAALRAADLREQVMVDCSHANSNKSHLRQIDVAEDLARQLSDGERRITGVMVESNLEAGRQDLKPGAPLQYGVSITDACLSWAQTEPVLDTLAQAVRRRRTA

SEQ ID NO: 1747 - DNA, 1074 bp, Burkholderia thailandensis E264
  CDS (1)..(1074): transl_table=11
atgcccccgcacaataccgacgacgtccgcatccgagaactgaaggagctgactccgcccgcccacctgatccgcgaattcgcgctcggcgaggcggtgtcggagctcatctacaacgcgcgccaggcgatgcaccggattctgcacgggatggacgatcgcctgatcgtcatcatcggaccgtgctcgatccacgacacgaaggcggcgctcgaatacgcgggccggctcgtcaaggagcgcgagcgcttcgcgaacgagctcgagatcgtgatgcgcgtgtacttcgagaagccgcgcacgacggtcggctggaaggggctcatcaacgatccgcacctcgacaacagcttcaagatcaacgatggcctgcgcaccgcgcgcgagctgctgctgcagatcaacgagatggggctgcccgccggcaccgagtacctcgacatgatcagcccgcagtacatcgccgacctgatctcgtggggcgcgatcggcgcgcgcacgaccgaatcgcaggtgcatcgcgagctcgcgtcggggctgtcgtgcccggtcggcttcaagaacggcaccgacggcaacgtgaagatcgcggtcgacgcgatcaaggccgcgtcgcagccgcaccatttcctgtcggtgacgaagggcggccactcggcgatcgtgtcgacggccggcaacgaggactgccacgtgatcctgcgcggcggcaaggcgccgaactacgacgccgacagcgtgaacgccgcgtgcgcggacatcggcaaggcgggcctcgccgcgcgcctgatgatcgacgcgagccacgcgaacagctcgaagaagcacgagaaccagatccccgtgtgcgcggacatcggccgccagatcgcggcgggcgacgagcgcatcgtcggcgtgatggtcgagtcgcacctcgtcgaaggccgccaggacctgaaggaaggctgcccgctcacgtacgggcagagcattaccgacgcgtgcatcaactgggacgacagcgtgaaggtgctcgaagggctcgccgaagcggtgaaggcgcgccgcgtcgcgcgcggcagcggcaactga

SEQ ID NO: 1748 - protein, 357 aa, Burkholderia thailandensis E264
MPPHNTDDVRIRELKELTPPAHLIREFALGEAVSELIYNARQAMHRILHGMDDRLIVIIGPCSIHDTKAALEYAGRLVKERERFANELEIVMRVYFEKPRTTVGWKGLINDPHLDNSFKINDGLRTARELLLQINEMGLPAGTEYLDMISPQYIADLISWGAIGARTTESQVHRELASGLSCPVGFKNGTDGNVKIAVDAIKAASQPHHFLSVTKGGHSAIVSTAGNEDCHVILRGGKAPNYDADSVNAACADIGKAGLAARLMIDASHANSSKKHENQIPVCADIGRQIAAGDERIVGVMVESHLVEGRQDLKEGCPLTYGQSITDACINWDDSVKVLEGLAEAVKARRVARGSGN

SEQ ID NO: 1749 - DNA, 1386 bp, Syntrophus aciditrophicus SB
  CDS (1)..(1386): transl_table=11
gtggtgaaactggtagacgcaggggactcaaaatcccccgatccttgcggtcatgtgggttcgattcccacctccggcaccatttctgatcaatgttgcatctctccactcgattccaccggatttgtcgttcctcttcaaatttttaccaccaaaatccgaatatcattgttcacgaagatccctgaattgcgccgtttcgcaatccagaataaaaaccgcatttgccatcaatattttgattactattttgtgcaggaaagtgtagaaagaagaaaatatcagaagcgattcttttccagcaaccttgaaaaacgaacgatgatcaagaccaacaacctgaaaataaaacgaattacacctgtcattgccccgaaggacttgagacaggttttcccggtttccgatgcggcggggaagtttgttaccctgagtcgaatgcatatcaccaatattctaagggggcttgattcgcgcctcatggtggtcgtgggtccctgctccattcacgatccgaaggccgcactggaatatgccgaaagactttcccatctttccagacaactctccgaccggcttttcatcatcatgcgagtttattttgaaaaaccccgtaccaccatcggatggaaaggattgatcaacgatccggacatggacggcactcatcagatatcaaaaggccttggcattgcgaggagcctgctttgcgccattacggaaaaaaaactgcccatcgccacggagatgctcgaccccatcacccccgaatatctggccgacctgttgagctggggagcaatcggagcgcgcacaacggagtctcagcctcacagggaaatggccagcgggctttccttccccatcggtttcaaaaacgggacagacggcaacctgcagatcgccattgatgcgatcagatcggctctcgtttcccacagttttctcggcatcgacaaagatggaaaaaccgccattctccagacaacgggcaaccccgatctccacatcgttctccggggcagcgcgaaaaaaccgaattacatgcctgaggatatttccagaacggtggaattgatgaagcaggcacagctcccccccagcatcatggtggactgcagtcatggcaattcaggaaaggattacaaaaaacagccttctgtgatggatcagatttttaagcagatcgagtcgggtcagggaagcatctgcgggataatgattgaaagcaatctggaggaggggaatcaaccgattcccaagaacctctctctgatgaaatacggggtgtcgataaccgatccctgccttgactggcgaacgacggaggaaatgctccggtccgcccacgatcgattaagcgcctgcggcggcagaccaatatga

SEQ ID NO: 1750 - protein, 461 aa, Syntrophus aciditrophicus SB
MVKLVDAGDSKSPDPCGHVGSIPTSGTISDQCCISPLDSTGFVVPLQIFTTKIRISLFTKIPELRRFAIQNKNRICHQYFDYYFVQESVERRKYQKRFFSSNLEKRTMIKTNNLKIKRITPVIAPKDLRQVFPVSDAAGKFVTLSRMHITNILRGLDSRLMVVVGPCSIHDPKAALEYAERLSHLSRQLSDRLFIIMRVYFEKPRTTIGWKGLINDPDMDGTHQISKGLGIARSLLCAITEKKLPIATEMLDPITPEYLADLLSWGAIGARTTESQPHREMASGLSFPIGFKNGTDGNLQIAIDAIRSALVSHSFLGIDKDGKTAILQTTGNPDLHIVLRGSAKKPNYMPEDISRTVELMKQAQLPPSIMVDCSHGNSGKDYKKQPSVMDQIFKQIESGQGSICGIMIESNLEEGNQPIPKNLSLMKYGVSITDPCLDWRTTEEMLRSAHDRLSACGGRPI

SEQ ID NO: 1751 - DNA, 1083 bp, Methylobacillus flagellatus KT
  CDS (1)..(1083): transl_table=11
atgagcccataccagaaaattgcgactgacgatgttcgcatcaaggaaatcaaggagctgagattaccgtccgagctgcttgaggagctgcctgccagtcccgccatcacggacaacatcttggctacccgcagcgccattcataaaatcttgcacagcgccgacgacaggctgctcgttgtcattggcccctgctccatccatgactatgatgccgggctggaatatgcccgccgcctggtggcgctgcgccctcgcttcgaacaagagctgctgctcgtgatgcgagtctattttgagaaaccacgtaccaccgtgggctggaaaggcctgatcaacgatcctttcctcgacggcagctaccgcattaacgaaggcctggagctggcgcgccgcttcctgctggacgtcaatgccctcggcatgcctgccggcaccgaattccttgacgtcatcacgccgcaatatactgccgacctggtgagctggggggcaatcggcgcacgcacgacagaatcgcagatccaccgtgagctggcgtctggtctctcctgccccgttgggttcaagaacggcacggatggcaatatccgcattgctgtcgacgccatcaaggcagcagccagcccgcaccactttctatccgtgaccaaggaaggccgttccgccatcatctccaccagcggcaacgaagattgccacgtcatcctgcgcggcggcaaaactcccaactacgatgccgccagtgtcgaggatgccgcacgcgaacttgccaatgcaggacttgccgccaaggtgatgatcgactgctcgcatgccaacagcctcaagcaattcaaacgccaaatcgatgtcgtcgccgatgtcaccagtcagatctccagcggtgacgaccgcatcatcggcacgatgatcgagtcgcacctcaatgaaggtcgacaggacctggtaccgggttgccagctggagtatggcaagtcgatcaccgacggctgcctgggttgggatgactcggtcaccctattggatacactggcggaaagcgtacggaagcgccgcaagcttcaggaagaagccgaataa

SEQ ID NO: 1752 - protein, 360 aa, Methylobacillus flagellatus KT
MSPYQKIATDDVRIKEIKELRLPSELLEELPASPAITDNILATRSAIHKILHSADDRLLVVIGPCSIHDYDAGLEYARRLVALRPRFEQELLLVMRVYFEKPRTTVGWKGLINDPFLDGSYRINEGLELARRFLLDVNALGMPAGTEFLDVITPQYTADLVSWGAIGARTTESQIHRELASGLSCPVGFKNGTDGNIRIAVDAIKAAASPHHFLSVTKEGRSAIISTSGNEDCHVILRGGKTPNYDAASVEDAARELANAGLAAKVMIDCSHANSLKQFKRQIDVVADVTSQISSGDDRIIGTMIESHLNEGRQDLVPGCQLEYGKSITDGCLGWDDSVTLLDTLAESVRKRRKLQEEAE

SEQ ID NO: 1753 - DNA, 1119 bp, Burkholderia xenovorans LB400
  CDS (1)..(1119): transl_table=11
ttgaacgccatcgacaatcctttgcacgatcaggaagtcggctcggccgacgccacccaggacaccacgcgcatcgacgacgttcggatcggcgcggtacgtccgctgatttcccctgcgctgttgcaggacgagttgcccacaccgccttcggtgcagacgctggtcgagaagacccgcgcggaaatcgccgacattctgcatggccgcgacgaccggctcgtgatgatcgtcggaccgtgctcgattcacgaccacgaccaggcgatcgactatgcgcgcaagctgaaagtcgccgccgacacttacagggacgacctgctgatcgtaatgcgggtctacttcgagaagccgcgcactaccgtcggctggaaaggctatatcaacgacccgcggctcgacggcagtttccgtatcaatgaaggtctgcgtctcgctcggcaattgctgctcgatatcaacggtctcggcctgtccaccgccaccgagtttctcgacctgctgagcccgcagtacatcgccgatctgatcgcgtggggcgctatcggcgcgcgcacgacggagagtcagagccatcgtcaactcgcttcgggactgagctgcccgatcggcttcaagaacggcacggacggcggcgtgcagatcgccgcggacgcgatcgtcgccgcgcgcgcgagccatgcgttcatgggcatgacgaaaatgggcatggccgcgatcttcgaaacgcgcggcaacgacgacgcgcacgtgatcctgcgcggcggcaagaaagggcctaactacgacagcgcgtcggtggacgcgacttgcgtcgcgctgaaatcagcgggactgcgcgagcaggtcatgatcgactgttcgcatgcgaactcgggcaaatcgcatttgcgtcaactcgaagtggtgcaggatatcgcgctgcagttgtcgcagcgcgagcgccgcattatcggcgtcatgctggaaagtcatctggaagaaggccgccaggatctgaagcctggtgtgccgttgcgtcacggcgtatcgatcacggatgcctgcgtcagctgggcgcagaccgagccggtgctcgaaacactcgccgaggccacccgcaaacgccgcgcgggctaa

SEQ ID NO: 1754 - protein, 372 aa, Burkholderia xenovorans LB400
MNAIDNPLHDQEVGSADATQDTTRIDDVRIGAVRPLISPALLQDELPTPPSVQTLVEKTRAEIADILHGRDDRLVMIVGPCSIHDHDQAIDYARKLKVAADTYRDDLLIVMRVYFEKPRTTVGWKGYINDPRLDGSFRINEGLRLARQLLLDINGLGLSTATEFLDLLSPQYIADLIAWGAIGARTTESQSHRQLASGLSCPIGFKNGTDGGVQIAADAIVAARASHAFMGMTKMGMAAIFETRGNDDAHVILRGGKKGPNYDSASVDATCVALKSAGLREQVMIDCSHANSGKSHLRQLEVVQDIALQLSQRERRIIGVMLESHLEEGRQDLKPGVPLRHGVSITDACVSWAQTEPVLETLAEATRKRRAG

SEQ ID NO: 1755 - DNA, 1074 bp, Burkholderia xenovorans LB400
  CDS (1)..(1074): transl_table=11
atgcccccgcacaacaccgacgatgtccgcatccgcgaattgaaagaactcacgccgcccgctcacctgatccgtgaattcgcctgcgacgaaacggtgtccgacgtgatctataactcgcgcacctcgatgcatcgcattctgcacggcatggaagatcgcctgatcgtgatcatcggaccgtgctcgattcacgatacgaaggcggcgatggaatacgccggccgtctggtcgagcagcgcaagcgctttgccggcgagctcgaaatcgtgatgcgcgtgtacttcgaaaagccgcgcacaactgttggctggaagggtctcatcaacgacccgtacatggacaatagcttcaagatcaacgaaggcctgcgcaccgcgcgcgagttgctgttgcgcatcaacgaactcggcctgccggccggcaccgaatacctcgacatgatcagtccgcagtacatcgccgacctgatctcgtggggcgcaatcggcgcgcggaccaccgaatcgcaggtgcaccgcgaactggcttcgggcctgtcgtgcccggtcggcttcaagaacggcacggacggcaacgtcaagatcgcggtcgacgcgatcaaggccgcctcgcagccgcaccatttcctgtcggtcacgaagggcggccactcggcaatcgtgtcgaccgcgggcaatgaggactgccacatcatcctgcgcggcggcaagacgccgaactacgacgcggacagcgtcaacgccgcgtgcgcggacatcggcaaggccggtctcgccgcgcgcctgatgatcgacgcgagccacgcgaacagctcgaagaagcacgagaatcagattccggtgtgcgcggatatcggccgccagattgcttcgggtgacgaacggattgtcggcgtgatggtggaatcgaatctggtggcgggccgccaggatctgcaggaaggctgcgcgctgacgtacggccagagcatcaccgacgcgtgcatcggctgggacgaaagtgtcgccgtgctggaaggcctcgccgacgcggtgaagcagcgccgtgtggcacgcggcagcggcaactga

SEQ ID NO: 1756 - protein, 357 aa, Burkholderia xenovorans LB400
MPPHNTDDVRIRELKELTPPAHLIREFACDETVSDVIYNSRTSMHRILHGMEDRLIVIIGPCSIHDTKAAMEYAGRLVEQRKRFAGELEIVMRVYFEKPRTTVGWKGLINDPYMDNSFKINEGLRTARELLLRINELGLPAGTEYLDMISPQYIADLISWGAIGARTTESQVHRELASGLSCPVGFKNGTDGNVKIAVDAIKAASQPHHFLSVTKGGHSAIVSTAGNEDCHIILRGGKTPNYDADSVNAACADIGKAGLAARLMIDASHANSSKKHENQIPVCADIGRQIASGDERIVGVMVESNLVAGRQDLQEGCALTYGQSITDACIGWDESVAVLEGLADAVKQRRVARGSGN

SEQ ID NO: 1757 - DNA, 1080 bp, Ralstonia metallidurans CH34
  CDS (1)..(1080): transl_table=11
atgctgaagaacaccgacgacctgcgtattcgagaactcaaggaactgctgccgcccgcgcacctgatccgcgagtttgcttgctcggaggctgcgtccgacgtgatctatggcgcccgccaggccatgcatcgcattctgcacggcatggacgaccgcctgatcgtcatcatcggcccgtgctcgattcacgacacgcgcgcggccctggaatacgccaagctgctcaaggtgcagcgcgaccgcttcgcgggcgagctcgagatcgtgatgcgcgtctacttcgagaagccgcgcacgacggtgggctggaagggcctgatcaacgatccgcacatggatggcagcttcaagatcaacgacggcctgcgcaccgcccgcgaactgctgctgaatatcagcgaaatgggcgtgccgacggggacggaatatctggacatgatcagcccccagtacatcgccgatctggtgagctggggcgcgatcggcgcgcgcaccaccgagtcgcaggtgcatcgcgaactcgcttccggactgtcgtgcccggtcggcttcaagaacggcaccgacggcaacgtgaagatcgccgtcgacgcgatcaaggccgcctcgcagccccaccatttcctgtcggtaaccaagggcggccactcggccatcgtgtcgacctcgggtaacgaggactgccacatcatcctgcgcggcggcaagacaccgaactacgacgcggccagcgtgcaggaagcctgcgacgcgatctcgaagtccggcctggccgcacgcctgatgatcgacgcctcgcacgccaacagcagcaagaagcacgagaaccagatcccggtctgcgaggacattggcaagcagatcgccggcggcgagcagcgcatcgtcggcgtcatggtggaatcgcacctggtagccggccgacaggaccatgtgcagggcactccggtggagaacctgacctacggccagtcggtgaccgacgcctgcatcgcctgggatgactccgtggccgtactggagacgctggccaacgccgtgaagcagcgccgtctggtgaccggcagcggcaactga

SEQ ID NO: 1758 - protein, 359 aa, Ralstonia metallidurans CH34
MLKNTDDLRIRELKELLPPAHLIREFACSEAASDVIYGARQAMHRILHGMDDRLIVIIGPCSIHDTRAALEYAKLLKVQRDRFAGELEIVMRVYFEKPRTTVGWKGLINDPHMDGSFKINDGLRTARELLLNISEMGVPTGTEYLDMISPQYIADLVSWGAIGARTTESQVHRELASGLSCPVGFKNGTDGNVKIAVDAIKAASQPHHFLSVTKGGHSAIVSTSGNEDCHIILRGGKTPNYDAASVQEACDAISKSGLAARLMIDASHANSSKKHENQIPVCEDIGKQIAGGEQRIVGVMVESHLVAGRQDHVQGTPVENLTYGQSVTDACIAWDDSVAVLETLANAVKQRRLVTGSGN

SEQ ID NO: 1759 - DNA, 1143 bp, Ralstonia metallidurans CH34
  CDS (1)..(1143): transl_table=11
atgaatgatccacaaaagtccccgcccagcgttgccgaaggctggcaggcgccgccggaccgcaccagtgtgacggacgatgcgcgcgtggaggacatcatcccgctgcccccgcccgagcacttgatccgtttcttccccatccgtggcacccccgttgaatcgctggtcacccagacgcgccagcgcatctcccgcattctgcatggcagtgatgaccggctgctcgtgatcatgggcccctgctcgatccacgacccgcaggccgcgctcgactacgcacggcgtctggcggccgaacgcgagcgctacgcggactcgctggaaatcgtgatgcgggtgtatttcgagaagccccgcaccacggtcggctggaagggcctgatcaacgacccctacctggacgagagctatcgcatcgacgaaggcctgcgcatcgcgcgcagcctgctggtggatatcaaccgcctcgggttgccggcggccggcgagttcctggacgtcatttcgccccagtacatcggcgatctgatctgctggggcgcgattggcgcccgcacgaccgagagccaggtacaccgggaactggcttcgggcgtctccgcgcccattggcttcaagaatggcaccgacggaaacatcaagatcgcgatcgacgcgatccaggccgcatcgcgcccgcaccacttccttggcgtgcacaagaacggccaggtcgcgacggtccataccaagggcaacccggactgccacgtcattcttcgcggcggcaaggcgcccaactacgacgcggaggttgtcgccgcagcgtgcaaggaactggaagcggcgcggctgcgcaattcgttgatggtcgattgcagccatgccaacagcaacaagcagcaccaacgccagatcgacgtcgcacgcgacgtggcgcagcagatcagcggcggcagccagtcgatcttcggcctgatggtcgagagccatctggtacccggcgcgcagaagttcaccccaggagaacacaacccatcgggtctcacttatggtcagagcatcacggacgcctgcatcgggtgggaggactccgtgacggtgctggaactgctgagcgaggcggtaaatgtacggcgtggggtaaacaggaaggcttaa

SEQ ID NO: 1760 - protein, 380 aa, Ralstonia metallidurans CH34
MNDPQKSPPSVAEGWQAPPDRTSVTDDARVEDIIPLPPPEHLIRFFPIRGTPVESLVTQTRQRISRILHGSDDRLLVIMGPCSIHDPQAALDYARRLAAERERYADSLEIVMRVYFEKPRTTVGWKGLINDPYLDESYRIDEGLRIARSLLVDINRLGLPAAGEFLDVISPQYIGDLICWGAIGARTTESQVHRELASGVSAPIGFKNGTDGNIKIAIDAIQAASRPHHFLGVHKNGQVATVHTKGNPDCHVILRGGKAPNYDAEVVAAACKELEAARLRNSLMVDCSHANSNKQHQRQIDVARDVAQQISGGSQSIFGLMVESHLVPGAQKFTPGEHNPSGLTYGQSITDACIGWEDSVTVLELLSEAVNVRRGVNRKA

SEQ ID NO: 1761 - DNA, 1056 bp, Acidobacteria bacterium Ellin345
  CDS (1)..(1056): transl_table=11
atgatccgcccgaccgaagacttacgcatccagtggacaaaagttgttcttccgccggcgttcctcgacgaggaactgccgacgacggagaacgcttcagcgaccgtcgcgaacgcgcgcaacacggtgcgcgacataattcgtggagaagattcgcggctgctggtggtgctgggaccgtgttccatccatgacgtgaaagcggcgcgcgaatatgcggcgctgctgaaagacgcaatcaccgagctttcgaacgatctcttcctggtaatgcgggtgtacttcgagaagcctcgcaccacgattgggtggaaggggctgatcaacgatccgcacctcgacgagtcgttcaacatcaacgacggcctgcggatttcgcggcatttgctgctggatctcgcggagatgggtgttcccgcaggcacggaatttcttgacatgattacgccgcagtatcttgcgggattggtgtgctggggcgcgatcggagcgcgtaccaccgagagccagatccatcgcgagctggtgagtggactgtcgtgtccggtgggatttaagaatgggacgtcgggaaatgtcggcatcgcgattgaggcggtgcagtcggcagcacatccgcatacgttcctcggacacacgaagtatgggcagtcggcgatcttcgcgaccacgggcaatccggattgccatgtgatcctgcgcggcggacgcaagctggcaaattacgacgcggcgtccgtgaaagaagcgtgtgggctgctggagaaggctgggttgccgcagcgcttgatgatcgattgcagccacgccaacagcaacaaggaccacacgcgtcagggcgcggtggcgcgcgatgtggctgggcagattgccggcggaaacaaagcgatcatcggcgtgatgattgagagcaacctcgtcggtggcgcacagaagttcgtgaagggcaagccgctggtctacgggcagagcattaccgacgcttgcattgactggaaagaaacgcgggggctgctgggggaactggcggctgcggtgcgctctcgccggaagtag

SEQ ID NO: 1762 - protein, 351 aa, Acidobacteria bacterium Ellin345
MIRPTEDLRIQWTKVVLPPAFLDEELPTTENASATVANARNTVRDIIRGEDSRLLVVLGPCSIHDVKAAREYAALLKDAITELSNDLFLVMRVYFEKPRTTIGWKGLINDPHLDESFNINDGLRISRHLLLDLAEMGVPAGTEFLDMITPQYLAGLVCWGAIGARTTESQIHRELVSGLSCPVGFKNGTSGNVGIAIEAVQSAAHPHTFLGHTKYGQSAIFATTGNPDCHVILRGGRKLANYDAASVKEACGLLEKAGLPQRLMIDCSHANSNKDHTRQGAVARDVAGQIAGGNKAIIGVMIESNLVGGAQKFVKGKPLVYGQSITDACIDWKETRGLLGELAAAVRSRRK

SEQ ID NO: 1763 - DNA, 1095 bp, Silicibacter sp. TM1040
  CDS (1)..(1095): transl_table=11
atgaccaccctctctcagacaccgacccatgatctgcgcatcaccgacatgcaggaattgatctgccccgaagccctcgcggtgaaacacccgctgacagatgccgcgcgcgaaaccgtgctctcggcgcgcgccagcatccagaagatcctgcatggcgccgacgaccggctggtcgtcgtggtcggcccctgttcgatccacgacccggaggccgcgctggactatgcgcgccgtcttgcgccgctgcgcgccgagctgggcgatgcgcttgagatcgtgatgcgggtctactttgaaaaaccgcgcaccatcgcgggctggaaggggctgatcaacgaccccaaccttgatgggtctttccgcatcaacaaggggttgtcggtcgcccgcaagctctgcctggatctgagcgaaatgggcctgcccgtggggaccgaattcctcgatgcctcggtgccgcaatacatcagtgatctggtgagctgggccgcgattggcgcccgcaccaccgagagccagatccaccgcgaaatggcttcgggcctgagctgcccggtgggcttcaagaacggcacccgcggcaatgtgcagatcgccattgacgcggtgcgctcggcggccacaccgcatcatttcatggcgctggccccctcgggtctcgcggcgattgcggcgacggccggaaacccggattgccacatcatcctgcgcggcggcggtggtaccaactttgatgccgagagcgtggattcagcctgcaaaaaggccgaagccgatggcatccgtccgcaggtgatgatcgacgcaagccacgccaactctgccaaggatcccgccaaacagcccgaggtgctctcggatgtggccggccagatggcacagggtgagacccgcatcaccggcatcatgatcgaaagccacctcgaacagggtcgtcaggatctgcccaaggacggggacctgtcgaaactcacctatggtcagtcgatcaccgacggctgcatcggctgggagcaaaccgaggccgagctgcgcaaactggcccaggcggtcaaaacacgccgcacgcagggcgcccgcctggcgggttga

SEQ ID NO: 1764 - protein, 364 aa, Silicibacter sp. TM1040
MTTLSQTPTHDLRITDMQELICPEALAVKHPLTDAARETVLSARASIQKILHGADDRLVVVVGPCSIHDPEAALDYARRLAPLRAELGDALEIVMRVYFEKPRTIAGWKGLINDPNLDGSFRINKGLSVARKLCLDLSEMGLPVGTEFLDASVPQYISDLVSWAAIGARTTESQIHREMASGLSCPVGFKNGTRGNVQIAIDAVRSAATPHHFMALAPSGLAAIAATAGNPDCHIILRGGGGTNFDAESVDSACKKAEADGIRPQVMIDASHANSAKDPAKQPEVLSDVAGQMAQGETRITGIMIESHLEQGRQDLPKDGDLSKLTYGQSITDGCIGWEQTEAELRKLAQAVKTRRTQGARLAG

SEQ ID NO: 1765 - DNA, 1080 bp, Haemophilus somnus 129PT
  CDS (1)..(1080)
atggctaagaataaaaataatattcgtattgcaaatgatgacaccagaattgcaaaagttgagcaagttttgcccccgattgcattattagaaaaatttcctgcaagtgatgtagccattaaaacagtaaaaaaagcccgcttggcagcacataacattattcatcaaaaagatgatcgtttactcgttattattggaccttgttctattcatgatcctgcttctgcgttggaatatgctaaacgcattaaagaaatgcgtataaaatatcatgatacgttggaaattataatgcgtgtgtattttgaaaaaccacgtacaactgtgggttggaaaggattagtgaatgatcctcatttagatggtagttatgctttaaatgatggtttgcgtattgcacgtaaattgttatctgatattaacgatatggaaatgcctactgccggtgaatttttagatatgatttcaccgcaataccttgcggactttatgagttggggggctattggagcaagaacaacggaatcgcaagttcatcgtgaattggcatccggtttgtcatgtgcggtgggctttaagaatggaactaacggtggagttcgcattgctcttgatgcaataggtacggcagaagcaccacattattttctatctgtcacaaaattcggtcattcagcaattgtgtctacaaaaggaaatgaggattgtcatattattttgcgtggaggtgagaaaggtcctaattatagtgcggaagatgttcggacagtttgtgcggatatagaaaaaaccggtcgcattccgcatgttatggtggattttagtcatgcgaacagtagtaaacaatttaaaaaacagttagatgtttgcactgatgtctgtactcaaattgccaatggttcaaaacaaatttttggtgtcatggttgaaagccatttagtcgaaggtcgtcaagatttagttgaagcaaaagcacttacctatggacaaagtattaccgatgcttgtattggttggtcagatacagaaatcgtattacaacaattgtctgaggcattaattgaacgacgtaagaagtaa

SEQ ID NO: 1766 - protein, 359 aa, Haemophilus somnus 129PT
MAKNKNNIRIANDDTRIAKVEQVLPPIALLEKFPASDVAIKTVKKARLAAHNIIHQKDDRLLVIIGPCSIHDPASALEYAKRIKEMRIKYHDTLEIIMRVYFEKPRTTVGWKGLVNDPHLDGSYALNDGLRIARKLLSDINDMEMPTAGEFLDMISPQYLADFMSWGAIGARTTESQVHRELASGLSCAVGFKNGTNGGVRIALDAIGTAEAPHYFLSVTKFGHSAIVSTKGNEDCHIILRGGEKGPNYSAEDVRTVCADIEKTGRIPHVMVDFSHANSSKQFKKQLDVCTDVCTQIANGSKQIFGVMVESHLVEGRQDLVEAKALTYGQSITDACIGWSDTEIVLQQLSEALIERRKK

SEQ ID NO: 1767 - DNA, 1074 bp, Actinobacillus pleuropneumoniae serovar 1 str. 4074
  CDS (1)..(1074)
atgtcttataaaaatgatgatcttcgtattacgaatattgaacaacttttaccgccggttgcgctattggaacgttttcccgcaagcgatattgccgccgaaaccgtagaaaaagcacgtaaagccattcataaaattattcacggtgcggacgaccgtttattggtggtgatcggaccttgttccatccatgatcctaaagcggcgctagagtatgcacaacgtataaaaacaattcgtgcgaatcctaagattaatcaaaaccttgaagtggtaatgcgcgtttattttgaaaaaccgcgcacgaccgtcggttggaaagggttaatcaatgatccttatcttaacgaaacttacgcgttaaacgacggtttacgtatcgctcgtaaagtattatcggatattaacgatttaaccgtaccggcggcaggcgaatttttagatatgatcacaccgcaatatatggcggactttatgagttggggtgcaatcggcgcacgcacgaccgaatcgcaagttcatcgtgaattagcatccggtttatcttgtgcggtcggctttaaaaatgcgacaaacggcggtgtaaaaatcgcattagatgcaatcggtgcggcggaagctccgcatcatttcttatcagtcaccaaattcggacattccgcaattgtttctacggcaggtaatccggattgccatatcattttacgcggcggtgataaagggacgaactatgatgccgaatcggtcgccaaagtatgtgcggatatcgagaaatccggtcgccgaccgcacgtaatgattgatttcagtcatgccaacagccaaaaacaatttaaacgtcagatggacgtttgtgcggacgtatgccgacaaattgcaagcggttcggaactaatttccggtgtgatgattgaaagtcatttagtggaaggtcgccaagaattaggtgacggtaatttagcgcatttggtttacggacaaagtgtaacggatgcctgtatcggttgggaagatagcgaaaaagcgttgtttgccttggctgatgcggttgaacaacgccgcaaacatatttaa

SEQ ID NO: 1768 - protein, 357 aa, Actinobacillus pleuropneumoniae serovar 1 str. 4074
MSYKNDDLRITNIEQLLPPVALLERFPASDIAAETVEKARKAIHKIIHGADDRLLVVIGPCSIHDPKAALEYAQRIKTIRANPKINQNLEVVMRVYFEKPRTTVGWKGLINDPYLNETYALNDGLRIARKVLSDINDLTVPAAGEFLDMITPQYMADFMSWGAIGARTTESQVHRELASGLSCAVGFKNATNGGVKIALDAIGAAEAPHHFLSVTKFGHSAIVSTAGNPDCHIILRGGDKGTNYDAESVAKVCADIEKSGRRPHVMIDFSHANSQKQFKRQMDVCADVCRQIASGSELISGVMIESHLVEGRQELGDGNLAHLVYGQSVTDACIGWEDSEKALFALADAVEQRRKHI

SEQ ID NO: 1769 - DNA, 1089 bp, Haemophilus influenzae R2846
  CDS (1)..(1089)
atggctaaagagaaaattgaaattgtcgtggcaaacgatgatacgcgaattgaaaaagtcgatcaggtgttaccaccgattgccttattagaaaaatatccagctagtgaacaggctgcggcattagtaaagcaaactcgtcatgaggcgcataatattattcaggctaaagatgatcgtttattagtcgtgattggaccttgctccattcacgatccgaaagctgccattgaatatgcgactcgtttaaaaccattacgtgataaatataaagatagcctcgaaattattatgcgtgtgtactttgagaaaccgcgtacaacggtgggctggaaaggtttaattaatgatccgtatttaaatgatacttatcgtttaaatgatggtttacgtattgcacggaaattactttcagatattaatgatcttggtgtgcctgctgcgggcgagtttttagatatgattacacctcaatatttggctgattttatgagctggggggcgattggggctagaacaacagaatcacaagttcatcgtgagttggcttcaggtttatcttgtgctgttggttttaaaaatgccactaatggcggagtaaaagtcgctttagatgcaattggtgcggcagaagctccccactatttcttatctgtcactaaatttggtcattctgccattgtttctacaaaagggaatgaagattgccatattattttacgaggtggagataaaggccctaactatagtgctgaagatgtagaaaaagtttgtgctgatattgaaaaaacagggcgtattccacacgttatggttgattttagccatgcaaacagcagtaaacaatataaaaaacaaatggaggtttgccaagatgtgtgtcatcaaatcgcatctggttctaaacaaatctttggtgtaatggtggaaagtcatttagtggaaggtcgtcaagatttagttgatggcaaagcgcagacttatggacaaagtattacggatgcgtgcattggatgggaagattctgaaagattattgcaacaactttctgatgcagttattgctagacgtaaagcgacgagtaattaa

SEQ ID NO: 1770 - protein, 362 aa, Haemophilus influenzae R2846
MAKEKIEIVVANDDTRIEKVDQVLPPIALLEKYPASEQAAALVKQTRHEAHNIIQAKDDRLLVVIGPCSIHDPKAAIEYATRLKPLRDKYKDSLEIIMRVYFEKPRTTVGWKGLINDPYLNDTYRLNDGLRIARKLLSDINDLGVPAAGEFLDMITPQYLADFMSWGAIGARTTESQVHRELASGLSCAVGFKNATNGGVKVALDAIGAAEAPHYFLSVTKFGHSAIVSTKGNEDCHIILRGGDKGPNYSAEDVEKVCADIEKTGRIPHVMVDFSHANSSKQYKKQMEVCQDVCHQIASGSKQIFGVMVESHLVEGRQDLVDGKAQTYGQSITDACIGWEDSERLLQQLSDAVIARRKATSN

SEQ ID NO: 1771 - DNA, 1089 bp, Haemophilus influenzae R2866
  CDS (1)..(1089)
atggctaaagagaaaattgaaattgtcgtggcaaacgacgatacgcgaattgaaaaagtcgatcaggtgttaccacccattgccttattagaaaaatacccagcaagtgaacatgctgcggcgttagtgaagcaaactcgtcatgaggcacataatattattcatggtaaagatgatcgtttattagtcgtgattgggccttgctctattcatgatccgaaagttgccattgaatatgcgactcgtttaaaaccattacgtgaaaaatacaaagatagccttgaaattattatgcgtgtgtattttgagaaaccgcgtacaacggtgggttggaaaggtctaattaatgatccatatttgaatgatacttatcgtttaaatgatgggttacgtattgcacggaaattactttcagatattaatgatcttggtgtgcctgcagcgggcgagtttttagatatgattacacctcagtatttggcagattttatgagctggggggcgattggggctagaacaacagaatcacaagttcatcgtgagttggcttcaggtttatcttgtgctgttgggtttaaaaatgccactaatggtggtgtgaaagtcgctttagatgcaattggtgcggcggaagctccccactatttcttatctgtcactaaatttggtcattctgcaattgtttctacaaaagggaatgaagattgccatattattttacgaggtggagataaaggccctaactatagtgctgaagatgtagaaaaagtttgtgctgatattgaaaaaacagggcgtattccacacgttatggttgattttagccatgcaaacagcagtaaacaatataaaaagcaaatggatgtttgccaagacgtatgtaatcagattgcatttggttctaaacaaatctttggcgtaatggtggaaagccatttagtggaaggtcgtcaagatttagttgatggcaaagcgcagacttatggacaaagtattacggatgcgtgcattggatgggaagattctgaaagattattgcaacaactttctgatgcagttattgctagacgtaaagcgacgagtaattaa

SEQ ID NO: 1772 - protein, 362 aa, Haemophilus influenzae R2866
MAKEKIEIVVANDDTRIEKVDQVLPPIALLEKYPASEHAAALVKQTRHEAHNIIHGKDDRLLVVIGPCSIHDPKVAIEYATRLKPLREKYKDSLEIIMRVYFEKPRTTVGWKGLINDPYLNDTYRLNDGLRIARKLLSDINDLGVPAAGEFLDMITPQYLADFMSWGAIGARTTESQVHRELASGLSCAVGFKNATNGGVKVALDAIGAAEAPHYFLSVTKFGHSAIVSTKGNEDCHIILRGGDKGPNYSAEDVEKVCADIEKTGRIPHVMVDFSHANSSKQYKKQMDVCQDVCNQIAFGSKQIFGVMVESHLVEGRQDLVDGKAQTYGQSITDACIGWEDSERLLQQLSDAVIARRKATSN

SEQ ID NO: 1773 - DNA, 1125 bp, Rubrivivax gelatinosus PM1
  CDS (1)..(1125)
atgaatgccctgtccgccaacgttcccgagggttgggccgcgcccgccgacaagaccagccagaccgatgacgaacggatcgaggacgtgatgccactgccgccgcccgagcacctgatccgcttcttcccggtgcgcggcacgcccgtcgaggagctggtgtccagcacccgccgccgcatccgcgacatcatgcgcggcaatgacgaccgcctgctggtcatcatgggcccgtgctcgatccacgacccggtggcggcggtggactacgcgcgcaagctcaaggcccagcgcgacaagtacgccgacacgctggagatcgtgatgcgcgtgtacttcgagaagccgcgcaccaccgtcggctggaagggcctgatcaatgacccctacctcgacgagagcttccgcatcgacgaaggcctgcgcattgcgcgccagctgctgctggagatcggccgcctcgggctgccggccggcagcgagttcctcgacgtgatctcgccgcagtacatcggcgacctgatctcctggggcgccatcggtgcgcgcaccaccgaaagccaggtccaccgcgagctcgcctcgggcatcagcgcgccgatcggcttcaagaacggcaccgacggcaacatcaagatcgccacggacgccatccagtccgccagccggccgcaccacttcctgtcggtgcacaagaacggccaggtcgcgatcgtcgagacccgcggcaacgccgattgccacgtcatcctgcgcggcggcaagacgccgaactacgacgccagcagtgtcggggcggcctgcgccgaactcggcaaggccgggctgccggcctcgctgatggtcgactgctcccacgccaacagcagcaagcagcaccagaagcagatcgacgtggcgcgcgacgtcgccgaccagttggccggcggcagccgccaggtcttcggcgtgatggtcgagagccacctgagcgccggcgcccagaagttcagcgcgggcaaggacgacccggcgaagctcgcctacggccagagcatcacggacgcctgcatcggctgggacgattcactggaggtgctgggcgtgctcagcgccgcggtggcggcccggcgcggacggggctga

SEQ ID NO: 1774 - protein, 374 aa, Rubrivivax gelatinosus PM1
MNALSANVPEGWAAPADKTSQTDDERIEDVMPLPPPEHLIRFFPVRGTPVEELVSSTRRRIRDIMRGNDDRLLVIMGPCSIHDPVAAVDYARKLKAQRDKYADTLEIVMRVYFEKPRTTVGWKGLINDPYLDESFRIDEGLRIARQLLLEIGRLGLPAGSEFLDVISPQYIGDLISWGAIGARTTESQVHRELASGISAPIGFKNGTDGNIKIATDAIQSASRPHHFLSVHKNGQVAIVETRGNADCHVILRGGKTPNYDASSVGAACAELGKAGLPASLMVDCSHANSSKQHQKQIDVARDVADQLAGGSRQVFGVMVESHLSAGAQKFSAGKDDPAKLAYGQSITDACIGWDDSLEVLGVLSAAVAARRGRG

SEQ ID NO: 1775 - DNA, 1131 bp, Burkholderia vietnamiensis G4
  CDS (1)..(1131): transl_table=11
atgcataacctcgacaatccctcccacgatcgcgaggtaggcagcgccgacgcgacgcaagacacgacccgcatcgacgacgtccgcatcggcgccgtgcgcccgctgatctcgcccgcgctgctgcaggacgagctgccggtgccggccggcacgcagacgctcgtcgaggacacgcggcgcgcgatcggcgacatcctgcacggccgcgacgaccggctgctggtcgtcgtcggcccgtgctcgatccacgaccacgaccaggcgctcgagtacgcgcgccgcctgaaggccgccgccgacgcgctgcaggacgatctgctgatcacgatgcgcgtgtacttcgagaagccgcgcacgacggtcggctggaagggctacatcaacgatccgcgtctggacggcagcttccgcatcaacgaagggctgcgcgcggcacgacagctgctgctcgacatcaacgcgctcggcctgccggcgtcgaccgaattcctcgacctgctgagcccgcagtacatcgcggatctgatcgcgtggggcgccatcggcgcgcgcaccaccgagagccagagccatcgtcagcttgcatcgggcctgagctgcccgatcggcttcaagaacggtaccgacggcggcgtgcaggtcgcggccgatgcgatcgtcgccgcgcgcgcgagccacgcgttcatgggaatgacgaagatgggcatggccgcgatcttcgagacgcgcggcaacgacgacgcgcacgtgatcctgcgcggcggcaagaatggtccgaactacgacgccgagcacgtcgaagcgagctgcgcggtgctgcgcaagagcgggttgcgcgagcaggtgatggtcgattgctcgcatgcgaattcgaacaagtcgcacgagcggcagatcgacgtcgcgcaggatctcgcgcgccagctgtcgcagggcgagcagcgcatcatcggcgtgatggtggagagccatctcgaggccggccgtcaggatctgaagccgggcgtgccgctgaagtacggcgtgtcgatcaccgatgcatgtctgagctggtcgcagacggagccggtgctcgacgtgctcgcgcaagccgtgcggcagcgccgcggcgcgtcgcgcaacgcgtga

SEQ ID NO: 1776 - protein, 376 aa, Burkholderia vietnamiensis G4
MHNLDNPSHDREVGSADATQDTTRIDDVRIGAVRPLISPALLQDELPVPAGTQTLVEDTRRAIGDILHGRDDRLLVVVGPCSIHDHDQALEYARRLKAAADALQDDLLITMRVYFEKPRTTVGWKGYINDPRLDGSFRINEGLRAARQLLLDINALGLPASTEFLDLLSPQYIADLIAWGAIGARTTESQSHRQLASGLSCPIGFKNGTDGGVQVAADAIVAARASHAFMGMTKMGMAAIFETRGNDDAHVILRGGKNGPNYDAEHVEASCAVLRKSGLREQVMVDCSHANSNKSHERQIDVAQDLARQLSQGEQRIIGVMVESHLEAGRQDLKPGVPLKYGVSITDACLSWSQTEPVLDVLAQAVRQRRGASRNA

SEQ ID NO: 1777 - DNA, 1074 bp, Burkholderia vietnamiensis G4
  CDS (1)..(1074): transl_table=11
atgcccccgcacaacaccgacgacgtccgcatccgcgaactcaaggaactgacgccgcccgcccacctgatccgcgaattcgcatgctccgaggccgcgtccgagctgatctacgagtcgcgccgttcgatgcaccggatcctgcacgggatggacgaccggctgatcgtcgtgatcgggccgtgctcgatccacgacacgaaggcggcgctcgaatatgcggggcggctcgtgaaggagcgggagcgcttcaagggcgagctggaaatcgtgatgcgcgtgtacttcgaaaagccgcgcacgacggtcggctggaaggggctgatcaacgatccgcatctcgacaacagcttcaagatcaacgaagggctgcgcacggcgcgcgagctgctgctgcagatcaacgagatggggctgccggccgcgaccgaatacctcgacatgatcagcccgcagtacatcgccgacctgatctcgtggggcgcgatcggcgcgcgcacgaccgagtcgcaggtgcatcgcgaactcgcgtcggggctgtcgtgcccggtcggcttcaagaacggcaccgacggcaacgtgaagatcgccgtcgacgcgatcaaggccgcgtcgcagccgcaccatttcctgtcggtgaccaagggcggccattcggcgatcgtgtcgacggccggcaacgaagactgtcacgtgatcctgcgcggcggcaagacgccgaactacgacgcggacagcgtgaacgccgcctgcgcggacatcggcaaggccggcctcgccgcgcgcctgatgatcgacgcgagccatgcgaacagctcgaagaagcacgagaaccagatcccggtgtgcgcggacatcggccgtcaggtcgccgccggcgacgagcggatcgtcggcgtgatgatcgagtcgcacctcgtcgaggggcgccaggacctgaaggaaggctgcgcgctgacctacggccagagcatcaccgacgcatgcatcgcgtgggacgacagcgtgaaggtgctcgaagggctcgcggaagcggtgaaggcgcgccgcgtcgcacgcggcagcggcaactga

SEQ ID NO: 1778 - protein, 357 aa, Burkholderia vietnamiensis G4
MPPHNTDDVRIRELKELTPPAHLIREFACSEAASELIYESRRSMHRILHGMDDRLIVVIGPCSIHDTKAALEYAGRLVKERERFKGELEIVMRVYFEKPRTTVGWKGLINDPHLDNSFKINEGLRTARELLLQINEMGLPAATEYLDMISPQYIADLISWGAIGARTTESQVHRELASGLSCPVGFKNGTDGNVKIAVDAIKAASQPHHFLSVTKGGHSAIVSTAGNEDCHVILRGGKTPNYDADSVNAACADIGKAGLAARLMIDASHANSSKKHENQIPVCADIGRQVAAGDERIVGVMIESHLVEGRQDLKEGCALTYGQSITDACIAWDDSVKVLEGLAEAVKARRVARGSGN

SEQ ID NO: 1779 - DNA, 1071 bp, Prosthecochloris aestuarii DSM 271
  CDS (1)..(1071): transl_table=11
atgcagcaattacaggatttacgtgtttcaaacattactcgactgactgcaccgcaaaccttcaagcaacgccttccggtgacggaagagattgccagaacggttttagacggtcgcgaggaagttgaaaatattttatccggaaaagattcccggatgcttgttatcgtcggtccgtgttcgattcacgatatcaaggcggcaatggagtatgccgttcgactcaaggctctgcgcgatgaactgaaggatgatctttgtatcgtcatgcgtgtttatttcgagaaaccaaggacaacgatcggctggaaagggtttatcaacgacccgcacctcgatggttcatttgatatcgagcatggattgcattatgcccgcaaactgcttcttgatatcaatgccctggggcttcctacagctacggagtttctcgatccgtttacacctcagtatgtatctgatcttgtcagctgggcggcgattggagcaagaaccatcgagtctcagacacatcgtcagatggccagcggcctgtcgatgccggtagggttcaagaactccaccgatggtcgtattcaggctgccattgatgcattacggtcggccatgcatgctcacagttttcttggtatcgatcaggaggggcacagcagtgtcatcaccacgacgggcaatccgtttggccatattgtgctgcgtggcggttcccagaagccgaactacgatccggacaatattgccgacgctgagcggaggctgcaggcagcacatctgccatctgccattatggttgattgcagtcatgccaattcggggaaaaagcatgaacagcaggccaacgtctgggataatattgtcgaacagcgcgtcaacggtacgacaagtatcatcggcgtgatgatcgaaagtaatctgttctgcggaaatcagccttttcctgacgatccatcttccctgcagtacggtgtttcgattaccgatgcctgcattgcatggaatgaaactgagacgctcttaaggaaaggcgcggtgagacttcatgaagtgcttcgaaaatctgagctttcttaa

SEQ ID NO: 1780 - protein, 356 aa, Prosthecochloris aestuarii DSM 271
MQQLQDLRVSNITRLTAPQTFKQRLPVTEEIARTVLDGREEVENILSGKDSRMLVIVGPCSIHDIKAAMEYAVRLKALRDELKDDLCIVMRVYFEKPRTTIGWKGFINDPHLDGSFDIEHGLHYARKLLLDINALGLPTATEFLDPFTPQYVSDLVSWAAIGARTIESQTHRQMASGLSMPVGFKNSTDGRIQAAIDALRSAMHAHSFLGIDQEGHSSVITTTGNPFGHIVLRGGSQKPNYDPDNIADAERRLQAAHLPSAIMVDCSHANSGKKHEQQANVWDNIVEQRVNGTTSIIGVMIESNLFCGNQPFPDDPSSLQYGVSITDACIAWNETETLLRKGAVRLHEVLRKSELS

SEQ ID NO: 1781 - DNA, 1164 bp, Xylella fastidiosa Dixon
  CDS (1)..(1164): transl_table=11
atgtgtttggcggcttttttattgtctcctccgcttggtctatgtctaaatgttctgagattacatcccatgccaccatttaccgacgacctccgtatccgaaaaattgaaccactgacacctcctaacaagctcctcttgcaactaccatgcgatgagcaggcatcgctgactgttgcgacctcacgcaacgcactgcacgatatcctgcacggccacaacgaccgtttagccgtcgtgataggcccatgctcaatccatgatccaattgcagccattgattacgcgcaacgtctgcacccattgcgagagatgtacaaggatgcactagagatcgtgatgcgggtttactttcagaaaccgcgcaccactattggttggaaaggattggtcaacgatccggatcttgatggcagcttccagatcaataagggcttgcatatcgcgcgcaacctgctgcgcgatatcaatcatctcggcttacccgccggtgtggaatttctagacacgatttcgccgcaatatctggctgacttagtcgcctggggtgccattggtgcacgcaccactgagagccaaatacaccgtgaaatggcttcaggtttatcgtgcccgattggctttaaaaacagtaccagtggtgatgtgaagattgctgctgacgcgattaaagcagcttcgcatccgcaccatttcctttcagtgacaaagacaggtgttgccgcagtcgtcgccacccagggtaaccccgattgtcacgtgattctgcgtggaggcaaggtcccgaattatgacgcaatcaatgtcgaagctgccagccaaacattgcttaaatccaagctaccggtgcgactgatgattgatgcgagccatgccaatagcggcaaaaatccaaacaatcaacctaaggtgatcgagaacatcgtagaacagcttaaagccggtgaacgccgcatcatcggtgtcatgattgaaagccaccttgttggtggtcggcaagaattagtccttggaaacacacttacctatggacagagcattaccgatgcttgcatcgactgggatacctcggtcgcaatgttagaacagctcgctcaggccgtacgcgtcagacagactctaccaacgaccgctacagctaacaaaacatcaaaaacccaataa

SEQ ID NO: 1782 - protein, 387 aa, Xylella fastidiosa Dixon
MCLAAFLLSPPLGLCLNVLRLHPMPPFTDDLRIRKIEPLTPPNKLLLQLPCDEQASLTVATSRNALHDILHGHNDRLAVVIGPCSIHDPIAAIDYAQRLHPLREMYKDALEIVMRVYFQKPRTTIGWKGLVNDPDLDGSFQINKGLHIARNLLRDINHLGLPAGVEFLDTISPQYLADLVAWGAIGARTTESQIHREMASGLSCPIGFKNSTSGDVKIAADAIKAASHPHHFLSVTKTGVAAVVATQGNPDCHVILRGGKVPNYDAINVEAASQTLLKSKLPVRLMIDASHANSGKNPNNQPKVIENIVEQLKAGERRIIGVMIESHLVGGRQELVLGNTLTYGQSITDACIDWDTSVAMLEQLAQAVRVRQTLPTTATANKTSKTQ

SEQ ID NO: 1783 - DNA, 1164 bp, Xylella fastidiosa Ann-1
  CDS (1)..(1164): transl_table=11
atgtgtttggcggcttttttattgtctcctccgcttggtctatgtctaaatgttctgagattacatcccatgccaccatttaccgacgacctccgtatccgaaaaattgaaccactgacacctcctaacaagctcctcttgcaactaccatgcgatgagcaggcatcgctgactgttgcaacctcacgcaacgcactgcacgatatcctgcacggccacaatggccgtttagccgtcgtgataggcccatgctcaatccatgatccaattgcagccattgattactcgcaacgtctacgcccattgcgtgagatgtacaaggatgcactagagatcgtgatgcgagtttactttcagaaaccgcgcaccactattggttggaaaggattggtcaacgatccggatcttgatggcagcttccagatcaataagggcttgcatatcgcgcgcaacctgctgcgcgatatcaatcatctcggcttacccgctggtgtggaatttctagacacgatttcgccgcaatatctggctgacttagtcgcctggggtgccattggtgctcgcaccactgaaagccaaatacaccgtgaaatggcttcaggtttatcgtgcccgattggctttaaaaacagtaccagtggtgatgtgaagattgctgctgacgcgattaaagcagcttcgcatccgcaccatttcctttcagtgacaaagacaggtgttgccgcagtcgtcgccacccagggtaaccccgattgtcacgtgattctgcgtggaggcaaggtcccgaattacgacgcaatcaatgtcgaagctgccagccaaacattgcttaaatccaagctaccggtgcgactgatgattgatgcgagccatgccaatagcggcaaaaatccaaacaatcaacctaaggtgatcgagaacatcgtagaacagcttaaagccggtgaacgccgcatcatcggtgtcatgattgaaagccacattgttggtggccggcaagaattagtccttggaaacacacttacctatggacagagcattaccgatgcttgcatcgactgggatacctcggtcgcaatgttagaacagctcgctcaggccgtacgcgtcagacagactctaccaacgaccgctacagctaacaaaacatcaaaaacccaataa

SEQ ID NO: 1784 - protein, 387 aa, Xylella fastidiosa Ann-1
MCLAAFLLSPPLGLCLNVLRLHPMPPFTDDLRIRKIEPLTPPNKLLLQLPCDEQASLTVATSRNALHDILHGHNGRLAVVIGPCSIHDPIAAIDYSQRLRPLREMYKDALEIVMRVYFQKPRTTIGWKGLVNDPDLDGSFQINKGLHIARNLLRDINHLGLPAGVEFLDTISPQYLADLVAWGAIGARTTESQIHREMASGLSCPIGFKNSTSGDVKIAADAIKAASHPHHFLSVTKTGVAAVVATQGNPDCHVILRGGKVPNYDAINVEAASQTLLKSKLPVRLMIDASHANSGKNPNNQPKVIENIVEQLKAGERRIIGVMIESHIVGGRQELVLGNTLTYGQSITDACIDWDTSVAMLEQLAQAVRVRQTLPTTATANKTSKTQ

SEQ ID NO: 1785 - DNA, 1014 bp, Vibrio sp. Ex25
  CDS (1)..(1014)
atgcctaccccagcagagctaggtagtgtacatcctattacggatgacgttgcagaccgtatcgctcaatctcgtcgtcagattgaaaacattttatcgggtgaagacgatcgccttcttgcgattgtaggtccgtgttctgttcacgacactgaagctgccattgattacgccactcgcctgagtgaaatccaagacaagtacaaagacgaactgtttatcgtgatgcgtacttactttgaaaagcctcgtacagtagttggttggaaaggtttaattaccgaccctaacctagatggctcttacgcgcttgaagctggtctccataaagcacgtaaactactactggatatcaacaagcttggtcttgcgactgctactgagtttcttgatatgattactggtcaatacatagcggatttgatcacgtggggcgcgatcggtgctcgtacaacagaatcgcaaattcaccgtgaaatggcatcggcgctgtcttgcccagttggtttcaaaaatggcacaaatggcaacgtaaaaattgcaattgatgcaattcgcgcatcgaaagcctcgcattacttctactctccagataagaatggccgcatgacggtttaccgtacaagtggtaacccatatggtcatattattttacgcggcggagagaaaggccctaactttgatgaagcgtcagtaaaacaagcgtgtgatgctctagccgagtttggcttgccacaacgtttggttgtggatttcagccacgcaaactgtcagaagcagcacagaaaacaaatcgacgttgctcaagacatttgtaaccaaattaagtcaggcagtactcgtattgcgggtatcatggctgaaagctttattcttgaaggcaatcagccaatgactgacatcaacaacctaacgtatggtcaatctattacagacccatgcctaggctgggaagatactgctacaatgctagatatgctggcaaacgccgttaaatcccgaaagtccctataa

SEQ ID NO: 1786 - protein, 337 aa, Vibrio sp. Ex25
MPTPAELGSVHPITDDVADRIAQSRRQIENILSGEDDRLLAIVGPCSVHDTEAAIDYATRLSEIQDKYKDELFIVMRTYFEKPRTVVGWKGLITDPNLDGSYALEAGLHKARKLLLDINKLGLATATEFLDMITGQYIADLITWGAIGARTTESQIHREMASALSCPVGFKNGTNGNVKIAIDAIRASKASHYFYSPDKNGRMTVYRTSGNPYGHIILRGGEKGPNFDEASVKQACDALAEFGLPQRLVVDFSHANCQKQHRKQIDVAQDICNQIKSGSTRIAGIMAESFILEGNQPMTDINNLTYGQSITDPCLGWEDTATMLDMLANAVKSRKSL

SEQ ID NO: 1787 - DNA, 1059 bp, Shewanella sp. ANA-3
  CDS (1)..(1059): transl_table=11
atgtattaccaaaatgatgacgttcgcattaatgaagtcaaagagttacttccaccgattgcgattctagaacgatttcctgcttccgaaaacgctgctgcaactgtgtttaacgcccgtcaaagtatccataacattctcgctcgccaagatgatcgtttgttagtcgtcattggtccttgctcaatccatgatcctaaggccgcattggaatacggccagcgactggttgcgctaagagaacgttatcgagatcagctcgaagtggtgatgcgtgtttattttgaaaagccgcgtaccacagtgggttggaagggactcatcaacgatccttatatggataacagcttcaaactgaacgatggtttgcgtaccgcgcgtaaactcttggtcgatttgaatgactcaggcatgcctaccgcgggtgaattcctcgatatgatcaccccgcaatatgtggcggatatgatgtgctggggcgccatcggcgcgcgcaccacagaatcgcaggtacaccgcgagctggcctcggggctgtcttgccctgtaggctttaaaaatggtaccgatggcacgattaaggtggcaatcgatgccattggcgccgcgaatgcgccgcaccacttcttatcggtaaccaaatttggccattcggcgattgtgtcgactaaaggtaatcctgattgccatatcattctgcgcggcggccgtgagccaaattacagtgccagccatgtggcgcagatcagcgaacaactgaaaaaggccaagctggtcgataacataatgatcgatttcagccatgccaacagcagcaaacaatatcaacgccaaatggaagtcgcgaacgatgtggccgaacaaatggctgcgggtaataaggcgattttcggtgtgatggtcgaaagccacttagtggaagggcgtcaggatctgattgaaggtcaagcgttatgctacggtcagagcatcacagatgcctgtattggttgggacgataccgagcgtttactcgcagtgttaaatcagagtgttatcgaacgtcgtcagcgggtttaa

SEQ ID NO: 1788 - protein, 352 aa, Shewanella sp. ANA-3
MYYQNDDVRINEVKELLPPIAILERFPASENAAATVFNARQSIHNILARQDDRLLVVIGPCSIHDPKAALEYGQRLVALRERYRDQLEVVMRVYFEKPRTTVGWKGLINDPYMDNSFKLNDGLRTARKLLVDLNDSGMPTAGEFLDMITPQYVADMMCWGAIGARTTESQVHRELASGLSCPVGFKNGTDGTIKVAIDAIGAANAPHHFLSVTKFGHSAIVSTKGNPDCHIILRGGREPNYSASHVAQISEQLKKAKLVDNIMIDFSHANSSKQYQRQMEVANDVAEQMAAGNKAIFGVMVESHLVEGRQDLIEGQALCYGQSITDACIGWDDTERLLAVLNQSVIERRQRV

SEQ ID NO: 1789 - DNA, 1065 bp, Shewanella sp. ANA-3
  CDS (1)..(1065): transl_table=11
atgaccattaaaacagacgaattacgcacttccttattagctaaagtcatctcacctgcacaactggcatctgagtacccgttaacccaagatgcagccgattatctcgttcagcaacgtcgtgaagtcgaagccattattatgggcgaagatcaacgcctattagtgatcattggcccctgctccatccatgatactcaagccgccctcgactacgctcgccgtttagcagtattgcatcaagagttgaaggacgatctctgcattttaatgcgcgtatattttgaaaagccacgcactatcgtcggttggaaagggttaatctccgatcctgatttagacggcagcttcgagccaaataaaggtttacgtattgcacgcgagttattgcagcaaatcacagagctcaaattaccgattgccaccgaatttttagatatggtgaacggtcaatacattgccgacctaatcacctggggcgctatcggtgcccgcaccaccgaaagccaagtccaccgcgaaatggcctcggcactctcctgccccgtgggctttaaaaacggtaccgatggcaatattaatatcgccgtcgatgcggtgcgcgcagcaaaagtgccacatatcttctattcgcctgataaagacggtgccatgtctgtctatcgcacccatggtaatccttacggccacatcattttacgtggcggtaaaaagccgaattactttgagcaagacattgaagaagcaagattaaaacttgagtctgtcgatgtaacaccacgtatggtggttgattttagccatggtaatagcgaaaagaatcacctgaagcagttagttgttgccgacaatatcatggcgcaaatgcgcgcaggcagcacggcaattgcgggggtgatggccgaaagtttcttacaggaaggcaatcaaaaagtggttgagggtcaacctctgtgttacggccaaagcatcacagatgcgtgcctgcattgggatgactcggaaaagttactgcgcgatctggctaaagcctcccgcgatagacgtgagtttctcggcaaataa

SEQ ID NO: 1790 - protein, 354 aa, Shewanella sp. ANA-3
MTIKTDELRTSLLAKVISPAQLASEYPLTQDAADYLVQQRREVEAIIMGEDQRLLVIIGPCSIHDTQAALDYARRLAVLHQELKDDLCILMRVYFEKPRTIVGWKGLISDPDLDGSFEPNKGLRIARELLQQITELKLPIATEFLDMVNGQYIADLITWGAIGARTTESQVHREMASALSCPVGFKNGTDGNINIAVDAVRAAKVPHIFYSPDKDGAMSVYRTHGNPYGHIILRGGKKPNYFEQDIEEARLKLESVDVTPRMVVDFSHGNSEKNHLKQLVVADNIMAQMRAGSTAIAGVMAESFLQEGNQKVVEGQPLCYGQSITDACLHWDDSEKLLRDLAKASRDRREFLGK

SEQ ID NO: 1791 - DNA, 1059 bp, Shewanella sp. MR-7
  CDS (1)..(1059): transl_table=11
atgtattaccaaaatgatgacgttcgcattaatgaagtcaaagagttacttccaccgattgcgattctagaacgatttcctgcctccgaaaacgctgctgcaactgtgtttaacgcccgtcaaagcattcataacattcttgcccgccaagatgatcgtttgttagtggtcattggtccttgctcaattcacgatcctaaggccgcattggaatatggccagcgactggttgcgctcagagaacgttatcaagatcagcttgaagtggtgatgcgtgtttattttgaaaagccacgtactacagtgggttggaagggactcatcaacgatccttatatggataacagcttcaaactgaacgatggtttacgtaccgcgcgtaaacttttagtcgatttgaatgactctggcatgcctaccgcaggtgagtttctcgatatgatcactccgcaatatgtggcggatatgatgtgctggggcgcgattggtgcgcgcaccacagaatcgcaggtgcaccgtgaattagcgtctgggttatcttgccctgtaggctttaaaaatggcaccgatggcacgatcaaggtggcgattgatgccattggcgccgcgaatgcgccgcaccactttttatcggtgaccaaatttggccattcggcgattgtgtcgaccaaaggtaatcctgattgccatatcattttgcgtggcggccgtgagcctaattacagtgccagccatgttgcgcagatcagcgaacaactgaaaaaagccaagcttgtcgacaacattatgatcgactttagccatgccaatagcagcaaacaatatcaacgccaaatggatgtcgcgaacgatgtggccgagcaagtggccgcgggtaataaggcgatttttggtgtgatggttgaaagccacttagtggaaggtcgccaagatctgattgaaggtcaggcgctatgttatggccagagcgttacggatgcctgtattggctgggatgataccgagcgtctgttagcggtgttaaatcagagcgttattgcacgccgccagcgggtctag

SEQ ID NO: 1792 - protein, 352 aa, Shewanella sp. MR-7
MYYQNDDVRINEVKELLPPIAILERFPASENAAATVFNARQSIHNILARQDDRLLVVIGPCSIHDPKAALEYGQRLVALRERYQDQLEVVMRVYFEKPRTTVGWKGLINDPYMDNSFKLNDGLRTARKLLVDLNDSGMPTAGEFLDMITPQYVADMMCWGAIGARTTESQVHRELASGLSCPVGFKNGTDGTIKVAIDAIGAANAPHHFLSVTKFGHSAIVSTKGNPDCHIILRGGREPNYSASHVAQISEQLKKAKLVDNIMIDFSHANSSKQYQRQMDVANDVAEQVAAGNKAIFGVMVESHLVEGRQDLIEGQALCYGQSVTDACIGWDDTERLLAVLNQSVIARRQRV

SEQ ID NO: 1793 - DNA, 1065 bp, Shewanella sp. MR-7
  CDS (1)..(1065): transl_table=11
atgaccattaaaacagacgaattacgcacttccttattagctaaagtcatctcacctgcacaactggcatctgagtacccgttaacccaagatgcagccgattacctcgtacaacaacgtcgtgaagtcgaagccattattatgggcgaagaccagcgcctattggtgatcattggcccctgctctatccatgatactcaagccgccctcgactatgctcgtcgtttagcagtgctgcaccaagagttaaaggacgatctctgcattttaatgcgtgtgtattttgaaaaaccacgcactatcgtcggttggaaggggttaatctccgatcctgatttagatggcagcttcgagccaaataaaggtttacgtattgcccgtgagttactgcagcaaattactgaactgaagttaccgattgccaccgaatttttagatatggtgaacgggcaatatattgccgacttaatcacctggggcgccattggtgcccgtaccaccgaaagccaagtgcaccgtgaaatggcctcggcgctctcctgccccgttggctttaaaaacggtaccgatggcaatattaatatcgccgtcgatgcggtgcgcgcagcaaaagtgccacatatcttctattcaccggataaagatggcgctatgtctgtctatcgcacccatggtaatccttacgggcatatcattttacgtggcggcaaaaaaccgaattactttgagcaagatattgaagaagcaagattaaagcttgagtcggtcaatgtgacgccgcgcgtggtagtcgattttagccacggcaacagtgaaaagaatcacttaaaacagttagtcgttgccgataatatcatggcgcaaatgcgcgcgggcagcacggcgattgccggggtgatggcagaaagtttcttacaggaaggcaatcaaaaagtggttgagggtcaacctctgtgttacggccaaagcatcacagatgcttgcctgcattgggatgactcggagaaattactgcgcgatctggctaaagcctcccgtgatagacgtgagttcctcggcaaataa

SEQ ID NO: 1794 - protein, 354 aa, Shewanella sp. MR-7
MTIKTDELRTSLLAKVISPAQLASEYPLTQDAADYLVQQRREVEAIIMGEDQRLLVIIGPCSIHDTQAALDYARRLAVLHQELKDDLCILMRVYFEKPRTIVGWKGLISDPDLDGSFEPNKGLRIARELLQQITELKLPIATEFLDMVNGQYIADLITWGAIGARTTESQVHREMASALSCPVGFKNGTDGNINIAVDAVRAAKVPHIFYSPDKDGAMSVYRTHGNPYGHIILRGGKKPNYFEQDIEEARLKLESVNVTPRVVVDFSHGNSEKNHLKQLVVADNIMAQMRAGSTAIAGVMAESFLQEGNQKVVEGQPLCYGQSITDACLHWDDSEKLLRDLAKASRDRREFLGK

SEQ ID NO: 1795 - DNA, 1059 bp, Shewanella sp. MR-4
  CDS (1)..(1059): transl_table=11
atgtattaccaaaatgatgacgttcgcattaatgaagtcaaagagttacttccaccaattgcgattctagaacgatttcctgcctccgaaaacgctgctgcaactgtgtttaacgcccgtcaaagcattcataacattcttgcccgccaagatgatcgtttgttagtggtcattggtccttgctcaattcacgatcctaaggccgcattggaatatggccagcgattggttgcgctcagagaacgttatcaagatcagctcgaagtggtgatgcgtgtttattttgaaaagccgcgtactacagtgggttggaagggactcatcaacgatccttatatggataacagcttcaaactgaacgatggtttgcgtaccgcgcgtaaacttttagtcgatttgaatgactctggcatgccgaccgcgggtgagtttctcgatatgatcactccgcaatatgtggcggatatgatgtgctggggcgcgattggtgcgcgcaccactgaatcgcaggtgcaccgtgaattagcgtctgggttgtcttgccctgtaggctttaaaaatggcaccgacggcacgatcaaggtggcgattgatgccattggcgccgcgaatgcgccgcaccacttcttatcggtaaccaaatttggccattcggcgattgtgtcgaccaaaggtaatcctgattgccatatcattctgcgtggtggccgtgagcctaattacagtgccagccatgttgcgcagatcagcgaacaactgaaaaaggccaagcttgtcgataacattatgatcgactttagccatgccaatagcagcaaacaatatcaacgccagatggatgtcgcgaacgatgtggccgagcaagtggccgcgggtaataaggcaattttcggtgtgatggttgaaagccacttagtggaaggtcgccaagatctgattgaaggccaggcgttatgttatggccagagtattacggatgcctgtattggctgggatgataccgagcgtctgttagatgtgttaaatcagagcgttattgcacgccgccagcgggtctaa

SEQ ID NO: 1796 - protein, 352 aa, Shewanella sp. MR-4
MYYQNDDVRINEVKELLPPIAILERFPASENAAATVFNARQSIHNILARQDDRLLVVIGPCSIHDPKAALEYGQRLVALRERYQDQLEVVMRVYFEKPRTTVGWKGLINDPYMDNSFKLNDGLRTARKLLVDLNDSGMPTAGEFLDMITPQYVADMMCWGAIGARTTESQVHRELASGLSCPVGFKNGTDGTIKVAIDAIGAANAPHHFLSVTKFGHSAIVSTKGNPDCHIILRGGREPNYSASHVAQISEQLKKAKLVDNIMIDFSHANSSKQYQRQMDVANDVAEQVAAGNKAIFGVMVESHLVEGRQDLIEGQALCYGQSITDACIGWDDTERLLDVLNQSVIARRQRV

SEQ ID NO: 1797 - DNA, 1089 bp, Synechococcus sp. RS9917
  CDS (1)..(1089): transl_table=11
atgaccaccacctccgatctgcatgtggtggagaaccgcccactggtggctccagctctgttgcatgcggatctcagaaccgatgcggcggccacagccacggtggcgggcacccgcaggaccattcagtccatcctccgcggcgacgatcagcgactgctggtgatcgtcggcccctgctcggtgcacgatgtggaggcggcgcgggagtacgcgtgtcgtctggcgccgctgcgcgagcggcatgccgccgaactggaagtggtgatgcgggtgtatttcgagaaaccgcgtaccaccgtgggttggaaagggctgatcaatgacccgcacctcgatggctcttacgacatcaacaccggcctgcgtctggcgcgcgctctgctgctcgacctggcccgcgccggcatgccggcggccacggagctgctcgatccggtggtgccccaatacatcgccgacctgatcagctggacggccatcggcgcccggaccaccgaaagccagacccaccgcgagatggcctcaggtctgtcgatgccggttggctacaaaaacagcaccgatggcagtgtcaccatcgccattcacgcgatccaggcggcatccaggccccatcattttctgggcatcaacgggcagggcattgcctcgatcgtgagcaccaccggcaacccggatggccatctcgtgctgcgaggcggcagccggggaaccaactatcacctggatgcggtgcaggagtcggcggcggccctggcggcggcaggcctgcccgatcgtttgatggtggattgcagccatggcaattccaacaaggattaccggcgccagggtgaggtgctggaggcggtggctgcccaggtgcggcagggttccgaccatgtgatgggcgtgatgctggagagccatctggtggaaggcaaccagaagctcaatgccgatcgcacggcgatgacctacggccagagcatcaccgatgcctgcatcagcatcgacaccaccgaaagcttgctggagcagttggcagcggcggtggcggcgggccggccgttggcactctcgcggcaagagtgccagcttgcttga

SEQ ID NO: 1798 - protein, 362 aa, Synechococcus sp. RS9917
MTTTSDLHVVENRPLVAPALLHADLRTDAAATATVAGTRRTIQSILRGDDQRLLVIVGPCSVHDVEAAREYACRLAPLRERHAAELEVVMRVYFEKPRTTVGWKGLINDPHLDGSYDINTGLRLARALLLDLARAGMPAATELLDPVVPQYIADLISWTAIGARTTESQTHREMASGLSMPVGYKNSTDGSVTIAIHAIQAASRPHHFLGINGQGIASIVSTTGNPDGHLVLRGGSRGTNYHLDAVQESAAALAAAGLPDRLMVDCSHGNSNKDYRRQGEVLEAVAAQVRQGSDHVMGVMLESHLVEGNQKLNADRTAMTYGQSITDACISIDTTESLLEQLAAAVAAGRPLALSRQECQLA

SEQ ID NO: 1799 - DNA, 1074 bp, Synechococcus sp. WH 5701
  CDS (1)..(1074): transl_table=11
atgctcaccacctccgacctccacatcgtggagacacggccgctggtggcaccggcggttctccatcgcgaactgcccctgagccagacggcggcccgcaccgtgcttgacgcccgtgagcggatcaaggcgattctgcatgggcaggattcccgcctgctggtgatcgtcggtccctgctcggtgcacgacgtggaggccgccagagcctatgccgatgccatcgccgaggtgcgtgagcgccaccgcgaccagctggaggtggtgatgcgggtgtacttcgagaagccccgcaccaccgtgggctggaagggcctgatcaacgatccccacctcgacggcagctacgacatcaacaccggcctgcgcctggcgcggggcctgctggtgcacctggccgagatggggctgcccgccgcaaccgagctgctcgatccggtggtgccccagtacatcgccgacctgatcggctggacagcgatcggggcgcgcaccaccgaaagccagacccaccgggagatggcctcgggcctgtcgatgccgatcggcttcaagaacggcaccgacggcagcgccgtcacggccatccatgccatgcaggccgcctccaagccccaccatttcctgggcatcagccagctgggccatgccgcgatcgtctccaccaccggcaaccccgatggccatctggtgctgcgcggcggtaagggaggcaccaattaccacccggaggcgatcgagcaggcggcccttgcgctgcagaaggagggtctcccggcgaggctgatggtcgactgcagtcacggcaactccaacaaggactaccggcgccagggggaggtgctcgccgaggtggccggccaggtgcgcggtgggtccagccatgtgatgggggtgatgatcgaaagtcacctggtggccggcaatcagaagatcccagccgatctgagccagctcgcttacggccagagcatcaccgatgcctgcatcgacctggagaccacccgcacggtccttgacggtctggccgaagccgtggcagaggcccaggccgccaacctggcgccggtctga

SEQ ID NO: 1800 - protein, 357 aa, Synechococcus sp. WH 5701
MLTTSDLHIVETRPLVAPAVLHRELPLSQTAARTVLDARERIKAILHGQDSRLLVIVGPCSVHDVEAARAYADAIAEVRERHRDQLEVVMRVYFEKPRTTVGWKGLINDPHLDGSYDINTGLRLARGLLVHLAEMGLPAATELLDPVVPQYIADLIGWTAIGARTTESQTHREMASGLSMPIGFKNGTDGSAVTAIHAMQAASKPHHFLGISQLGHAAIVSTTGNPDGHLVLRGGKGGTNYHPEAIEQAALALQKEGLPARLMVDCSHGNSNKDYRRQGEVLAEVAGQVRGGSSHVMGVMIESHLVAGNQKIPADLSQLAYGQSITDACIDLETTRTVLDGLAEAVAEAQAANLAPV

SEQ ID NO: 1801 - DNA, 1065 bp, Synechococcus sp. WH 7805
  CDS (1)..(1065): transl_table=11
atgaccaccacacacgaccttcatgtggtggacaccaggcctctggttcctcccgccttgctgcatggagatctgccgattgatgccagggcgacggagaccgtggccacctcgcgcagccgaattcaagccattctcaggggtctggaccggcgactgctggtgatcgtcggcccctgctctattcatgatgtggatgcagcgagggagtacgccagcaaactggctcccctgcgtgaacgtcatgcctctgagctcgaggtggtgatgcgtgtgtacttcgagaagccacgcaccacggtgggatggaagggcctcatcaatgatccgaacctcgacggctcctacgacatcaacacggggttgcgaatggctcggtcgttactgctcgatttggccagggatggaatgccctgtgccactgaactgctcgatcctgtagttcctcagtacatcgctgatctgatcagttggacggcgatcggcgcccgtaccaccgaaagccagacgcaccgcgaaatggcttcaggcttgtcgatgccgatcggctacaaaaacagcaccgacggcagtgccaccattgccatcaacgccatgcaggccgcgtccaaaccccatcattttcttgggatcaatcgcgaggggcatgcatcgatcgtgagcaccaccggaaatccggatggtcatctggtgctgcggggagggaaccgaggcacgaattaccatctcgaggcgattcaggatgctgctgaagaattgaaagcagcgggactacccgaccggttgatggtcgattgcagtcatggcaactccaacaaggattatcgccggcaaggtgatgtgttgaaagctgtggcagctcaggtggaacaggggtcagcgcatgtgatgggtctgatgctcgaaagccatcttgttgagggcaaccaaaagatcagttcggatcgttcagcactgacccatggccaaagcgtcacggacgcatgcatcagcattgagacgacagcggagctgctggagggtttggctgattcgctgaagaaagttggcactcgtgttgcttga

SEQ ID NO: 1802 - protein, 354 aa, Synechococcus sp. WH 7805
MTTTHDLHVVDTRPLVPPALLHGDLPIDARATETVATSRSRIQAILRGLDRRLLVIVGPCSIHDVDAAREYASKLAPLRERHASELEVVMRVYFEKPRTTVGWKGLINDPNLDGSYDINTGLRMARSLLLDLARDGMPCATELLDPVVPQYIADLISWTAIGARTTESQTHREMASGLSMPIGYKNSTDGSATIAINAMQAASKPHHFLGINREGHASIVSTTGNPDGHLVLRGGNRGTNYHLEAIQDAAEELKAAGLPDRLMVDCSHGNSNKDYRRQGDVLKAVAAQVEQGSAHVMGLMLESHLVEGNQKISSDRSALTHGQSVTDACISIETTAELLEGLADSLKKVGTRVA

SEQ ID NO: 1803 - DNA, 1059 bp, Photobacterium sp. SKA34
  CDS (1)..(1059): transl_table=11
atgccaatgaaaacagatgaacttcgcaccgtgagtttaggcttgatgccaactccagctgaaattgaagcaacatcaccaatgactgatgaaattgcggcgcatgtagatcactcccgcaaacagattgaggcgattttaacgggtcaagattcccgtttactggtgattgttggaccatgttctatacatgataccgatgcagcagttgattatgcgaaacgccttgttgctgtacaagaaacatataaagaccaattgtttatcgtaatgcgtacctatttcgaaaaaccacgtaccgtggtcggctggaaaggtttagttacggatcctcatttagatggcagtttagacttagtaactggtttagaaaaagcacgcaaactattaattgatattaactcactaggcttacccactgcgactgaattcctcgatatgatcactggtcaataccttgctgatcttatcagttggggtgccattggtgcgcgtactacagaatctcagatccaccgtgaaatggcatcagcactgtcttgccctgttggctttaaaaacggcacagacggtaatacaaaaattgcgattgatgctattcgcgccactcgtgaatctcaccttttctgttcaccggcaaaaaatggacaaatgacgatttaccgtacttccggtaacccttacggtcatattattttacgtggcggtaagatgccaaattatcacgctgaagacgtcgcaacagcatgtgaggcattagccgagtttgaattaccacagagattaattgtcgattttagtcatggcaactgccaaaaacagcataaacgtcaattagatgtcacagctgaaatttgtgaacaattaaaaaatagtagccagtctattgcgggtatcatggcagaaagctttattgaagaagggaatcaagcagttattgaaaacaaacttgatgagcttgtttacggtaaatctattactgacccttgtattcactggaacgacacgcttaagatgctcgatatgctagcggatgccgttaaaacagcacaacgctaa

SEQ ID NO: 1804 - protein, 352 aa, Photobacterium sp. SKA34
MPMKTDELRTVSLGLMPTPAEIEATSPMTDEIAAHVDHSRKQIEAILTGQDSRLLVIVGPCSIHDTDAAVDYAKRLVAVQETYKDQLFIVMRTYFEKPRTVVGWKGLVTDPHLDGSLDLVTGLEKARKLLIDINSLGLPTATEFLDMITGQYLADLISWGAIGARTTESQIHREMASALSCPVGFKNGTDGNTKIAIDAIRATRESHLFCSPAKNGQMTIYRTSGNPYGHIILRGGKMPNYHAEDVATACEALAEFELPQRLIVDFSHGNCQKQHKRQLDVTAEICEQLKNSSQSIAGIMAESFIEEGNQAVIENKLDELVYGKSITDPCIHWNDTLKMLDMLADAVKTAQR

SEQ ID NO: 1805 - DNA, 1053 bp, Oceanobacter sp. RED65
  CDS (1)..(1053): transl_table=11
atgcacgcacaaactgacgatttacgcattcgaaatgttaaagaattgttaccccccatcgcgttactcgaaaaattcccattgtctagtgaggcggccgatacagtagcccaggctcgtagcgacatacaatctcgtttacaaaacaaagatgatcgattacttgtgattattggtccatgttcgattcatgaccctcaagctgcacttgagtacgctgggcgcctaatccgcatgcgtgagaaatacaaagatcaattaaatatcgtcatgcgtgtgtattttgaaaagcctcgtactactgtgggctggaaaggcttaattaatgatccgtacttggataatagttttgccatcaacgatggtttgcgtttggcgcgaaagctattgttggatctcaatgatatgggcatgcccgcagcaaccgaatttctcgatatgattacgccccagtacatcgcagacttaatctgttggggagccattggtgcgcgtacgacagaatctcaagtgcatcgtgaattggcatccggtttatcctgcccagtcggttttaaaaacggtactgatggcacaagtaaaattgctttggatgccattggcgcagctgctgcttctcaccattttttatcagtgacaaagtttggtcatagtgcgattgttgaaacggaaggaaatcctgattgccacatcattttacgtggtggtaaagagccaaactatgatgaagagagcgtgacggcaattgctaaagatttagaaaagaaaaacctgccgcagaatattatggtggacttcagtcatgccaatagtcaaaagcagtttaaaaagcaaatggaagtggctacagatgttgctcgtcagatagcgaagggcgatagtccaattatgggggtgatggtggaaagtcacctagaagaaggacgtcaggatttagaagacaaaggcagtttacactatggtcaaagcatcactgatgcatgtatcggttggccagatacggaagagctgttggcgacgctggcgaacgctgtagagcaatctcgtaaatag

SEQ ID NO: 1806 - protein, 350 aa, Oceanobacter sp. RED65
MHAQTDDLRIRNVKELLPPIALLEKFPLSSEAADTVAQARSDIQSRLQNKDDRLLVIIGPCSIHDPQAALEYAGRLIRMREKYKDQLNIVMRVYFEKPRTTVGWKGLINDPYLDNSFAINDGLRLARKLLLDLNDMGMPAATEFLDMITPQYIADLICWGAIGARTTESQVHRELASGLSCPVGFKNGTDGTSKIALDAIGAAAASHHFLSVTKFGHSAIVETEGNPDCHIILRGGKEPNYDEESVTAIAKDLEKKNLPQNIMVDFSHANSQKQFKKQMEVATDVARQIAKGDSPIMGVMVESHLEEGRQDLEDKGSLHYGQSITDACIGWPDTEELLATLANAVEQSRK

SEQ ID NO: 1807 - DNA, 1248 bp, Corynebacterium glutamicum
  CDS (101)..(1228)
tagttgtgccacctaaaacgcgaacagaaccggagtcgagcagcacctccccgcaagggtagaggggctgcttttttgtttcctaaattcaccccatcccatgcatagccctgaaaggcaagaaaaaatgagttctccagtctcactcgaaaacgcggcgtcaaccagcaacaagcgcgtcgtggctttccacgagctgcctagccctacagatctcatcgccgcaaacccactgacaccaaagcaggcttccaaggtggagcaggatcgccaggacatcgctgatatcttcgctggcgacgatgaccgcctcgttgtcgttgtgggaccttgctcagttcacgatcctgaagcagccatcgattacgcaaaccgcctggctccgctggcaaagcgccttgatcaggacctcaagattgtcatgcgcgtgtacttcgagaagcctcgcaccatcgtcggatggaagggattgatcaatgatcctcacctcaacgaaacctacgacatcccagagggcttgcgcattgcgcgcaaagtgcttatcgacgttgtgaaccttgatctcccagtcggctgcgaattcctcgaaccaaacagccctcagtactacgccgacactgtcgcatggggagcaatcggcgctcgtaccaccgaatctcaggtgcaccgccagctggcttctgggatgtctatgccaattggtttcaagaacggaactgacggaaacatccaggttgcagtcgacgcggtacaggctgcccagaacccacacttcttcttcggaacctccgacgacggcgcgctgagcgtcgtggagaccgcaggcaacagcaactcccacatcattttgcgcggcggtacctccggcccgaatcatgatgcagcttcggtggaggccgtcgtcgagaagcttggtgaaaacgctcgtctcatgatcgatgcttcccatgctaactccggcaaggatcatatccgacaggttgaggttgttcgtgaaatcgcagagcagatttctggcggttctgaagctgtggctggaatcatgattgagtccttcctcgttggtggcgcacagaaccttgatcctgcgaaattgcgcatcaatggcggtgaaggcctggtgtacggacagtctgtgaccgataagtgcatcgatattgacaccaccatcgatttgctcgctgagctggccgcagcagtaagggaacgccgagcagcagccaagtaattaagggcgctagactgtta

SEQ ID NO: 1808 - protein, 375 aa, Corynebacterium glutamicum
MHSPERQEKMSSPVSLENAASTSNKRVVAFHELPSPTDLIAANPLTPKQASKVEQDRQDIADIFAGDDDRLVVVVGPCSVHDPEAAIDYANRLAPLAKRLDQDLKIVMRVYFEKPRTIVGWKGLINDPHLNETYDIPEGLRIARKVLIDVVNLDLPVGCEFLEPNSPQYYADTVAWGAIGARTTESQVHRQLASGMSMPIGFKNGTDGNIQVAVDAVQAAQNPHFFFGTSDDGALSVVETAGNSNSHIILRGGTSGPNHDAASVEAVVEKLGENARLMIDASHANSGKDHIRQVEVVREIAEQISGGSEAVAGIMIESFLVGGAQNLDPAKLRINGGEGLVYGQSVTDKCIDIDTTIDLLAELAAAVRERRAAAK

SEQ ID NO: 1809 - DNA, 1572 bp, Xanthomonas oryzae pv
  CDS (1)..(1572): transl_table=11
gtgtcgaaacacgcgcggccgtttgaagtggcgatgcgccgggcggactgtgagatttaccgaggcggccggtgcgatcattgcttgattgtttgttcgcatcgagccgattggctgcagcgatgtcgccgctcgacaggggggcatcggccctgcaacctgtgcccaaatcactgctgcaacggtaattgcgctcctctgtacgtgtctgccagcagctgcaaaggacggttgcccaaccccgtccccggttccgttgccgatgaaacagtagcaacgcgcaaatgtgcgtggtatcaatgcacgcatgaacgcaccccgcagccagttttatttttggtactacggttttccaatgccgctggcggaggaaggattgcgctcaccctgaaggacacttcagcagcattcccaaaaagccgccagcgcacactggcggcttttttgttgccgccttgcctggctccccgatgcaacaccgcccaccgagacactgttatgccgcctgtgaccgatgacctgcgtatccgcaagatcgaagccctcgcaccgccttcgcagctgctgtcgctgctgccctgcgatgagcgcgcctccgaaaccgtgaccaacgcgcgcgctgcgctgcacaagatcctgcacgggcgcgacgaccgcctggcggtggtgatcgggccctgctcgatccacgacccggtggcggcgatggagtacgcgcagcgcctgcgcccattgcgtgaccaattcggcgacgcgctggagatcgtgatgcgggtgtacttcgaaaagccgcgcaccaccatcggctggaagggcctgatcaacgacccggatctggatggcagcttccagatcaacaaaggcctacgcgtagcgcgcggcttgctgcgcgacatcaacaatctcggcttgccggccggcgtggaatttctcgacatcatttcgccgcaatacatcgccgatctggtggcctggggcgcgatcggtgcccgcaccaccgagagccaggtgcatcgcgaaatggcgtccggcctgtcgtgcccggtgggcttcaagaacggcaccagcggcgacgtcaagattgcggtggacgcggtaggcgcggcctcgcatccgcatcatttcctggccgtgaccaaggacggacataccgccgtggcagccacggcaggcaatccggattgccacgtgattctgcgcggcggcaagcagcccaacttcgatgcagccaatgtggaagcggccagccaggtgctcaacaagtcgggcttgccggcgcgcctgatgatcgatgccagccacgccaacagcagcaagaaccccgagaaccagcccaaggtcatcgacgacatcagcaatcagctggaagcaggcgaaacgcgcatcgttggcgtgatggtggaaagtcaccttgtcggagggcgccaggaattgctgccgggttgcgcgctgacctacgggcagagcatcaccgatggctgcatcggttgggatacgtcggtgcaggtgctggaacgtctggcgacagcagtgcgcgcgcggcgtgcgcgacggattgccgaggctgcgtga

SEQ ID NO: 1810 - protein, 523 aa, Xanthomonas oryzae pv
MSKHARPFEVAMRRADCEIYRGGRCDHCLIVCSHRADWLQRCRRSTGGHRPCNLCPNHCCNGNCAPLYVSASSCKGRLPNPVPGSVADETVATRKCAWYQCTHERTPQPVLFLVLRFSNAAGGGRIALTLKDTSAAFPKSRQRTLAAFLLPPCLAPRCNTAHRDTVMPPVTDDLRIRKIEALAPPSQLLSLLPCDERASETVTNARAALHKILHGRDDRLAVVIGPCSIHDPVAAMEYAQRLRPLRDQFGDALEIVMRVYFEKPRTTIGWKGLINDPDLDGSFQINKGLRVARGLLRDINNLGLPAGVEFLDIISPQYIADLVAWGAIGARTTESQVHREMASGLSCPVGFKNGTSGDVKIAVDAVGAASHPHHFLAVTKDGHTAVAATAGNPDCHVILRGGKQPNFDAANVEAASQVLNKSGLPARLMIDASHANSSKNPENQPKVIDDISNQLEAGETRIVGVMVESHLVGGRQELLPGCALTYGQSITDGCIGWDTSVQVLERLATAVRARRARRIAEAA

SEQ ID NO: 1811 - DNA, 1107 bp, Debaryomyces hansenii
  CDS (1)..(1107)
atgagtaaaacaccaatcccagacgaatacgatgataccaggattttaggatacgatcctttgataccacctgcgttattacagcacgaaatcagagcaagtaaagaatcattggacgttgtgatcagaggacgtattgaatcatcagagattataagcggaaaggatgaccgttgtttggtcattgttggaccatgttctatccatgacactgaagcagcattggaatatgctaccagattgaagaagttgtcgttggaattggaaaatgacttagtaattgtcatgagagcatacttggaaaagccaagaactaccgttggttggaaagggttgatcaacgacccagatgtggacaactcgtttgatatcaacagagggttaagaatctcccgtcagttatactctgatttgaccggcaagactggcttaccaattggttccgagatgttggataccatttctccacaatacttctcagactttttgagttttggtgctattggtgctagaaccaccgagtcgcaattacaccgtgagttagcatctggtttatctttcccaattggtttcaagaatggtaccgatggtaacttaggcgttgccttagatgctgttcaagcgtcttctaagggtcaccacttcatgggtgtcaccaagaatggtactgctgccattactactaccaagggtaacgaaaactgtttcatcatcttgagaggtggtaagaagattaccaactacgaccctgaatctgtcgctgccgcaaaggaagccatcaacaagagtaccgatccaaatatcaagttgatggttgattgctctcatgataattctcaaaaagactacagaaaccaacctaaggtaatggaaagtgttgttgaccaaatctctaagggtgaaaacgctcttatcggtgtcatgattgaatctcacattaatgaaggtaaacaaagcatgccaggtccaaaagaagacaagagcgctttgaagtacggtgtctctatcactgatggatgtgttggttgggaaactactgttgaattattgcacaacttgagtaaggccgtgcaagaaagaagacaaattaataagtctaaagcttaa

SEQ ID NO: 1812 - protein, 368 aa, Debaryomyces hansenii
MSKTPIPDEYDDTRILGYDPLIPPALLQHEIRASKESLDVVIRGRIESSEIISGKDDRCLVIVGPCSIHDTEAALEYATRLKKLSLELENDLVIVMRAYLEKPRTTVGWKGLINDPDVDNSFDINRGLRISRQLYSDLTGKTGLPIGSEMLDTISPQYFSDFLSFGAIGARTTESQLHRELASGLSFPIGFKNGTDGNLGVALDAVQASSKGHHFMGVTKNGTAAITTTKGNENCFIILRGGKKITNYDPESVAAAKEAINKSTDPNIKLMVDCSHDNSQKDYRNQPKVMESVVDQISKGENALIGVMIESHINEGKQSMPGPKEDKSALKYGVSITDGCVGWETTVELLHNLSKAVQERRQINKSKA

SEQ ID NO: 1813 - DNA, 1074 bp, Yarrowia lipolytica
  CDS (1)..(1074)
atgtcccgttcctcctctcccaacgcctcctctgctgaggacgtgcgaattctgggctacgaccccctcctcgctcccgctcttctccagactgaggttgcctccaccaaaaacgcccgagagaccgtctccaagggccgaaaggactccattgatgtcatcaccggcaagtccgacaagttgctgtgcattgtcggtccctgctccctccacgaccccaaggccgccatggagtacgcccagcgactcaaggagctgtctgacaagctgtctggtgagctcgtcatcgttatgcgagcctacctcgagaagccccgaaccaccgttggctggaagggtctgatcaacgaccccgacatggacgagtctttcaacatcaacaagggtctgcgactctcccgaaaggtcttctgcgaccttaccgacttgggtctgcccattgcctccgagatgctcgataccatttctccccagttcctggccgacctgctctccctgggtgccattggtgctcgaaccaccgagtcccagctgcaccgagagctcgcctccggtctgtctttccccgttggtttcaagaacggaaccgacggtactctgggtgttgccgttgatgctgtccaggccgcctctcaccctcaccacttcatgggtgtcaccaagcagggtgttgccgccatcaccaccaccaagggtaacgagaactgcttcatcattctgcgaggaggtaagaagggcaccaactacgacgccgagtccgtcgccgagtgcaagaaggccaccgagtccatgctcatggttgactgctctcacggcaactccaacaaggactaccgaaaccagcccaaggtttccaaggccgttgctgagcaggttgctgctggcgagaagaagatcatcggtgtcatgatcgagagtaatatccacgagggcaaccagaaggtccccaaggagggcccctctgcccttaaatacggtgtctccatcaccgacgcctgtgtctcttgggagaccaccgtggacatgctcaccgagctggccaacgccgtcaaggagcgacgaaacaagaactaa

SEQ ID NO: 1814 - protein, 357 aa, Yarrowia lipolytica
MSRSSSPNASSAEDVRILGYDPLLAPALLQTEVASTKNARETVSKGRKDSIDVITGKSDKLLCIVGPCSLHDPKAAMEYAQRLKELSDKLSGELVIVMRAYLEKPRTTVGWKGLINDPDMDESFNINKGLRLSRKVFCDLTDLGLPIASEMLDTISPQFLADLLSLGAIGARTTESQLHRELASGLSFPVGFKNGTDGTLGVAVDAVQAASHPHHFMGVTKQGVAAITTTKGNENCFIILRGGKKGTNYDAESVAECKKATESMLMVDCSHGNSNKDYRNQPKVSKAVAEQVAAGEKKIIGVMIESNIHEGNQKVPKEGPSALKYGVSITDACVSWETTVDMLTELANAVKERRNKN

SEQ ID NO: 1815 - DNA, 1089 bp, Yarrowia lipolytica
  CDS (1)..(1089)
atgcccgctatgcacaacgcttctaacgctcagggagaccgaaaccggaccgaggactggcgaatccggggctacaaccctctcacagcccccgatctgctccagcatgagatccctctgaccaagcagtccaaggccaccattctcaagggccgacaggacgcctgtgatattctggatggtaaggacgaccgaatcattgttgtggttggcccctgttccatccatgaccccaaggctgccatggagtacgccgagcgactcaagcagatctctgacaagctgtctggcgagcttctgatcgtcatgcgagcctacctcgaaaagcctcgaaccaccgttggctggaagggccttattaatgatcctgacatggacggctctttcaagatcaacaagggcctgcgagtcgctagagatctcttcgtgaagctcaccgagctcaaccccattgcttctgagcttctggacaccatttctccccagttcctggctgatctcttctctgtcggagccattggtgctcgaaccaccgagtcccagcttcaccgagagcttgcctctggtctgtctttccccgttggtttcaagaacggtactgacggaggtattaaggtggctctggacgccatccaggccgccgcccacccccaccacttcctttccgtcaccaagcccggtgtggttgccattgtcggcaccgacggaaacgaggactgcttcctgattctgcgaggaggttccaagggccccaactacgatgctgagcacgtcgccgaggtcaagaagcaggttggagagaccaagggtccccgaatcatggtagactgctcgcacggcaactcatcaaagaaccacaagaaccagcctctggtcgcctctaacgtggctcagcagattgctgctggtgagaagtccatttgcggtcttatgattgagtccaacatccacgagggtcgacaggacatctgcgataacaaggaggacatgaagtacggtgtgtctgtcaccgatgcctgcatcaactgggaggacactgagaaggtgctcgaggagctggcccaggccgtcaagactcgacgaggttag

SEQ ID NO: 1816 - protein, 362 aa, Yarrowia lipolytica
MPAMHNASNAQGDRNRTEDWRIRGYNPLTAPDLLQHEIPLTKQSKATILKGRQDACDILDGKDDRIIVVVGPCSIHDPKAAMEYAERLKQISDKLSGELLIVMRAYLEKPRTTVGWKGLINDPDMDGSFKINKGLRVARDLFVKLTELNPIASELLDTISPQFLADLFSVGAIGARTTESQLHRELASGLSFPVGFKNGTDGGIKVALDAIQAAAHPHHFLSVTKPGVVAIVGTDGNEDCFLILRGGSKGPNYDAEHVAEVKKQVGETKGPRIMVDCSHGNSSKNHKNQPLVASNVAQQIAAGEKSICGLMIESNIHEGRQDICDNKEDMKYGVSVTDACINWEDTEKVLEELAQAVKTRRG

SEQ ID NO: 1817 - DNA, 1119 bp, Kluyveromyces lactis NRRL Y
  CDS (1)..(1119)
atgttcatcactaacgatcatattggggacagaagtagtttagaagactggagaatcaagggatatgatccattgaccccaccggacttattacaacatgaatatcccatcggtgaaaaggccaaaaagatcatcgttgaagctagagagaaagtatgtgacattttgaatgggaaggacgaccgtttagttgtagttattgggccatgttctattcatgatccaaaggctgcctacgaatacgcagaccttttgaagaaaatttctgatgaattatccgatgatctattaatcattatgagagcgtacttggagaaacctagaaccactgttggctggaaaggtttgatcaatgatccagatatcgataattctttccaaattaacaaaggtttaagaatttctagagagatgttcaccagattgactgaaaaattaccaatcgctggtgaaatgttggacaccatttctccacaatttttgagtgactgtttctctctgggtgctatcggcgctagaaccactgaatctcaactacatagggaattagcttctggtctttctttcccaattggttttaagaatggtactgacggtggtctccaagttgctgttgatgccatgagatctgctgcacactcacattacttcttgtctgttactaaacctggtgtcactgccatcgttggaacagaaggtaacgaagatacctttgttatcttaagaggtggtaagactggaactaatttcgatgctgaaaacgtaaaaaagacgcaagccgaattggtcaaggcaaaggttgctgatgctgaaggtgtccaaagaagaatcatggttgattgttctcatgggaattcaaagaaagatttcagaaatcaaccaaaggtggctcagtcactttacgaacaactatcagctggtcaaaatgctatctgtggtgtcatgatcgaatctaacttagtcgaaggtagacaagacgttcctccagaaggtggccgtgaaaagttgatttacggatgttctatcaccgatgcctgtatcggttgggaaacaactgaagatgttctaagattattggcaaagggtgttaaaaacagaagagctctttcaaaggcttga

SEQ ID NO: 1818 - protein, 372 aa, Kluyveromyces lactis NRRL Y
MFITNDHIGDRSSLEDWRIKGYDPLTPPDLLQHEYPIGEKAKKIIVEAREKVCDILNGKDDRLVVVIGPCSIHDPKAAYEYADLLKKISDELSDDLLIIMRAYLEKPRTTVGWKGLINDPDIDNSFQINKGLRISREMFTRLTEKLPIAGEMLDTISPQFLSDCFSLGAIGARTTESQLHRELASGLSFPIGFKNGTDGGLQVAVDAMRSAAHSHYFLSVTKPGVTAIVGTEGNEDTFVILRGGKTGTNFDAENVKKTQAELVKAKVADAEGVQRRIMVDCSHGNSKKDFRNQPKVAQSLYEQLSAGQNAICGVMIESNLVEGRQDVPPEGGREKLIYGCSITDACIGWETTEDVLRLLAKGVKNRRALSKA

SEQ ID NO: 1819 - DNA, 1095 bp, Kluyveromyces lactis
  CDS (1)..(1095)
atgtcacaaactccaacacctatgttccatgaacaagaagatgtcagaatcttgggttacgatccattggtttcaccagctctccttcaggcccaagttcctgcctctcaagagtgtctagaaactgcgcaaaagggtagaaaagagtcaattgacatcatcactggtaaagacgacagagttctggttgttgttggtccatgttccatccatgacttgaaagaagcgcaagactacgctaagggattaaaggctttgtctgacgaactaaaaggtgatttatgtattataatgagagcttacttggaaaagccaagaactactgttggttggaaaggtttgatcaacgatccagatgtggataacacttacaacattaacaagggtttgcaagtctctagacaattgtttgtgaatttgactagtttaggtttgccaattggttccgaaatgttggacaccatttctccacaatacttggccgatttgttgtccttcggtgccattggtgccagaaccactgaatcacaattgcatagagaactagcatccggtttgtctttcccagtaggtttcaagaacggtaccgatggtaccttgggtgttgcattggacgctgttcaagctgcctctcactctcaccatttcatgggtgtcaccaagcacggtgtcgctgctattaccaccaccaagggtaacgaacactgtttcgtcattctaagaggtggtaagcaaggtaccaactacgacagtgtttctgtcgcagaagccaagaaagctctacctccaaccggtgttctaatgattgattactctcacggtaattctaataaagacttcagaaaccaaccaaaggttaacgacgccgtttgcgaacaaatcgctaacggtgaagacaaaatcatcggtgtcatgattgaatcccacatcaacgaaggtaagcaatctattccagcggaaggtaaagctggtttgaaatacggtgtttctatcacagatggatgtataagtttggaaacaactgctgaagtactaagaaaattggctgcagcagttagagcaagaagagaactaaaaaagaagaacactgaataa

SEQ ID NO: 1820 - protein, 364 aa, Kluyveromyces lactis
MSQTPTPMFHEQEDVRILGYDPLVSPALLQAQVPASQECLETAQKGRKESIDIITGKDDRVLVVVGPCSIHDLKEAQDYAKGLKALSDELKGDLCIIMRAYLEKPRTTVGWKGLINDPDVDNTYNINKGLQVSRQLFVNLTSLGLPIGSEMLDTISPQYLADLLSFGAIGARTTESQLHRELASGLSFPVGFKNGTDGTLGVALDAVQAASHSHHFMGVTKHGVAAITTTKGNEHCFVILRGGKQGTNYDSVSVAEAKKALPPTGVLMIDYSHGNSNKDFRNQPKVNDAVCEQIANGEDKIIGVMIESHINEGKQSIPAEGKAGLKYGVSITDGCISLETTAEVLRKLAAAVRARRELKKKNTE

SEQ ID NO: 1821 - DNA, 1074 bp, Erwinia carotovora subsp
  CDS (1)..(1074)
atgcaaaaagattcgcttaataatattaatatcagtgcagaacaggttttgattactcccgatgaattgaaagccaagtttccgcttaacgacgtggagcaacgcgacattgcgcaagcgagagcgaccattgcggacatcattcatggccgtgatgaccggttattgatcgtctgcggaccttgctctattcatgatacagatgcagcgctggaatatgcgcgccgcttgcagttgcttgccgctgaattgaacgatcgtctctacattgtgatgcgcgtttattttgaaaagccacgtacaacagtgggttggaaagggctcatcaacgatccattcatggatggttcatttgatgtggaatctgggttgcacatcgctcgtgggctgcttctgcaactggtgaatatggggctgccgctggcgacagaagcgcttgatccgaacagtccgcagtacctgggcgatctatttagctggtcagctatcggcgcacgtacgactgaatcacaaacgcaccgtgagatggcttctggcctgtcgatgcctgttgggttcaaaaacggaacggatggcagtctgggaacggcgatcaatgcgatgagagctgccgcgatgccacatcgcttcgtcggtatcaatcaaactgggcaagtttgtctgctgcaaacgcaggggaatggtgatggccatgtgattctgcgcggtggtaaaaccccaaactacagtgcacaggatgtcgccgaatgtgaaaaacagatgcaggaagcaggactgagacctgcgctgatgatagattgtagccacggtaattcgaataaagactaccgccgtcagccactggttgttgaatctgcgattgaacaaatcaaggcgggaaatcgttcgattataggactgatgctggaaagccaccttaacgaggggagccagtcttcagaacaaccacgttcagatatgcgctacggtgtatcagtcacggatgcttgtatcagttgggaaagtacagaaacgttgctgcgttccgttcatcaagatctgagtgccgcacgtgtgaaacattcaggagagtaa

SEQ ID NO: 1822 - protein, 357 aa, Erwinia carotovora subsp
MQKDSLNNINISAEQVLITPDELKAKFPLNDVEQRDIAQARATIADIIHGRDDRLLIVCGPCSIHDTDAALEYARRLQLLAAELNDRLYIVMRVYFEKPRTTVGWKGLINDPFMDGSFDVESGLHIARGLLLQLVNMGLPLATEALDPNSPQYLGDLFSWSAIGARTTESQTHREMASGLSMPVGFKNGTDGSLGTAINAMRAAAMPHRFVGINQTGQVCLLQTQGNGDGHVILRGGKTPNYSAQDVAECEKQMQEAGLRPALMIDCSHGNSNKDYRRQPLVVESAIEQIKAGNRSIIGLMLESHLNEGSQSSEQPRSDMRYGVSVTDACISWESTETLLRSVHQDLSAARVKHSGE

SEQ ID NO: 1823 - DNA, 1113 bp, Acinetobacter sp
  CDS (1)..(1113)
atgatccaatcagtgacagcaatgaatactttacagtccaatccagtttcacagccagatatcgatgatgttaacatcaaaagcatccagcctcttgttacgcctgccgagttaaaagcagagcttccactgacagaaagtgcttatcaaaccgtactccacggtcgtgaaaccattcgcaacattcttgatggtacagacaaacgtatttttgttgtcattgggccatgctctattcacgaccctaaagcagcgcatgaatacgcaacacgcttaaaagtactcagcgaaaaagtaaaagacagtttgtatattgtgatgcgtgtttattttgaaaaaccacgtacaacagtaggctggaaaggtttgattaatgatcctgatatgaatgactcattcaatattgaaaaaggtctgcgtattggacgtaaattactccttgaactaaacgaacaaggtctaccttgtgctacagaagcgcttgatccaaactctcctcagtattatcaagatctgatttcatggtcggctattggcgctcgtaccactgaaagtcagacacatcgtgagatgtcatctggattatcatcaccagttggctttaaaaacggaacagatggtgggcttacagtcgcaacaaatgcgatgcaatctgtcaaacacggtcacagctttttaggtttgaatgaagctggtcaggtttctgtcattcataccagtgggaatccatatgcacacgttgtattacgtggcggtaacggaaagccaaactatgatgcagggtcagtcgcagaagctgaaaatgcactggcaaaagcaaaagtcagcactaaaatcatgattgatgccagccatgccaattcaaataaagacccatacttacagccacttgtactcaaaaatgtaaccgagcaaatcatcgacggtaataagtcaatagtgggtgtcatggttgaaagtcacctcaaaggcggacgtcaggatattcctgaaaacctatgtgatcttgaatacggcaagtctgttaccgatggctgtattgattgggaaaccacagaaaatgttttgcttgaaatgcatgaagcactcaaagatgttttagctcagcgttaa

SEQ ID NO: 1824 - protein, 370 aa, Acinetobacter sp
MIQSVTAMNTLQSNPVSQPDIDDVNIKSIQPLVTPAELKAELPLTESAYQTVLHGRETIRNILDGTDKRIFVVIGPCSIHDPKAAHEYATRLKVLSEKVKDSLYIVMRVYFEKPRTTVGWKGLINDPDMNDSFNIEKGLRIGRKLLLELNEQGLPCATEALDPNSPQYYQDLISWSAIGARTTESQTHREMSSGLSSPVGFKNGTDGGLTVATNAMQSVKHGHSFLGLNEAGQVSVIHTSGNPYAHVVLRGGNGKPNYDAGSVAEAENALAKAKVSTKIMIDASHANSNKDPYLQPLVLKNVTEQIIDGNKSIVGVMVESHLKGGRQDIPENLCDLEYGKSVTDGCIDWETTENVLLEMHEALKDVLAQR

SEQ ID NO: 1825 - DNA, 1119 bp, Candida glabrata
  CDS (1)..(1119)
atgttcatcaagaatgactacagaggtgacagaacccgtctagaagactggagaatcaaaggttacgatccattgactcctcctgatcttcttcagcatgaatacccaatcagtgagaaaggtgctgccaacatactgaaagctagagattctgtgtgtgacatcttgaatggtaaggatgaccgtatggttattgtcattggtccatgctccattcatgacccaaaggcagcttacgaatacgccgataagctagcagtaatcgctgagaagctatccgatgatctacttattatcatgagagcgtacttagagaagccaagaaccaccgttggatggaagggtctgataaatgacccagatattgataactctttccaaatcaacaaaggtttaagaatctcaagagaaatgttcacaaagctgatcgaaaagcttcctattgccggtgaaatgttagacactatctccccacaattcttgagtgactgtttctctctaggtgccattggtgccagaacaactgaatcccaactgcatagagaactagcttcaggtctatctttcccaattggtttcaagaatggtaccgatggtggcctacaagttgccatcgatgctatgagagctgcatctcacgaacattacttcctttctgtcacaaagcctggtgtcaccgctattgttggtactgaaggtaactccgacacttttatcattttaagaggtggtaagcatggtaccaactacgatgctgaaaatgtgaagtccaccaaagaacaactaaggaaagcaaaattgattgatgaagctgacagtaccagaagaataatgattgactgttctcacggtaacagtaataaggactacagaaatcaaccaaaggtcgctcaagagatctacaaccaactgagtgctggtgaaaacggtttgtgtggtgttatgatcgaatctaacctagtggaaggcagacaagatgttcctccagaaggtggtcgtgagggtctaaaatatggttgctctatcactgatgcttgtattggctgggatactaccgaaagcgttttggaacttctagccgaaggtgttagaaacagaagaaagcatttatccaagtaa

SEQ ID NO: 1826 - protein, 372 aa, Candida glabrata
MFIKNDYRGDRTRLEDWRIKGYDPLTPPDLLQHEYPISEKGAANILKARDSVCDILNGKDDRMVIVIGPCSIHDPKAAYEYADKLAVIAEKLSDDLLIIMRAYLEKPRTTVGWKGLINDPDIDNSFQINKGLRISREMFTKLIEKLPIAGEMLDTISPQFLSDCFSLGAIGARTTESQLHRELASGLSFPIGFKNGTDGGLQVAIDAMRAASHEHYFLSVTKPGVTAIVGTEGNSDTFIILRGGKHGTNYDAENVKSTKEQLRKAKLIDEADSTRRIMIDCSHGNSNKDYRNQPKVAQEIYNQLSAGENGLCGVMIESNLVEGRQDVPPEGGREGLKYGCSITDACIGWDTTESVLELLAEGVRNRRKHLSK

SEQ ID NO: 1827 - DNA, 1071 bp, Candida glabrata
  CDS (1)..(1071)
atgtctgatgcgaatgctaacgaagacgtgagaatcctgggctacgacccgctggtgtcgcctgcgctgctgcaggtgcaagtgccagccacagaggtgtctatccagaccgctaggcgcgggaggaaagagtccatcgagatcatcaccggccgtgacgaccgtgtgctcgtgatcgtcggaccttgctcggttcacgacctcgacgccgcgcaggagtacgcgcagaggctgaagaagctgtccgacgagctgcagaaggacctgtgcatcgtgatgagagcgtacctggagaaaccaagaaccacggtcggctggaaagggttgatcaacgaccctgacgtcaacaacaccttcaacatcaacaagggcctgcagagcgccagacagctgttcgtgaacttgaccaacaccggtgtccctatcggctctgagatgctggataccatctccccacagtacctcgcagacctgctctccttcggtgccatcggcgcaagaaccaccgagtcccaactgcacagagaactggcatcaggtctgtccttccctatcggcttcaagaacgggaccgacggtaccttgggcgtcgccgtagacgcctgccaggccgcatcccactcccaccacttcatgggtgtcaccaagcatggtgtcgccgccatcaccaccaccaagggtaacgagcactgcttcgtcatcctgagaggtggtaagaaaggtaccaactacgacgccaagtccgtcgccgaggccaagaaacagctaccggagggcgcaaacggcctgatgatcgactactcccacggtaactccaacaaggacttcagaaaccagccaaaggtcaacgacgccgtctgcgagcaaatcgccaacggtgaaaaggccatcgtcggtgtcatgatcgagtccaacatcaacgagggcaaccagtgcatcccaccagaaggtaaggccggcctaaagtacggtgtctccatcacggatgcctgtatctcctgggaaaccaccgaagacgtcttgagaaagttggctgccgccgtcagacaaagaagagaacactacaaataa

SEQ ID NO: 1828 - protein, 356 aa, Candida glabrata
MSDANANEDVRILGYDPLVSPALLQVQVPATEVSIQTARRGRKESIEIITGRDDRVLVIVGPCSVHDLDAAQEYAQRLKKLSDELQKDLCIVMRAYLEKPRTTVGWKGLINDPDVNNTFNINKGLQSARQLFVNLTNTGVPIGSEMLDTISPQYLADLLSFGAIGARTTESQLHRELASGLSFPIGFKNGTDGTLGVAVDACQAASHSHHFMGVTKHGVAAITTTKGNEHCFVILRGGKKGTNYDAKSVAEAKKQLPEGANGLMIDYSHGNSNKDFRNQPKVNDAVCEQIANGEKAIVGVMIESNINEGNQCIPPEGKAGLKYGVSITDACISWETTEDVLRKLAAAVRQRREHYK

SEQ ID NO: 1829 - DNA, 1035 bp, Escherichia coli
  CDS (1)..(1035): transl_table=11
atgcagtcagtcagtaaatcaatctaccgagggaagttgcttagcagtttacctgctgtgggcgagattcataaagaaatcgcagtatcagaagaaaccgtaacatggatctctctgcaacgagagattatagcgaatattttgctgggaaaagatcctcgcttgcttgtgattgttggtccatgctcaatccatgacgttcaggctgccgttgaatatgcgaaacgattgtccgtattacagaataagtacttatcgcaaatgtacattgtaatgcgcacttattttgagaaacctcgaactcgtaaaggctggaaaggaataatgcacgatcctgatctaaatggaagctataatgttgagaaagggatacgatatgctcgccagtgtttgtcctcaatcacaacaatgcgtgtcgcaaccgctacagaattcctcgatcctttccttactccctatattgctgatttaatatgttggggggctgttggtgccagaactactgaatcacaaacgcatcgtcaacttgcgtctggtttacattgtcctgttggatttaaaaacagcactgatggaaatattaacttagctattgatgctattcttgcagcccgtgaacaacatgttgtatatatgacatctttaacaaaatgtatatctaccctattaaccgatggcaatccacatggacatctcatattacgtggtggtagagagccgaactatggtttgtcggatataacgaaggcagtgaaattaatgcatgatgaaggtatcaatcatcgtctgataattgactgtagccatggtaatagtggtaaagtggctgaacggcaaatctctgttgctcgtgaagtcattgataatcggaaaaagatgccgggatatgtagctggaattatgctggaaagctttttacaaggtggaaaacaatcagacagccttccgcgagagtatggtcagtctgttactgatgagtgtctttcatggcaacagacagaacaattattatcaactctggcagcacaactttaa

SEQ ID NO: 1830 - protein, 344 aa, Escherichia coli
MQSVSKSIYRGKLLSSLPAVGEIHKEIAVSEETVTWISLQREIIANILLGKDPRLLVIVGPCSIHDVQAAVEYAKRLSVLQNKYLSQMYIVMRTYFEKPRTRKGWKGIMHDPDLNGSYNVEKGIRYARQCLSSITTMRVATATEFLDPFLTPYIADLICWGAVGARTTESQTHRQLASGLHCPVGFKNSTDGNINLAIDAILAAREQHVVYMTSLTKCISTLLTDGNPHGHLILRGGREPNYGLSDITKAVKLMHDEGINHRLIIDCSHGNSGKVAERQISVAREVIDNRKKMPGYVAGIMLESFLQGGKQSDSLPREYGQSVTDECLSWQQTEQLLSTLAAQL

SEQ ID NO: 1831 - DNA, 1083 bp, Photobacterium profundum
  CDS (1)..(1083)
atggctattcacccatcagtgatgagaacgacgacatgccgtcggcttccttcaccagcagaactgctcagtgactacccgtgcaaggccgacactgaacaccacattatgacatcgcgtaatgatgtgagggatattttacatggcaaagatgatcggcttttggtcgtgattggtccatgctcaattcatgacccggatgcagcactggcatacgcaaagcagcttaagccactggtcgaacagtttagtgatcacttacatattgtaatgcgaacgtatttcgaaaagccccgaacaacaactggttggaaaggcttaatattcgatccgcatctcgacaacagtaatgaccttattactgggttaacaacagcgcgtcagttagtgctcgctattaatgaacttggtgtaccaacctcaaccgaatttttggataataccagttttctatatttggccgacctcatgagctggggagccattggcgcccgcactacagagtcacaagttcaccgacagttaacctcgggcttaccctgccccgtcggtttcaaaaacggcaccgatggtaacattcgtattgcgacagatgccattctttcgagccaatcccctcacttgtataccgttacggggcacgatggacatttatatgcagtagaaagtacaggtaatgccgattgccacatcatcctacgtggtgggcaagaacctaactacagtccgggccatattcaagctgccagcaaagcgctataccaagccaagttaccagtaagtattatggtagattgcagccatggaaacagccaaaagcgtcataaaaaccaattagttgtcgcacaatcgttatgtgaacaactgtctcagggcgaacaagcaatcacgtcaattatggtggagagtttctttgaggaaggcagtcaagcgatcagtgccaatatgacctacggacaatcggtaacggatgcctgtatcaactggagcgacacagaaatattgcttaaccaatttgccgctgccattgcgactcgccgcgcactgtaccaatcggcctcgccagtcgccatgcacggctaa

SEQ ID NO: 1832 - protein, 360 aa, Photobacterium profundum
MAIHPSVMRTTTCRRLPSPAELLSDYPCKADTEHHIMTSRNDVRDILHGKDDRLLVVIGPCSIHDPDAALAYAKQLKPLVEQFSDHLHIVMRTYFEKPRTTTGWKGLIFDPHLDNSNDLITGLTTARQLVLAINELGVPTSTEFLDNTSFLYLADLMSWGAIGARTTESQVHRQLTSGLPCPVGFKNGTDGNIRIATDAILSSQSPHLYTVTGHDGHLYAVESTGNADCHIILRGGQEPNYSPGHIQAASKALYQAKLPVSIMVDCSHGNSQKRHKNQLVVAQSLCEQLSQGEQAITSIMVESFFEEGSQAISANMTYGQSVTDACINWSDTEILLNQFAAAIATRRALYQSASPVAMHG

SEQ ID NO: 1833 - DNA, 1053 bp, Photobacterium profundum
  CDS (1)..(1053)
atgcaaaaaacagatgacgtacgcattagcgagatcaaagaacttttaccaccagttgctgtattggaaagatttccagccactgaactggcggctgaaactgtatatcagtcacgtaaatcgattcacaacattctgaacgatgaagatgaccgtttgttggttgttgttgggccttgttcaattcatgacactgaagctgctatcgaatacggtaaaaagctgaaagtattacgtgaagaattaaaaggtgaccttgaaatcgtaatgcgtgtttactttgaaaaaccacgcaccacagtaggttggaaagggttaattaacgacccgtatatggacaatagctttaagttaaatgatggtttacgtattggacgtaagttgctacttgatttgaccgatatgggcttaccaacagcgggtgagttccttgatatgattaccccacaatacatgggtgatttgatcagctggggcgcaattggtgcgcgtactacagaatcgcaagttcaccgtgagctatcttcaggactatcttgccctgttggttttaaaaacggtacagatggcaacattaagatcgcgaccgatgcgattggatcggcaagtgcacctcaccactttttatcagtgactaagtatggtcattcagctattgtttctactttgggtaatgaagactgtcatatcattcttcgtggcggtaaagagcctaattacagctcagaacacgttaacgcggtgacatcacagctgggtaatgctggtcagcgtaagaaagtaatgattgattttagtcatgctaatagttcgaagaagtttgaacgtcagattattgtttctgaagatgtcggtcagcaagttgctggcggtaacaaagatatttttggtgttatggttgaaagccaccttgttgaaggtcgtcaagatatcgtagaaggcacagagccaacgtatggtcaaagtattaccgatgcatgtattggttgggcagatacagaaacagtacttcgtcaattagcacgtgatgttgctaagcgtcgtcaagcatag

SEQ ID NO: 1834 - protein, 350 aa, Photobacterium profundum
MQKTDDVRISEIKELLPPVAVLERFPATELAAETVYQSRKSIHNILNDEDDRLLVVVGPCSIHDTEAAIEYGKKLKVLREELKGDLEIVMRVYFEKPRTTVGWKGLINDPYMDNSFKLNDGLRIGRKLLLDLTDMGLPTAGEFLDMITPQYMGDLISWGAIGARTTESQVHRELSSGLSCPVGFKNGTDGNIKIATDAIGSASAPHHFLSVTKYGHSAIVSTLGNEDCHIILRGGKEPNYSSEHVNAVTSQLGNAGQRKKVMIDFSHANSSKKFERQIIVSEDVGQQVAGGNKDIFGVMVESHLVEGRQDIVEGTEPTYGQSITDACIGWADTETVLRQLARDVAKRRQA

SEQ ID NO: 1835 - DNA, 1113 bp, Photobacterium profundum
  CDS (1)..(1113)
atgccttctactacccagaatagattgaggaaagccaccatgcaaaaagaccaactgaataatgtacatattcaagatgaatgcgtattgatcactcctcaacaactaaaagccaggttgccactcagtgaaacagcactgaacttcattcgtgaatctcgtcaaaccattgcagatattactcacaagcgtgaccaccgtttactcgtggtatgcggaccatgctcaattcacgatattgacgcagcgaaagcgtacgcccaaaaattgaagcagctttctgaagagctaagtgatcaactgtacattgtaatgcgcgtttattttgaaaaaccacgtacaacagttggttggaaaggtcttatcaatgacccgcatcttgatggctcttttgaagtggaagaaggtttacacattggtcgtcagctactcattgacttggttgaaatggggattcctttagcaacagaagcgcttgatccgatcagtcctcaatacttaggtgatttattcagttgggcagccattggtgcacgtaccactgaatcacaaacacaccgtgaaatggcaagtggcctttcaatgcccgttgggtttaaaaatggtactgatggaagtttggcaacggctatcaatgccatgaaagctgcagcttctgggcaccgttttatggggattaatccagaaggtcaggtggcgctgttgaacacccaaggaaaccctgatggccatgtaattttacgtggcggtaagcaaacgaattatgattcagtctcggttactgagtgtgaaaatgagatgcatcagtcaggtctttcaccatccttgatggtagactgtagccatgcgaattcacgtaaagattaccgtcgtcagccattagtcgctgaagatgtacttcatcaaatccgtgaaggtaataaatcgatcattggtttgatgattgaaagccatttaaatgaaggtagtcaaagcgctgatttaccgcgcgaagaaatggcttatggggtatcgattaccgatgcatgtatcagctgggaagatacagaaacactattacgtcgtacgcgtaaagaattaacgcctttcttaaaggatcgctgcgaaggataa

SEQ ID NO: 1836 - protein, 370 aa, Photobacterium profundum
MPSTTQNRLRKATMQKDQLNNVHIQDECVLITPQQLKARLPLSETALNFIRESRQTIADITHKRDHRLLVVCGPCSIHDIDAAKAYAQKLKQLSEELSDQLYIVMRVYFEKPRTTVGWKGLINDPHLDGSFEVEEGLHIGRQLLIDLVEMGIPLATEALDPISPQYLGDLFSWAAIGARTTESQTHREMASGLSMPVGFKNGTDGSLATAINAMKAAASGHRFMGINPEGQVALLNTQGNPDGHVILRGGKQTNYDSVSVTECENEMHQSGLSPSLMVDCSHANSRKDYRRQPLVAEDVLHQIREGNKSIIGLMIESHLNEGSQSADLPREEMAYGVSITDACISWEDTETLLRRTRKELTPFLKDRCEG

SEQ ID NO: 1837 - DNA, 1056 bp, Photobacterium profundum
  CDS (1)..(1056)
atgccaatgaaaactgatgaactccgtaccgttagcctagggttaatgccaactccggcagaaattgaagctgtctctcctattactgacgaaattgcagcgcacgttgctgattctcgccgtcaagttgaagacatcctaaccggtaaggattctcgacttttagttgtcgtaggaccatgttctgttcacgatacagatgcagcaatggattatgctaaacaccttgttgctgttcaggaacaatacagagatgaactttgtattgttatgcgcacatactttgaaaagcctcgtaccgttgtaggctggaaagggttaatttcagatccacaccttgacggtagcttagattttgtcgcaggtttacataaagcacgtaagttattagtagatgtaaatgctttaggtttggctactgctactgaattccttgatatgattacaggacagtatcttgctgacttaatcacatggggagcaattggcgcgcgtacaactgagtctcaaattcaccgtgaaatggcttctgccctttcttgtcctgttggtttcaaaaatggtactgacggaaatatcaaaatagccattgatgcgattcgtgcaacacgtgaatctcacctattttgctcaccagcgaaaaatggtcaaatgacgatttaccgtacagcaggtaacccacacggtcatgtgattttacgtggtggcaaaatgccaaattaccaccaagctgatgttgaaacatcatgtaatacactggctgaatttgatttaccaacacgccttgttgttgacttcagccacggtaattgccaaaagcaacaccgtcgtcaacttgatgtcgcagctgatatctgtactcaaattcgtgaaggcagcaattacattgcgggtattatggctgaaagctttattattgaaggcaaccaagctgttgttgctggaaaagaaaaagaacttgtctacggtcaatctattacagacccttgtgtaaactgggaagataccgtcactatgctagatatgcttgctgacgcgatcaaaactcgtaaataa

SEQ ID NO: 1838 - protein, 351 aa, Photobacterium profundum
MPMKTDELRTVSLGLMPTPAEIEAVSPITDEIAAHVADSRRQVEDILTGKDSRLLVVVGPCSVHDTDAAMDYAKHLVAVQEQYRDELCIVMRTYFEKPRTVVGWKGLISDPHLDGSLDFVAGLHKARKLLVDVNALGLATATEFLDMITGQYLADLITWGAIGARTTESQIHREMASALSCPVGFKNGTDGNIKIAIDAIRATRESHLFCSPAKNGQMTIYRTAGNPHGHVILRGGKMPNYHQADVETSCNTLAEFDLPTRLVVDFSHGNCQKQHRRQLDVAADICTQIREGSNYIAGIMAESFIIEGNQAVVAGKEKELVYGQSITDPCVNWEDTVTMLDMLADAIKTRK

SEQ ID NO: 1839 - DNA, 1092 bp, Parachlamydia sp
  CDS (1)..(1092)
atggaacttctcccctcatataaagaattaaaaagccaatttccggcaagcgcatctcaagataatttcattgaagattgtcgagaaactgtaaaatctattttaaatggtactgataagcgattgttattgattgtagggccctgctcaatccatgattttcattctgctaaggaatttgcatttagattaaaatgcttagcagaatctctttcgtctcattttttcattttaatgcgtgtctattgtgaaaaagcgagaacagcaacgggctggaaaggatttttgtatgatccacttttagacggttccaatcaacttttactcggaatcaaaaagacaagagaattgttgctagagctttgcgatttgcgaatccctgccgcaaccgaatttttagatcctttaaccgcttattattatgaagatttaatttcttgggggtcgattggagcgagaacttcctcttcacaaatccacaggcaatttgcttcgaatttgcaaattccgataggctttaaaaatggaattgctggtaatatttcagctgctgttcaaggagcctatgcggcttctcaaccccatgcttacatggctttacacgaaaatggatggccaattgcaacgcaatctaaaggaaatctcgatactcacattgttttaagaggtggggaaacaaaaaccaattttgactctcattcgatatctgaagcgcttgcaaggttatcccatgcaaacttgccagaaagagtgttgatcgattgttctcatcataattcaaataaaaaacatgaaaaacaaccaattgtttttcaatccattatcgatcaagtactggcaggaaattcctttattaaaggtttaatgatagaaagtcacctttatgccggcaatcaaccttttcatttcaatccacaagagcttcgttatggtgtttcgattacggattcttgcttagattggaattcaactcaaacactcattgaatggggtgctcatcaattgcaagaaaatcttaatccgagtaagaagttatctttgtcttcagaatctctttttagttcgatgatatgtacaaagctaaaaagttaa

SEQ ID NO: 1840 - protein, 363 aa, Parachlamydia sp
MELLPSYKELKSQFPASASQDNFIEDCRETVKSILNGTDKRLLLIVGPCSIHDFHSAKEFAFRLKCLAESLSSHFFILMRVYCEKARTATGWKGFLYDPLLDGSNQLLLGIKKTRELLLELCDLRIPAATEFLDPLTAYYYEDLISWGSIGARTSSSQIHRQFASNLQIPIGFKNGIAGNISAAVQGAYAASQPHAYMALHENGWPIATQSKGNLDTHIVLRGGETKTNFDSHSISEALARLSHANLPERVLIDCSHHNSNKKHEKQPIVFQSIIDQVLAGNSFIKGLMIESHLYAGNQPFHFNPQELRYGVSITDSCLDWNSTQTLIEWGAHQLQENLNPSKKLSLSSESLFSSMICTKLKS

SEQ ID NO: 1841 - DNA, 1100 bp, Amycolatopsis methanolica
  CDS (1)..(1086)
atgtctctcagcgcaggccccgcggaaatttccgaaggcctcgacaaccagcgcaccctcggcgtcagcccgctgatctcccccgccctgctgcggcaggagctgccggtggacgcggcgatcgccaagaccgtcgcgcatggccggtcgtcggccgtcgacatcctccacggcgacgacgaccgcctcatcgtggtcgtcggcccctgctcggtgcacgaccccgcggccgccctcgactacgcccaccggctggccgagcacgccgccggtgtgcgcgacgaactgcacgtgatcatgcgggtgtacttcgagaagccacgcaccacgctgggctggaagggcctcatcaacgacccggacctggacggcagctacgccgtcaacaagggcctgcggatggcgcgcaagctgctgctggacatctccgcactggggctgccggtcgggtgcgagttcctggacccgatcacgccgcagttcatcgccgacaccgtgagctggggatccatcggcgcgcggaccgcggccagccaggtgcaccgccagctgtgcagcgcgctgtccatgccggtggggatcaagaactccactgagggcgatgtgcaggtggcggtggacgcgacccgcgcggcggcggcgagccacgtgttcgcgggcatcaacaacgacggcctggcggcgctgttcaccacggcgggcaacccggactgccacgtcatcctgcgcggcggttccgcaggcccgaactacgacgcggcgacggtggccgacacgctcgcgcggcaggccaaggccgggctgccggagcgggtgatcatcgacgcgagccacggcaacagcggcaaggaccacgtccgccagggcgtggtggccggggagatcgcggaccggatcgccgccggcgagcgcgggatcgccgggatcatgctggagagcttcctcgaggccgggcggcaggacctggtgctggggcacgcgggcgagctgacctacgggcagtcgatcaccgatgcgtgcctggactggcgaagcacgggtgagctgctggaccgcctctcggaggcggtggcggcgcggcggtgaggggggctacgcgg

SEQ ID NO: 1842 - protein, 361 aa, Amycolatopsis methanolica
MSLSAGPAEISEGLDNQRTLGVSPLISPALLRQELPVDAAIAKTVAHGRSSAVDILHGDDDRLIVVVGPCSVHDPAAALDYAHRLAEHAAGVRDELHVIMRVYFEKPRTTLGWKGLINDPDLDGSYAVNKGLRMARKLLLDISALGLPVGCEFLDPITPQFIADTVSWGSIGARTAASQVHRQLCSALSMPVGIKNSTEGDVQVAVDATRAAAASHVFAGINNDGLAALFTTAGNPDCHVILRGGSAGPNYDAATVADTLARQAKAGLPERVIIDASHGNSGKDHVRQGVVAGEIADRIAAGERGIAGIMLESFLEAGRQDLVLGHAGELTYGQSITDACLDWRSTGELLDRLSEAVAARR

SEQ ID NO: 1843 - DNA, 1071 bp, Treponema denticola
  CDS (1)..(1071)
atgataaaaaaccttattgacctccgaatcgagaggattcattgcataagttctcctgccgaaatggtagaaaaaatacccgcctcggattctctttattcttttatagccgaagcccgaaaaactatcagcaatataataaacggaaaggatgagcgttttttactcatagtcggcccctgctcgattcatgacacggaggcagccgaggattatgctatgcgcctattagagctaaaaaagaaatgctccgattctttctatattataatgcgtacctactttgaaaaacccagaaccgttttaggctggagaggccttatcgtagaacctgaacttgacggctttatcaatattgaaggcggcattcaaaagacaagaaaatttcttattaaacttgccgaaataggcattcctgcagcctccgaaatggtagaccctatgattccccaatacattgccgaccttgtaagctgggcttcgataggagcacgctcagccgaaagtcaaatccacagagaactggcctcaggactttcaatgccggtcggctttaaaaataccacctacggagacataacggccgctataaacggagttattgtttcccgcctgccccatgcctttgtaggcattgcccgaaacggactttcggcaatagtgcacacaaccggaaatcccgacactcacttggttttaaggggaggggtttcaaagcccaattataatagagaagaaattgaaaaagcagcctctcttatgaaggaaaaaatgctgaaaccgagcatagtaatagactgctcccacggaaattcgggaaaggacccgaaaaaacagataaacatctttgaagaaagcttaaaactccgcttcgataagaatgaacctcttgactatataaggggctgtatgattgaaagctttatccaagagggaagcacctcgatcgaaaaagcaaaggaacgcagcgaatacggtaaatccataaccgacccctgcctaggctgggaagaaactcaaacagaaatactaaaaatctatgaaaaatacaaaaggagaaagcaaaaatga

SEQ ID NO: 1844 - protein, 356 aa, Treponema denticola
MIKNLIDLRIERIHCISSPAEMVEKIPASDSLYSFIAEARKTISNIINGKDERFLLIVGPCSIHDTEAAEDYAMRLLELKKKCSDSFYIIMRTYFEKPRTVLGWRGLIVEPELDGFINIEGGIQKTRKFLIKLAEIGIPAASEMVDPMIPQYIADLVSWASIGARSAESQIHRELASGLSMPVGFKNTTYGDITAAINGVIVSRLPHAFVGIARNGLSAIVHTTGNPDTHLVLRGGVSKPNYNREEIEKAASLMKEKMLKPSIVIDCSHGNSGKDPKKQINIFEESLKLRFDKNEPLDYIRGCMIESFIQEGSTSIEKAKERSEYGKSITDPCLGWEETQTEILKIYEKYKRRKQK

SEQ ID NO: 1845 - DNA, 1095 bp, Ashbya gossypii
  CDS (1)..(1095)
atgacctcatttccgatgttcgcagcggacgctgaccaggccgaagacgtccgaatcctcggctacgaccctctggtgtcgccggcgctgcttcagtcgcaaattcccgcgacgcaggcgtgcctcgagacggcgcagaagggtcggcgggaggccatcgacatcataacagggaaggacgaccgggtgctggtggtggtcgggccgtgctcgatccacgacctggacgcggcgcaggagtacgcgcagcggctgaagaagctggcggaggagctggagggcgacctggtggtggtgatgcgcgcgtacctggagaagccgcggacgacagtggggtggaagggcctgatcaacgacccggacgtgaacaacactttcaacatcaacaagggcctacaggcggcgcggcagctgttcgtgaacctgacgtcgatcggcgtgccaattgggtccgagatgctcgacaccatctcgccgcagtacctcacggacctgctgtcgttcggcgctatcggcgcgcgcacgacggagtcgcaactgcaccgcgagctagcgtcggggctgtcgtttccgattgggttcaagaacggcacggacggctcgctggacgtggcactggacgcggtcaaggcgtcgtcccactcgcaccacttcatgggcgtgaccaagcacggcgtggccgccatcaccacgacgaagggcaacgagcactgctttgtcatcctgcgcggcggcaagcgcggcacgaactacgacgctacgtccgtggcggaggcgaaggccaagctgccccccacgggcgtgctgatgatcgactattcgcatgggaactccaacaaggacttccgcaaccagccgaaggtgaacgaggttgtgtcggagcagattgccaacggcgaggacaagatcgtcggcgtcatgatcgagtccaacatcaacgagggcagccagaagattccgcccgagggcaaagctggcctcaagtacggtgtttcgatcacggacggctgcatatcctgggagaccaccgaggaggtgctgaggaagctcgccggcgccgtccgcaagcggcgcgacctgcggaagaccaaataa

SEQ ID NO: 1846 - protein, 364 aa, Ashbya gossypii
MTSFPMFAADADQAEDVRILGYDPLVSPALLQSQIPATQACLETAQKGRREAIDIITGKDDRVLVVVGPCSIHDLDAAQEYAQRLKKLAEELEGDLVVVMRAYLEKPRTTVGWKGLINDPDVNNTFNINKGLQAARQLFVNLTSIGVPIGSEMLDTISPQYLTDLLSFGAIGARTTESQLHRELASGLSFPIGFKNGTDGSLDVALDAVKASSHSHHFMGVTKHGVAAITTTKGNEHCFVILRGGKRGTNYDATSVAEAKAKLPPTGVLMIDYSHGNSNKDFRNQPKVNEVVSEQIANGEDKIVGVMIESNINEGSQKIPPEGKAGLKYGVSITDGCISWETTEEVLRKLAGAVRKRRDLRKTK

SEQ ID NO: 1847 - DNA, 1122 bp, Ashbya gossypii
  CDS (1)..(1122)
atgttcattaaaaacgagtacattggtgacaaaagcaggctcgaggactggaggattaagggctacgacccactgactccgccgaatgtgctccagcacgagctacctgtcagtgcaaatgggcgcgcgataattgtacgggcacgcgagggggtggttcaagtgctttccggcagggatgaccggcttctggttgtggttgggccctgctccatccacgaccccgaggccgctctggaatacgcgcagaggcttagcgaggtggcctcgcggctgcgcggggagctgctggttattatgcgtgcgtatctggaaaaaccgcggaccacggtggggtggaaggggctcatcaacgaccccgacatcgataattcgttccaaataaacaagggattgcgtatctcgcgggagatgtacacgcagctggtggagcacattccaattgcgggcgaaatgctagacaccatatcgccgcagttcttaagcgactgcttctccttgggcgccattggcgcccggacgacagaatcgcagctgcaccgtgagctggcttctggactatcgttcccgatcggattcaagaacgggacagatggctgcttacaggttgctattgacgctatgcgtgccgctgctcactctcattactttctttcggttaccaagcctggagtgactgcgattgttgggactgaaggtaacgaggacaccttcatcattctacgcggtggtaaagatggcacaaactatgacgctgccagtgtacaacaggctaagcaggacttggtcaatgcgaagctagttgacagcgctggggtccagcggaggattatgattgactgctcgcatggaaattccaacaaggattaccgcaaccagccgaaagtcgcccaagatatctatgagcagctgagtaaaggtgagaatgccatttgtggggtgatgattgaatccaatcttgtagaggggcggcaggatatccccgaggggaacggtcgtgtgggcctaaagtatggttgttcgatcaccgacgcgtgcataggctgggatcaaacagtagaagtattagagctgcttgcaaagggcgtcataaacaagagagctgtaatgtcgacaaattaa

SEQ ID NO: 1848 - protein, 373 aa, Ashbya gossypii
MFIKNEYIGDKSRLEDWRIKGYDPLTPPNVLQHELPVSANGRAIIVRAREGVVQVLSGRDDRLLVVVGPCSIHDPEAALEYAQRLSEVASRLRGELLVIMRAYLEKPRTTVGWKGLINDPDIDNSFQINKGLRISREMYTQLVEHIPIAGEMLDTISPQFLSDCFSLGAIGARTTESQLHRELASGLSFPIGFKNGTDGCLQVAIDAMRAAAHSHYFLSVTKPGVTAIVGTEGNEDTFIILRGGKDGTNYDAASVQQAKQDLVNAKLVDSAGVQRRIMIDCSHGNSNKDYRNQPKVAQDIYEQLSKGENAICGVMIESNLVEGRQDIPEGNGRVGLKYGCSITDACIGWDQTVEVLELLAKGVINKRAVMSTN

SEQ ID NO: 1849 - DNA, 1098 bp, Amycolatopsis balhimycina
  CDS (1)..(1098)
atggccgcgatgacccacaccgtcgccacgaccgacctcgacaaccagcgcatcgagcggatcgtccccctggtcacccccgccctgctgcatcacgaactgccgctcagcgccaccgcggccgagacggtgcgaaagggccgcgagagcgtcgtccgcgtcctcgacggcacggacgaccggctgctcgtgatcaccgggccgtgctccatccacgaccccgccgcggcgctcgactacgccggccacctcgccgccatcgccggcgaggtcgccggcgacctgctcgtcgtcatgcgcgtgtacttcgagaaaccccggacgatcggcggctggaaggggctcatcaacgacccccacctcgacggcaccggcgacgtcaaccacgggctgcgcacggcccggcacctcctgctggagctcgccgaacgcggcctgcccgccgcgtgcgaatggctggacaccaccattcccgcgtacttcgcggacacggtctcgtggggcgccatcggcgcccgcaccgtggaaagccagaaccaccgcatgctcgccagcggcctgtccatgcccgtcggcttcaagaaccgccgcgacggcgacatcaccgtcgccatcgacgcgatccgggccgccgcggtccgccacgtggtccccggcgtcgaccccggcgggttgcccgccatcctgcacacggcgggcaacccggactgccacgtcgtcctgcgcggtggtgacggcgcgcccaaccacgactccgcgtccgtccacaagacactgaccgcgctggaggccgcgggcctgcccggccgggtggtgatcgacgccagccacgacaacagcggcaaggaccaccaccgccagcccctcgtcgcggccgagatcgcgggccaggtcgagaacgggcggaacggcatcgtcggggtgatgctcgagtccaacctccgcgccggccgccaggacctccagccgggccgtccgccggcatacggccagtccatcaccgacgcctgcatcgacgtccccaccacccggacggtcctccacggcctcgccgcggcggccgcggcccggcgaaagctcggcaagcaagcaagctga

SEQ ID NO: 1850 - protein, 365 aa, Amycolatopsis balhimycina
MAAMTHTVATTDLDNQRIERIVPLVTPALLHHELPLSATAAETVRKGRESVVRVLDGTDDRLLVITGPCSIHDPAAALDYAGHLAAIAGEVAGDLLVVMRVYFEKPRTIGGWKGLINDPHLDGTGDVNHGLRTARHLLLELAERGLPAACEWLDTTIPAYFADTVSWGAIGARTVESQNHRMLASGLSMPVGFKNRRDGDITVAIDAIRAAAVRHVVPGVDPGGLPAILHTAGNPDCHVVLRGGDGAPNHDSASVHKTLTALEAAGLPGRVVIDASHDNSGKDHHRQPLVAAEIAGQVENGRNGIVGVMLESNLRAGRQDLQPGRPPAYGQSITDACIDVPTTRTVLHGLAAAAAARRKLGKQAS

SEQ ID NO: 1851 - DNA, 1071 bp, Vibrio vulnificus
  CDS (1)..(1071)
atgcctacgctcagcaaattgattcactccactccttgtggaacactcccttctgtggaagagatcattcaacacgcctcactggacgaagagagcgaagcgtttatccgacaacgtcgccaagacatcactcgaattctaaatggccaagaccctcgattactggtgatcatcggcccatgttcaattcacgacccgcaagcaggcctagaatatgcgcagaaactggccaacattcagcatcagcatgaaaagcaacttctgattgtgatgcgaacttactttgaaaaaccacgcacacgcgcaggatggaaagggctgatcgtcgatcccgatctcgataacagccacgacattaataaaggtctgcggcttgctcgacatttcttacagcaagtcatcaagcttggcctcgcgacggcaaccgagtatttagacaccacgacttacccctatatttctgacctcatttgttggggggccattggcgcgaggacaactgaatctcaaattcaccgtcaaatggcctcggcgcttccctgccctattggtttcaaaaacgggaccgacggcaatgttgatattgctatcgacgcgatacacgcggcaaactcaccccatctcatctgtgtgccaggatttggggcacgtactctcacagccatcagtcatggtaaccccaatggccatatcattttgcgaggtggcaaaacaccaaactacaccaccgagcatgtttgccaaatcagccaacaactggaagccaacgatcttaacccgcgcctgatcattgattgcagccatggcaatagcctgaaagtggcaaagaaccaactcgatgtggcgagaaacatcgcctgtcagttgatcgaaggagaaaaatgcattgcaggcgtgatggcggagagcttcttggtagcaggcgcgcaaaagatcaccgatcgtccgttgatcaaaggcatgtcgattactgatgaatgtttggggtgggaagagacagaaagtattctcaatatttttgcggaagcggtgaatatcgtgatgacggagcgcttttccaccgttgcctaa

SEQ ID NO: 1852 - protein, 356 aa, Vibrio vulnificus
MPTLSKLIHSTPCGTLPSVEEIIQHASLDEESEAFIRQRRQDITRILNGQDPRLLVIIGPCSIHDPQAGLEYAQKLANIQHQHEKQLLIVMRTYFEKPRTRAGWKGLIVDPDLDNSHDINKGLRLARHFLQQVIKLGLATATEYLDTTTYPYISDLICWGAIGARTTESQIHRQMASALPCPIGFKNGTDGNVDIAIDAIHAANSPHLICVPGFGARTLTAISHGNPNGHIILRGGKTPNYTTEHVCQISQQLEANDLNPRLIIDCSHGNSLKVAKNQLDVARNIACQLIEGEKCIAGVMAESFLVAGAQKITDRPLIKGMSITDECLGWEETESILNIFAEAVNIVMTERFSTVA

SEQ ID NO: 1853 - DNA, 1095 bp, Photorhabdus luminescens
  CDS (1)..(1095)
atgttcatgcaaagagatgcacttaataacgttcacatcagtggtgagcaaattcttatcaccccaaaagaattaaagcaacaatacccactgagtgatgatgatctgcatgttattgcaaatgcacgtaaaacaattgcggatattattcagcgccgtgatccccgtttgctggtagtgtgtggtccttgctctattcatgacgtggatgcggcgctggattatgctcaccgtttggccgctctttctgctgaattgagtgatagcttgtacattgtcatgcgtgtctattttgaaaagcctcgaacaacagtgggttggaaaggtcttattaatgatccatacatggatggttcatttgatgtggaagctggcctgcatattgcccgccgcttactacttagtttagtgaaaatgggattgcctcttgcaacagaagctttagatccgaatagcccacaatatttgggggatttattcagttggtctgcaattggtgcgagaaccacagaatcccagacacaccgggaaatggcttcaggtttatctatgccggttggtttcaaaaatgggactgacggtagcttgaacacggcaattaatgcgatgtgtgcagccgctatgccacatcgttttgtgggaataaaccagtcggggcaggtgtgtttattacaaacgcaaggaaacccgaatggacatattatcttgcgtggtggtaagacccctaattacagtgttcaacatgtaatggaatgtgaacagcaaatgatgcaggctggattattgccatccttgatgattgattgtagtcatggtaactctaataaggattttcgtcgccaaagtttggttgtagattctgttgcggatcagatcatttcaggtaatcaatctattactggcattatgttggagagccatattaatgaaggtaaccaatcttctgagcaaccgcgtagtgaaatgaaatatggtgtatcagtcactgacgcgtgtattagttggcagacgacagaagcagttctaagaaaattacatcagcaaattagcatgcaattgtcgcaaagaatggcagtattgaaaaaagcgggataa

SEQ ID NO: 1854 - protein, 364 aa, Photorhabdus luminescens
MFMQRDALNNVHISGEQILITPKELKQQYPLSDDDLHVIANARKTIADIIQRRDPRLLVVCGPCSIHDVDAALDYAHRLAALSAELSDSLYIVMRVYFEKPRTTVGWKGLINDPYMDGSFDVEAGLHIARRLLLSLVKMGLPLATEALDPNSPQYLGDLFSWSAIGARTTESQTHREMASGLSMPVGFKNGTDGSLNTAINAMCAAAMPHRFVGINQSGQVCLLQTQGNPNGHIILRGGKTPNYSVQHVMECEQQMMQAGLLPSLMIDCSHGNSNKDFRRQSLVVDSVADQIISGNQSITGIMLESHINEGNQSSEQPRSEMKYGVSVTDACISWQTTEAVLRKLHQQISMQLSQRMAVLKKAG

SEQ ID NO: 1855 - DNA, 1107 bp, Chromobacterium violaceum
  CDS (1)..(1107)
atgacaacgcttgccaggccggaacacggcctactcgcgcccgaacacggccacgcgtcgccgccgtccagccaggcggactaccgcgcgatggccagccccgccgaactattgcgcagcctgccggccggcccgcgcgccagcgcctcggtccattccggccgcgaggcggtgaaacgcgtactgagcggagcagatccgcgctggctggtggtggtgggcccctgctccatccacgacccgcgcgccggcctggactacgccgcccggctggcggacctcgcctccgagctggacgacacgctgctgatcgtgatgcgcgcctacttcgaaaagccgcgcaccagcgtgggctggaagggcctgatcaacgatccctacatggacgacagctattgcgtggacgagggcatgcacatcgcccgccgcttccttttggccgccgccgaactgggcctgccgctggccggcgaggcgctggacccgatgtcgccgctgtatctggccgacctctatagctggatggcgatcggcgcgcgcaccaccgaatcgcaaatccaccgcgagctggcctcggcgctggacagcgccgtcggattcaagaacagcaccgacggctcgctggacgcggcgctcaacgccatcgtctccgccagcgcgccgcacgcctacctcggcatgggcaaggacggccgggtggcggtggtgaacagccgcggcaacccgcactgccacctggtgctgcgcggcggcggcggccggcccaattacgactcggtgagcatcgcgctggccgagcaggcaatgaagaagcacgacattccgcccgccatcatggtggactgcgcgcacgccaactcatggaagcagcacacgctgcagccgcgcgtgctggccgacgcggtgtcccagatccgccacggcaaccgcagcatccgcgccttcatgctggagagcttcatcgaagccggcaaccagtccatcccggccgatctgtcgcagctgcgctacggctgctcggtgaccgatccctgcgtcgactggcacaccaccgccgacatcctgcgcgacgcgcgcgccaagctgcggccgctgctggaaagctga

SEQ ID NO: 1856 - protein, 368 aa, Chromobacterium violaceum
MTTLARPEHGLLAPEHGHASPPSSQADYRAMASPAELLRSLPAGPRASASVHSGREAVKRVLSGADPRWLVVVGPCSIHDPRAGLDYAARLADLASELDDTLLIVMRAYFEKPRTSVGWKGLINDPYMDDSYCVDEGMHIARRFLLAAAELGLPLAGEALDPMSPLYLADLYSWMAIGARTTESQIHRELASALDSAVGFKNSTDGSLDAALNAIVSASAPHAYLGMGKDGRVAVVNSRGNPHCHLVLRGGGGRPNYDSVSIALAEQAMKKHDIPPAIMVDCAHANSWKQHTLQPRVLADAVSQIRHGNRSIRAFMLESFIEAGNQSIPADLSQLRYGCSVTDPCVDWHTTADILRDARAKLRPLLES

SEQ ID NO: 1857 - DNA, 1140 bp, Neurospora crassa
  CDS (1)..(1140)
atggtcggccctgatatggtggcccttcgggctgatgacacaagagtcgagggacaggatcccctcatccctcctgctcttctcatttccgagattcccatgacggatgccgctctcgagactgttgtcaagggcaggaaggaggccgtaggtgtcatcatgggcaaggatgaccgtctccttgtcgttgttggcccctgctcccttcacgatcctgctacagctctcgagtactgcagcaggctcaaggctctttccgagaagctcaaggacgacctcgttatcgtgatgagagcctacctcgagaagcctcgcacgaccgtcggctggaagggtctcatcaacgatcccgatatcgactcttctttcaagatcaacaagggtcttcgtatctccagacagcttttctgcgatttgacctctgccggtatgcctattgcttcggagatgttggacaccatctcccctcagttccttgccgacttcatctctgtcggtgctatcggcgcccgtactaccgaaagccagcttcaccgcgagcttgcctctggtctctctttccctgtcggtttcaagaacggaaccgacggaaacctcggtgttgccattgatgccattggcgctgccgcggctaagcaccacttcatgggcgttaccaagcagggcttggccgctatcacccgcaccaagggcaacgagcacggtttcgttatcctccgtggtggcaccaagggccccaactacgacaaggagaacgtccaggctgcgaaggagactctcatcaagaagggccagaagctcgccatcatggtcgactgctctcacggcaactccaacaaggaccaccgcaaccagcccaaggttgccaaggtcgttgccgaccagattcgcgagggcgagaaagccatcattggtgtcatgatcgagtccaacatcaacgagggcaaccagaaggttcctgctgagggtccctcggcgctcaagaagggcgtcagcatcaccgatgcctgcattgactgggagtccactgtctcgaccctcgaggagctcgctgaggcggttcgcgagcgtcgtgaggtgaacggtggcctcgccagcggtgtggctacccccaagcccaaccctctcgaggaggactag

SEQ ID NO: 1858 - protein, 379 aa, Neurospora crassa
MVGPDMVALRADDTRVEGQDPLIPPALLISEIPMTDAALETVVKGRKEAVGVIMGKDDRLLVVVGPCSLHDPATALEYCSRLKALSEKLKDDLVIVMRAYLEKPRTTVGWKGLINDPDIDSSFKINKGLRISRQLFCDLTSAGMPIASEMLDTISPQFLADFISVGAIGARTTESQLHRELASGLSFPVGFKNGTDGNLGVAIDAIGAAAAKHHFMGVTKQGLAAITRTKGNEHGFVILRGGTKGPNYDKENVQAAKETLIKKGQKLAIMVDCSHGNSNKDHRNQPKVAKVVADQIREGEKAIIGVMIESNINEGNQKVPAEGPSALKKGVSITDACIDWESTVSTLEELAEAVRERREVNGGLASGVATPKPNPLEED

SEQ ID NO: 1859 - DNA, 1092 bp, Neurospora crassa
  CDS (1)..(1092)
atgtcgcaacatttctacattgagaaccgcaacgtcggcaatcaggccgaaagcgaggattggcgcattcgcggctacaacccgctgacccctcccgacctgctccaacatgagatcccccagaccgctgaatcgaaacaaaccgtcatcaatggccgcaaggaggtggtcgccgttgtcaatggcaccgacgagaaggaaaggttactagtagtcatcggtccctgctccatccacgatcccaatgccgccctcgaatactgcgatctactactcaaggagaaggagaagcacaaggatgagctgttgattgtcatgcgatcctacctcgaaaagccccggacgaccgttggctggaagggcctgatcaacgaccccgatatcgacaacagcttccagatcaacaagggcttgcgcctgagcagacagttgttcgttgacctcacctccaagggcatgcccctcgccagcgagatgttggataccatcagcccgcaattccttgccgatctgttgagtgtcggcgctgtcggtgctcgcaccaccgaaagccagctccaccgcgagttggccagtggcctcagtttccccgtaggcttcaagaacggcactgacggtaccctgggtgttgccattgatgctattggcgctgtcagacatccccatcactttttgtccgtcaccaagcccggtgtcgttgccatcgtcggaactgttggcaacgaggactgcttcgtcatcctccgtggcggtaccaagggcaccaactacgatgcgaagagcatcgctgaggccaaggctgcgctggagaagagcggcttgcgccagcgcctgatgattgactgcagccacggcaactcgaataagaaccacaagaaccagcccaaggtcgctgccgaaattgcgcaacaacttgagaacggcgaaactggtaaccagaaggtgcccgaggaaggcaagtgcggcctcaagtacggtgtcagtatcactgatgcttgtattggctgggaggacactgtcgccactctcgacacgcttgcgcaggccgtcaaaaagaggagagaagtcctgagcaagaacgccgctgcctaa

SEQ ID NO: 1860 - protein, 363 aa, Neurospora crassa
MSQHFYIENRNVGNQAESEDWRIRGYNPLTPPDLLQHEIPQTAESKQTVINGRKEVVAVVNGTDEKERLLVVIGPCSIHDPNAALEYCDLLLKEKEKHKDELLIVMRSYLEKPRTTVGWKGLINDPDIDNSFQINKGLRLSRQLFVDLTSKGMPLASEMLDTISPQFLADLLSVGAVGARTTESQLHRELASGLSFPVGFKNGTDGTLGVAIDAIGAVRHPHHFLSVTKPGVVAIVGTVGNEDCFVILRGGTKGTNYDAKSIAEAKAALEKSGLRQRLMIDCSHGNSNKNHKNQPKVAAEIAQQLENGETGNQKVPEEGKCGLKYGVSITDACIGWEDTVATLDTLAQAVKKRREVLSKNAAA

SEQ ID NO: 1861 - DNA, 1068 bp, Prochlorococcus marinus subsp
  CDS (1)..(1068)
atgacgacttcatccaataatcaatctttagaaaaaacatctgatttgcatgttgttgaaacacgtccattaatacctccaagcaaacttcataatgatatacctttagattatacctctgcagaaactgtctctaatactagaagatcaatacaaaatattttgcacaataatgatcctcggattctagtcatagtgggaccatgttcaattcatgatattgaggctgctaaagattattcagaatatattcaggaatttagaaaaatttataaagataaattagaaattgtaatgcgagtatatttcgaaaaacccagaactacaattggttggaaaggattaataaatgaccctcatttagatggttcatatgacattaatacaggtttacgaagagcgagaaatttactatcttatttggcaacgcgtgggataccctctgctactgagttattagatccaattgttcctcaatatattgctgatttaatcagttggacagcaattggtgcaaggactaccgaaagtcaaactcatagagaaatggcttcaggattatccatgcctattggttttaaaaatggtactgatggttcttttagtactgctattaatgcgatgcagtcggcttcaaaatctcatcatttcttaggtgttaatgatcaaggttatgcttctattgtaaatacaaccggcaatccagatggacatatagttttaaggggaggttctaaaggagttaatttcgaaaatcaacatgtaaaaagtatttcttccgaattaaaagaaggtaatcttccttacaaagttatgattgattgtagccatggaaattctaataaagattacacaaagcaatctgatgtccttaaaaacgtagcaaatcagattaagaatggtgaaaaaaatattttaggagtaatgcttgaaagtcatctgaaggagggtaatcaaaaactttcaaatatgaaagatcttgaatatggtacgagtattactgatgcttgcataaatatagaaacaacgaaaaatttgcttcagattctatatgattcaattttgtaa

SEQ ID NO: 1862 - protein, 355 aa, Prochlorococcus marinus subsp
MTTSSNNQSLEKTSDLHVVETRPLIPPSKLHNDIPLDYTSAETVSNTRRSIQNILHNNDPRILVIVGPCSIHDIEAAKDYSEYIQEFRKIYKDKLEIVMRVYFEKPRTTIGWKGLINDPHLDGSYDINTGLRRARNLLSYLATRGIPSATELLDPIVPQYIADLISWTAIGARTTESQTHREMASGLSMPIGFKNGTDGSFSTAINAMQSASKSHHFLGVNDQGYASIVNTTGNPDGHIVLRGGSKGVNFENQHVKSISSELKEGNLPYKVMIDCSHGNSNKDYTKQSDVLKNVANQIKNGEKNILGVMLESHLKEGNQKLSNMKDLEYGTSITDACINIETTKNLLQILYDSIL

SEQ ID NO: 1863 - DNA, 1074 bp, Prochlorococcus marinus
  CDS (1)..(1074)
atgaccttttcaacgaattttcagatatctgataaaacttccgatctacacgttgttgagactaggccattagtccctccagcttcccttcacaaggatttgccattagatcatcactcttcaaccattgtttctaagacaagaaaaacaatacaagcaattctggcaggatcagattcacgattattggtaattgttggcccttgttcaattcatgatattgctgctgccaaagattatgcaaatcagctgcttccgctaagagaaaaattttctaagcaactcgaaattgtaatgagagtttattttgaaaaacctaggacaactactggttggaagggtctcattaatgatcctcatcttgatgggtcttatgacattaatactggtttaagaagagcgagatctttgcttctagatttagcaaatttaggtattccaacagcaactgagcttttagatcctgttgttcctcaatatatagctgatttaattagttggactgcaattggggcaagaacgactgagagtcaaactcatagagaaatggcttccggattatctatgccaataggatataagaatggaacagatgggactattgctattgctattaatgctatgaaagcagcttcaaagcctcatcattttctaggtattaatcatgaaggccatgcatctattattagtacgacaggcaaccctgatggtcatcttgttttgagagggggaagtagtggtactaattatcatctggaatcagtgcaaaaagttgctcaagaacttctacaatcaggctcaaaaagtaaagtgatggttgactgtagtcacggtaactcagataaggattttcgaaaacaaggtattgtcttgaaagaggttgctaagcaggttaaagaaggttcgtctaatgtcatgggagtgatgcttgagagccatttggttgaaggtaatcaaaaattaactaaggacttatcaacattgatttatggaaaaagtattacagatgcctgtatagatttgaagacgacagaaactttgtttgagcaacttgctgatgctgttactttttaa

SEQ ID NO: 1864 - protein, 357 aa, Prochlorococcus marinus
MTFSTNFQISDKTSDLHVVETRPLVPPASLHKDLPLDHHSSTIVSKTRKTIQAILAGSDSRLLVIVGPCSIHDIAAAKDYANQLLPLREKFSKQLEIVMRVYFEKPRTTTGWKGLINDPHLDGSYDINTGLRRARSLLLDLANLGIPTATELLDPVVPQYIADLISWTAIGARTTESQTHREMASGLSMPIGYKNGTDGTIAIAINAMKAASKPHHFLGINHEGHASIISTTGNPDGHLVLRGGSSGTNYHLESVQKVAQELLQSGSKSKVMVDCSHGNSDKDFRKQGIVLKEVAKQVKEGSSNVMGVMLESHLVEGNQKLTKDLSTLIYGKSITDACIDLKTTETLFEQLADAVTF

SEQ ID NO: 1865 - DNA, 1080 bp, Haemophilus ducreyi
  CDS (1)..(1080)
atggattctgtagcaaatcaagatagtttacataatgtaaatatctctactgaaaaagtattacttactccaaaacaactaaaaactgagtttccattacccgatcatttacgtaagcaaattgaaaaatcacgccaagaaattgccgcgattattcataaaaaagatccacgtaaacttattatcatcggaccttgttctattcacgatatctctgccgcattagagtatggccaaaaactaaaaaaattagccgaccaagtaagcgatcaactttatattgtaatgcgggtatattttgaaaaaccgcgcaccaccgtaggatggaagggcttaattaacgatccacaaatagatggcacttttaatgttgaagccggtttacgcattgcacgtaaattgtgcttagatttaactgaactaggcttaccattagccacagaagcactagatccaatgacaccacaatatttagcagatctttttagctggtcagcgattggagcaagaacgactgaatcacaaacacatcgtgaattagcttctggtttatctatggccgttggctttaaaaatggcactgatggcggcctagctgtggcgattaacgccatgcaatctgccgcacaaccgcatcgtttcattggtatcaatcaaaatggacaggtcaatttattaaataccaaagggaatcctgatggccacgtgattttacgtggcggtaaaaaacctaactttgaacaaaaatatgtaatggaatgtgaaactgcattacgtaaagcgggtttagaagaagcaataatgattgattgtagccacggtaattcaaataaagatcacacacgtcaacctatagttgcagaaaatgtactcacgcaattattggcaggtaaccgatcgatcatcggcttaatgattgaaagccatttaaatgcgggtaatcagccctctgaacaatcattccaagagatgaaatacggcatatccattacagatgcttgtattgattggcaaaccactgaacatatacttctcaacttcgccgcaaaattaagaaatcccccatcttcctttcagtaa

SEQ ID NO: 1866 - protein, 359 aa, Haemophilus ducreyi
MDSVANQDSLHNVNISTEKVLLTPKQLKTEFPLPDHLRKQIEKSRQEIAAIIHKKDPRKLIIIGPCSIHDISAALEYGQKLKKLADQVSDQLYIVMRVYFEKPRTTVGWKGLINDPQIDGTFNVEAGLRIARKLCLDLTELGLPLATEALDPMTPQYLADLFSWSAIGARTTESQTHRELASGLSMAVGFKNGTDGGLAVAINAMQSAAQPHRFIGINQNGQVNLLNTKGNPDGHVILRGGKKPNFEQKYVMECETALRKAGLEEAIMIDCSHGNSNKDHTRQPIVAENVLTQLLAGNRSIIGLMIESHLNAGNQPSEQSFQEMKYGISITDACIDWQTTEHILLNFAAKLRNPPSSFQ

SEQ ID NO: 1867 - DNA, 1086 bp, Candidatus Blochmannia floridanus
  CDS (1)..(1086)
atgcaaaagaataatttaggtaatataaatttttgtgatataagttctttgctttctcctaaacaattaaaatctcaatttcctttaacgtatgttgatcaactttttattgaagaaacacaaaatattattataaatattattcaaaaaaaagatcctcgtttgttgattatatgtggtccttgttctattcatgatgtgaacgctgcttttgattatgccaagaaattaaaatctttatcattagaattgcaagatcaattatatattgtaatgagagtatatttagaaaaacctcgtactacaattggatggaaaggattaattaatgatccttatatagatggttcttgtgatattcagtctggattaaaaattgctcgtcaattattattgcaattaataaaaattaaattgcctgtagcgactgaaatattaaatccaaatgttcctcaatatattggagatttatttagttgggtagctattggggctcgtactacagagtcacagatacatcgagaaatagcttctagttttcagtcggtaataggttttaaaaatagtactcatggagatattgatcatgcaattaatgcaatacgtgcagcttccatgtctcataattatattagtattgatcaatctgggcaggtgtgttcattacatactaaaggaaatacaaatagtcatataattttaagaggagggattcaacctaattattatccagaaaatattatttgttgtgaaaaaaaaataacagaaatagggttacctataacattaatgatcgattgtagtcatggtaattctaataaggattatcatcgtcaaatagatgtagctcaatctattttaaatcaaataaagttgggtaatcattctattataggattaatgatggaaagttatatttatcctggaaatcaaatagtagatttgacgcatacttcttctattaaaatgcagtatggggtatctataacagatgcttgtatagattgggattcaactgaacgattattaagatgcttacataaagaattgaaaccatttctttctactcgtttaaaaagagtatga

SEQ ID NO: 1868 - protein, 361 aa, Candidatus Blochmannia floridanus
MQKNNLGNINFCDISSLLSPKQLKSQFPLTYVDQLFIEETQNIIINIIQKKDPRLLIICGPCSIHDVNAAFDYAKKLKSLSLELQDQLYIVMRVYLEKPRTTIGWKGLINDPYIDGSCDIQSGLKIARQLLLQLIKIKLPVATEILNPNVPQYIGDLFSWVAIGARTTESQIHREIASSFQSVIGFKNSTHGDIDHAINAIRAASMSHNYISIDQSGQVCSLHTKGNTNSHIILRGGIQPNYYPENIICCEKKITEIGLPITLMIDCSHGNSNKDYHRQIDVAQSILNQIKLGNHSIIGLMMESYIYPGNQIVDLTHTSSIKMQYGVSITDACIDWDSTERLLRCLHKELKPFLSTRLKRV

SEQ ID NO: 1869 - DNA, 1143 bp, Xylella fastidiosa
  CDS (1)..(1143): transl_table=11
ttgtctcctccgcttggtctatgtctaaatgttctgagattacatcccatgccaccatttaccgacgacctccgtatccgaaaaattgaaccactgacacctcctaacaagctcctcttacaactaccatgcgatgagcaggcatcgctgactgttgcgacctcacgcaacgcactgcacgatatcctgcacggccacaatgaccgtttagccgtcgtgataggcccatgctcaatccatgatccaattgcagccattgattactcgcaacgtctacgcccattgcgtgagatgtacaaggatgcactagaaatcgtgatgcgagtttactttcagaaaccgcgcaccactattggttggaaaggattggtcaacgatccggatcttgatggcagcttccagatcaataagggcttgcatatcgcgcgcaacctgctgcgcgatatcaatcatctcggcttacccgctggtgtggaatttctagacacgatttcgccgcaatatctggctgacttagtcgcctggggtgccattggtgctcgcaccactgaaagccaaatacaccgtgaaatggcttcaggtttatcgtgcccgattggctttaaaaacagtaccagtggtgatgtgaagattgctgctgacgcgattaaagcagcttcgcatccgcaccatttcctttcagtgacaaagacaggtgttgccgcagtcgtcgccacccagggtaaccccgattgtcacgtgattctgcgtggaggcaaggtcccgaattacgacgcaatcaatgtcgaagctgccagccaaacattgcttaaatccaagctaccggtgcgactgatgattgatgcgagccatgccaatagcggcaaaaatccaaacaatcaacctaaggtgatcgagaacatcgtagaacagcttaaagccggtgaacgccgcatcatcggtgtcatgattgaaagccacattgttggtggccggcaagaattagtccttggaaacacacttaactatggacagagcattaccgatgcttgcatcgactgggatacctcggttgcaatgttagaacagctcgctcaggccgtacgcgtcagacagactctaccaacgaccactacagctaacaaaacatcaaaaacccaataa

SEQ ID NO: 1870 - protein, 380 aa, Xylella fastidiosa
MSPPLGLCLNVLRLHPMPPFTDDLRIRKIEPLTPPNKLLLQLPCDEQASLTVATSRNALHDILHGHNDRLAVVIGPCSIHDPIAAIDYSQRLRPLREMYKDALEIVMRVYFQKPRTTIGWKGLVNDPDLDGSFQINKGLHIARNLLRDINHLGLPAGVEFLDTISPQYLADLVAWGAIGARTTESQIHREMASGLSCPIGFKNSTSGDVKIAADAIKAASHPHHFLSVTKTGVAAVVATQGNPDCHVILRGGKVPNYDAINVEAASQTLLKSKLPVRLMIDASHANSGKNPNNQPKVIENIVEQLKAGERRIIGVMIESHIVGGRQELVLGNTLNYGQSITDACIDWDTSVAMLEQLAQAVRVRQTLPTTTTANKTSKTQ

SEQ ID NO: 1871 - DNA, 1074 bp, Vibrio parahaemolyticus
  CDS (1)..(1074)
atgcaaaaaagtgaattgagcaatattaacatcagcgatgaacaggttcttattacgccagatgagctaaaagtgaagcttcctcttagtgaaaaggcacgccgttttattcaagaatctcgccaaaccatcgccaacatcattcacaaaaaagaccatcgcctacttgtcgtatgtggaccatgctctatccatgacattgaagccgcaaaggattacgcgaagcgtctaaaagctctttctgaacaactaagcgaccaactgtatattgtaatgcgtgtttactttgagaagccgcgcaccacggtcggctggaaaggcctgatcaatgacccacacctagatggcagcttcgacattgaacacggtctgcatgtaggacgtgaactgctggtggaactggcggaaatggaaatcccacttgcaaccgaagctcttgacccaattagcccacaatacttagccgatacttttagttgggcagcgatcggcgcacgcacaacagaatcacaaacacaccgtgagatggctagtggtctttcgatgccgattggctttaagaatggcacagatggtagtttggcaaccgcaatcaatgcgatgcaggcagcctcttctagccaccgctttatgggtatcaaccgtgaaggtcaagttgcgttgctcacaacccaaggtaacccgaatggccacgtgatcctacgtggtggtaaacagacgaactacgattcagtatccgttacggaatgcgaacaagaaatggcgaaatcaggtcttgaagcgtcattgatggtggattgcagccatgcaaactcacgcaaagattaccgtcgtcagccattggtcgcagaagatgtgattcaccaaatccgtgaagggaacaagtcgatcatcggtttgatgatcgagagccacatcaatgaaggtaatcaatcttctgagctggcgttggatgagatgaaatacggcgtatctatcactgacgcttgtattaattgggagtcaactgaggcactattacgtcatgcacacgaagagctggtgcctttcttagaaaaccgccttaaaggctaa

SEQ ID NO: 1872 - protein, 357 aa, Vibrio parahaemolyticus
MQKSELSNINISDEQVLITPDELKVKLPLSEKARRFIQESRQTIANIIHKKDHRLLVVCGPCSIHDIEAAKDYAKRLKALSEQLSDQLYIVMRVYFEKPRTTVGWKGLINDPHLDGSFDIEHGLHVGRELLVELAEMEIPLATEALDPISPQYLADTFSWAAIGARTTESQTHREMASGLSMPIGFKNGTDGSLATAINAMQAASSSHRFMGINREGQVALLTTQGNPNGHVILRGGKQTNYDSVSVTECEQEMAKSGLEASLMVDCSHANSRKDYRRQPLVAEDVIHQIREGNKSIIGLMIESHINEGNQSSELALDEMKYGVSITDACINWESTEALLRHAHEELVPFLENRLKG

SEQ ID NO: 1873 - DNA, 1083 bp, Pseudomonas syringae
  CDS (1)..(1083)
atgaattcgcccgttgccgtaaaatcgtccgacctgtccagccatgccgtcacattggcggacaacaaccccgcctcgaaacgcctgcccagcacgcttgagcttaaaatgcgcctgccactcaatgccacgctgaccgaacaggttgcagcccatcgccgcgccgtgcgcgccattctcaatggcgaagactcacgactgctggtcatcgtgggcccctgctcgatccatgatccgcaatccgcgctggaatatgccgagcgactcgccagcctggccgcagaagtcagcgatcagatgctgctggtgatgcgtgcctacgtcgaaaaaccgcgcaccaccgtaggctggaaaggcctggcgtacgaccccgacctggatggcagtgacgacatggccggcggcttgacgctgtcgcggcagttgatgcgtgacatgctgggcatgggcctgccgatcgccaccgaaatactgcagcccatggctgccggctacttcgacgacctgctcagctgggtcgccattggcgctcgcaccaccgaatcgcagatccaccgggaaatggccagcgggctgcccatggcggttggcttcaagaacggcacggatggcggcgtagcggtggccagcgacgcaatgcgctcagcggcgcacccgcatcgtcatttcggcatggacgctcacggtcacccggcgatcatcgagacgcagggcaatccggacacgcacatcgtgcttcgcggcggacacagcggccccaactacgatcgccagagcgttgctcaggtgcaggccggcctgagcaataacgccatagcgtcgcgaatcatggtcgattgcagccacgccaacagcggcaaggacccggcgcgtcagcctcacgtgttcaacgatgtgcttgaacagcgcttgtccggcaacccgtcactgattggcatgatgatcgagagccatctacacgatggctgccaggcgctgggcgaaacgctgcagtacggggtgtcggttaccgacggctgcctgggctggaccgcgaccgagcagttgttgcgtgaagcggtcgaccgcttgcgttacagataa

SEQ ID NO: 1874 - protein, 360 aa, Pseudomonas syringae
MNSPVAVKSSDLSSHAVTLADNNPASKRLPSTLELKMRLPLNATLTEQVAAHRRAVRAILNGEDSRLLVIVGPCSIHDPQSALEYAERLASLAAEVSDQMLLVMRAYVEKPRTTVGWKGLAYDPDLDGSDDMAGGLTLSRQLMRDMLGMGLPIATEILQPMAAGYFDDLLSWVAIGARTTESQIHREMASGLPMAVGFKNGTDGGVAVASDAMRSAAHPHRHFGMDAHGHPAIIETQGNPDTHIVLRGGHSGPNYDRQSVAQVQAGLSNNAIASRIMVDCSHANSGKDPARQPHVFNDVLEQRLSGNPSLIGMMIESHLHDGCQALGETLQYGVSVTDGCLGWTATEQLLREAVDRLRYR

SEQ ID NO: 1875 - DNA, 1077 bp, Pseudomonas syringae
  CDS (1)..(1077)
atggctgatttaccgattaacgacctcaacgttgcctccaacgagactctgatcacaccggatcagctcaagcgcgacatcccgctgaccgacgctgcactgcagactgtcagccagggtcgcgaagtgattcgcaacattctcgatggcaatgatcaccgcctgttcatcgtgatcggcccgtgctcgatccacgacctgaaagcggccaaagagtacgccgagcgcctcaaggtactggcggcggaagtttccgacacgctgtatctggtcatgcgcgtgtacttcgagaagcctcgcaccacagtgggctggaaaggcctgatcaacgacccgtacctggatgactcgttcaagatccaggatggcttgcacatcggccgccaactgctgctggacctggctgaaatgggcctgccgaccgcaaccgaagcgctggacccgatctccccgcaatacctgcaggacctgatcagctggtcggccatcggcgcgcgcaccaccgaatcgcagacccaccgcgagatggcttccggcctgtcttcggccgtcggcttcaagaacggcaccgacggcggcctgaccgttgccatcaacgctctgcagtcggtctcaagcccgcatcgcttcctgggcatcaaccaggaaggcggcgtgtcgatcgtgaccaccaagggcaacgcctatggccacgtcgtgctacgcggtggcaatggcaagcccaactatgattcggtcagcgtcgcgctctgcgagcaggcgctgaacaaggccggcattcgccccaacatcatggtcgattgcagccacgccaactccaacaaggacccggccctgcaaccgctggtgatggaaaacgtcgccaaccagattctggaaggcaacgagtcgatcatcggcctgatggtcgagagccatctgaactggggttgtcaggcgattcccaaggatctgtcggaattgcagtacggcgtctccatcaccgatgcctgcatcgactgggaaagcactgaaaaaaccctgcgcagcatgcatgccaagctcaagggcgtactgccggcgcgcacgcgtaaatga

SEQ ID NO: 1876 - protein, 358 aa, Pseudomonas syringae
MADLPINDLNVASNETLITPDQLKRDIPLTDAALQTVSQGREVIRNILDGNDHRLFIVIGPCSIHDLKAAKEYAERLKVLAAEVSDTLYLVMRVYFEKPRTTVGWKGLINDPYLDDSFKIQDGLHIGRQLLLDLAEMGLPTATEALDPISPQYLQDLISWSAIGARTTESQTHREMASGLSSAVGFKNGTDGGLTVAINALQSVSSPHRFLGINQEGGVSIVTTKGNAYGHVVLRGGNGKPNYDSVSVALCEQALNKAGIRPNIMVDCSHANSNKDPALQPLVMENVANQILEGNESIIGLMVESHLNWGCQAIPKDLSELQYGVSITDACIDWESTEKTLRSMHAKLKGVLPARTRK

SEQ ID NO: 1877 - DNA, 1062 bp, Pseudomonas putida
  CDS (1)..(1062)
atgcacgcttccagcctcgccctgcccctgacccagccgcaagcggccaacaccactgtcagcagacgcctgcccagcccgcacctgctcaagcagcagatgccactgcccagcgaactggcccagcaagtccaggcccatcgccaggccatccgcaacatcctcgaaggccgcgacccgcgcctgctggtcatcgtcggcccctgctcgattcatgacccacgctcggccctggaatacgccgaccgcctggccgcccttggccgcgaagtcaacgacaagctgctgctggtgatgcgcgcctacgtcgaaaaaccgcgtactacagtgggctggaaaggcctggcctacgacccgcacctcgatggcagtgacgacatgcactcgggtatcgccttgtctcgcgggctgatgctgagcatgatcgaacgcggcctgccgatcgctaccgagttgctgcaaccgatggccgccggttacttcgacgacctgttggcctgggcggcgatcggcgcacgcaccaccgaatcgcaaatccaccgcgaaatggtcagtggcctggagctgccggtcggcttcaagaacggtacggacggcggcatcgccatcgccagcgacgccatgcgcagcgctgcccacccgcaccgccacttcggtatggatgctcagggccacccggcgatcatcgagaccttgggcaacccggacacacaccttgtactgcgcggcggccacaaaggcccgaaccatgatgccaacagcatcgccatggcccgccaggcgttggccaaggccggtctgcaggcacggatcatggtcgattgcagccacgccaacagcggcaaggacccggcgcgccagccagcggtcttcaatgatgtgctggaacagcgcctggccggcgaccgttcgttggtcggcgtcatgatcgaagggcacttgttcgatggctgccaggcgttgggcaagggcacactgaaatacggtgtgtcgattaccgacggctgcctgggctgggcctcgaccgaaaccctgttgcgtgaggcggcacaaaaactgtag

SEQ ID NO: 1878 - protein, 353 aa, Pseudomonas putida
MHASSLALPLTQPQAANTTVSRRLPSPHLLKQQMPLPSELAQQVQAHRQAIRNILEGRDPRLLVIVGPCSIHDPRSALEYADRLAALGREVNDKLLLVMRAYVEKPRTTVGWKGLAYDPHLDGSDDMHSGIALSRGLMLSMIERGLPIATELLQPMAAGYFDDLLAWAAIGARTTESQIHREMVSGLELPVGFKNGTDGGIAIASDAMRSAAHPHRHFGMDAQGHPAIIETLGNPDTHLVLRGGHKGPNHDANSIAMARQALAKAGLQARIMVDCSHANSGKDPARQPAVFNDVLEQRLAGDRSLVGVMIEGHLFDGCQALGKGTLKYGVSITDGCLGWASTETLLREAAQKL

SEQ ID NO: 1879 - DNA, 1113 bp, Pseudomonas putida
  CDS (1)..(1113)
atggcggccggcacccgtgacctgacgagtaacacgatggctgatttaccgatcgatgacttgaacgttgcctccaacgagaccctgatcacccctgatcagctcaagaaggaaatccccctcagcgccaaggccctgcagaccgtgactgccggccgtgaagtggtgcgcaatattctcgacggcaaggaccatcgcctgttcgtcgtggtcggcccttgctccatccacgacatcaaggcagcccacgaatacgccgagcgcctgaaagtgctggccgaagaagtgtccgatacgctgtacctggtcatgcgcgtgtacttcgaaaagccgcgcaccaccgtcggctggaaaggcctgatcaacgatccgtacctggatgactcgttcaagatccaggacggcctgcacatcggccgcaagttgctgctggacctggccgaaatgggcctgccgaccgccaccgaagcgctcgacccgatttcgccgcagtacctgcaagacctgatcagctggtcggccatcggtgcccgcaccaccgaatcgcaaacacaccgcgagatggcctcgggcctgtcctcggcggtgggtttcaagaacggtaccgatggcggcctgaccgttgccatcaatgccctgcagtcggtgtccaagccgcaccgcttcctgggcatcaaccaggaaggcggcgtgtcgatcgtcaccaccaagggcaacccatacggccacgtggtactgcgcggcggcaatggcaagccgaactacgactcggtcagcgtcgccctgtgcgaacaggacctggccaaggccaagatcaaggccaacatcatggtcgactgcagccatgccaactccaacaaggacccggccctgcaaccgctggtgatggagaacgtcgccaaccagattctcgaaggcaaccagtcgatcatcggcctgatggtcgaaagccacctgaactggggctgtcagtccattccgaaaaacctggacgatttgcagtatggcgtgtcgatcacggacgcctgcatcgactggtcggctaccgagaaaaccctgcgcagcatgcatgccaagctcaaggatgtgctgccgcagcgtaagcgcggctga

SEQ ID NO: 1880 - protein, 370 aa, Pseudomonas putida
MAAGTRDLTSNTMADLPIDDLNVASNETLITPDQLKKEIPLSAKALQTVTAGREVVRNILDGKDHRLFVVVGPCSIHDIKAAHEYAERLKVLAEEVSDTLYLVMRVYFEKPRTTVGWKGLINDPYLDDSFKIQDGLHIGRKLLLDLAEMGLPTATEALDPISPQYLQDLISWSAIGARTTESQTHREMASGLSSAVGFKNGTDGGLTVAINALQSVSKPHRFLGINQEGGVSIVTTKGNPYGHVVLRGGNGKPNYDSVSVALCEQDLAKAKIKANIMVDCSHANSNKDPALQPLVMENVANQILEGNQSIIGLMVESHLNWGCQSIPKNLDDLQYGVSITDACIDWSATEKTLRSMHAKLKDVLPQRKRG

SEQ ID NO: 1881 - DNA, 1038 bp, Wigglesworthia glossinidia brevipalpis
  CDS (1)..(1038)
atgaattatatttgtgaaaaaattaaatataaaaaattaataagcccaaaaaaattaaaaaaaatttttaaaataaaaaaagaagaagaattttttgttttaagatctagaaaaactattagtaatattattaataaaaaagacaatagaaaattaattatatgtggtccttgctctattcatgatatagaatccacaattgaatatgcaagaaaattaaatattttgtacaaaaaattaatagataaaatatatattgtaataatgatacgttatgaaaaaaaaataaatttttcagaatggaagggaatgatttatgatccatatttgaatggattacatgatattaatcatggattaaaagttattagaaatttgttaattaagttaataaaaatcaaacaacctatagcaatagatatattgaatccatttttttattattatttcgatgatgttattagttgggcatctattggatctgatctaataaattctcaaattagtttagcattttcgtctaattcatcaatcccaataggttttaaaaatagttcagatggaaatatagaaaatactttaaatgcaattataaagtattctaaaattaatgaatttattggaataaatgaaagtggaaaatcttgtattataagaagcccaggaaatattaataatcatattatattaataggtggaaattttccaaattattttcttcaaaatatatatgattgcaaaaaaagaatgaagaattctagaattactacatctataatgatagattgcaacaatggaaattattataaaaattataatgatcaaatagaagtaattaaatcatgtattaagtttttaaaaaaaaataataaaataattataggactaataataaaaagctatattaattctggaaatcagaagtttatttttcctaaaaataaaataaaatatggattatcaataaccagtccttgtattaatttaaaagatactaaactttttttacataatttatatgaatcaataaatatataa

SEQ ID NO: 1882 - protein, 345 aa, Wigglesworthia glossinidia brevipalpis
MNYICEKIKYKKLISPKKLKKIFKIKKEEEFFVLRSRKTISNIINKKDNRKLIICGPCSIHDIESTIEYARKLNILYKKLIDKIYIVIMIRYEKKINFSEWKGMIYDPYLNGLHDINHGLKVIRNLLIKLIKIKQPIAIDILNPFFYYYFDDVISWASIGSDLINSQISLAFSSNSSIPIGFKNSSDGNIENTLNAIIKYSKINEFIGINESGKSCIIRSPGNINNHIILIGGNFPNYFLQNIYDCKKRMKNSRITTSIMIDCNNGNYYKNYNDQIEVIKSCIKFLKKNNKIIIGLIIKSYINSGNQKFIFPKNKIKYGLSITSPCINLKDTKLFLHNLYESINI

SEQ ID NO: 1883 - DNA, 1071 bp, Vibrio vulnificus
  CDS (1)..(1071)
atgcctacgctcagcaaattgattcactccactccttgtggaacactcccttctgtggaagagatcattcaacacgcctcactggacgaagagagcgaagcgtttatccgacaacgtcgccaagacatcactcgaattctgaatggccaagaccctcgattactggtgatcatcggcccatgttcaattcacgacccgcaagcaggcctagaatatgcgcagaaactggccaacattcagcatcagcatgaaaagcaacttctgattgtgatgcgaacttactttgaaaaaccgcgcacacgcgcaggatggaaagggctgatcgtcgatcccgatctcgataacagccacgacattaataaaggtctgcggcttgctcgacaattcttacagcaagtcatcaagcttggccttgcgacggcaaccgagtatttagacaccacgacttacccctatatttctgacctcatttgctggggtgccattggcgcgaggacaactgaatctcaaattcaccgtcaaatggcctcggcgcttccctgtcctattggtttcaaaaacgggaccgacggcaatgttgatattgctatcgacgcgatacacgcggcaaactcaccccatctcatctgtgtgccaggatttggggcacgtactctcacagccatcagtcatggtaaccccaatggccatatcattttgcgaggtggcaaaacgccaaactacaccaccgagcatgtttgccaaatcagccaacaactggaagccaacgatcttaacccgcgcctgatcattgattgcagccatggcaatagcctgaaagtggcaaagaaccaactcgatgtggcgagaaacatcgcctgtcagttgatcgaaggagaaaaatgcattgcaggcgtgatggcggagagcttcttggtagcaggcgcgcaaaagatcaccgatcgtccgttggtcaaaggcatgtcgattactgatgaatgtttggggtgggaagagacggaaagtattctcaatatttttgcggaagcggtgaatgtcgtgatgacggagcgcttttccaccgttgcctaa

SEQ ID NO: 1884 - protein, 356 aa, Vibrio vulnificus
MPTLSKLIHSTPCGTLPSVEEIIQHASLDEESEAFIRQRRQDITRILNGQDPRLLVIIGPCSIHDPQAGLEYAQKLANIQHQHEKQLLIVMRTYFEKPRTRAGWKGLIVDPDLDNSHDINKGLRLARQFLQQVIKLGLATATEYLDTTTYPYISDLICWGAIGARTTESQIHRQMASALPCPIGFKNGTDGNVDIAIDAIHAANSPHLICVPGFGARTLTAISHGNPNGHIILRGGKTPNYTTEHVCQISQQLEANDLNPRLIIDCSHGNSLKVAKNQLDVARNIACQLIEGEKCIAGVMAESFLVAGAQKITDRPLVKGMSITDECLGWEETESILNIFAEAVNVVMTERFSTVA

SEQ ID NO: 1885 - DNA, 1071 bp, Vibrio vulnificus
  CDS (1)..(1071)
atgcagaaaagtgaactaagcaatattaatatcagcgatgaacaagtgctgattacgccagaacagctaaaacagaaactgccactgagcgacaacgcccgccgcttcattcaagagtcgcgtaataccgtcgccaatattattcataagcaagatcatcgtctgctggtggtttgtggtccttgttctattcacgatctggacgcggcaaaggattacgcgcgtcgcctaaaagcgctctccgccgagttaagcgatcaactgtatattgtgatgcgtgtttactttgaaaaacctcgtactactgtgggttggaaagggctcatcaacgaccctcatctggatggtagcttcgatattgagcatggtctgcatgttggccgtcaattgctggtggagctggctgaaatggagatccctctggcgacagaagcactcgacccaattagcccgcaatacttggctgatacattcagttgggctgcgattggtgcgcgtacgacagaatcacaaactcaccgtgaaatggccagtggtttgtctatgccgattggttttaaaaatggcacggatggcagcttgtcaacggcgatcaacgcaatgcaagcggcctcttcaagccaccgttttatggggatcaaccgtgaaggccaagtggcattgctgacgactcaaggtaacccaaatggtcacgtgattttgcgtggtggtaagcagaccaactacgattctgtgtcggtggcggagtgtgagcaagacatggccaaagtgggtttagatgcgtcattgatggtggattgtagccatgccaattcacgcaaagattaccgtcgtcagcctttagtcgccgaagacgtgattcatcaaattcgcgaaggcaacaaatcgatcattggtttgatgattgaaagccacattaatgaaggtaatcaatcctcagatttaccgctttctgagatgcggtacggtgtttctattaccgatgcctgtatcaattggcaggcaactgaggcactattgcgtaaagcacacaaagagttagtgccacatttagaaaaccgtctcaaataa

SEQ ID NO: 1886 - protein, 356 aa, Vibrio vulnificus
MQKSELSNINISDEQVLITPEQLKQKLPLSDNARRFIQESRNTVANIIHKQDHRLLVVCGPCSIHDLDAAKDYARRLKALSAELSDQLYIVMRVYFEKPRTTVGWKGLINDPHLDGSFDIEHGLHVGRQLLVELAEMEIPLATEALDPISPQYLADTFSWAAIGARTTESQTHREMASGLSMPIGFKNGTDGSLSTAINAMQAASSSHRFMGINREGQVALLTTQGNPNGHVILRGGKQTNYDSVSVAECEQDMAKVGLDASLMVDCSHANSRKDYRRQPLVAEDVIHQIREGNKSIIGLMIESHINEGNQSSDLPLSEMRYGVSITDACINWQATEALLRKAHKELVPHLENRLK

SEQ ID NO: 1887 - DNA, 1032 bp, Streptococcus mutans
  CDS (1)..(1032)
atgtcttttaaagcaactagtgataaaattaatatagaagaaatgcggagcttgtcaaaattaacaggtgaagctttagcccaaaaggaagcacgtgatcgtgaattggtttccattatcaagggagaggacaaccgtttactcttgattattggtccttgttcatcagataatgaagaagctgttcttgagtatgctaaacgtcttgctaaattgcaggaagaagttaaagatcgcatctttatggtgatgcgtgtttatacggcaaagccacgcactaatggtgatggctacaaaggaatggtccatcaacctaatacaggcgcggctcccagtctgattaacggtattacagctgtacgccatctgcattatcgtgtgattactgaaacgggtattacaacagcagatgaaatgctctatcctgaaaaccttcctttgattgatgatttagtatcctatattgcagttggtgcccgttcagttgaggatcaacaacaccgttttgtagcttcaggcattgatgtgcctactggcatgaaaaatccaacatcaggaaatcttaatatcatgtttaatggtatttatgctgcgcaaaataaacaatcgttccttttcaatggcgaagaagttgaaaccagcggcaatcctacagctcacgttatcttgcgaggcggcgttaatgaatatggaaaaaatattccaaattattactatgacaatgttttagatacgattgatcagtatgaaaagatggggctgcaaaatccttttattgttgttgataccaatcatgataactctggtaaaaactatttggaacaagtaagaattgttcggcaaacccttattaaccgtgactggaatgacaaaatcaataaatatgttcgcggctttatgattgaatcttatctggaagatggtcgtcagaatgagccagaagtttttggcaagtctattacggatccttgtttgggttgggaaaatactaaacaattggttcatgaaatttatgatactttaggaaattaa

SEQ ID NO: 1888 - protein, 343 aa, Streptococcus mutans
MSFKATSDKINIEEMRSLSKLTGEALAQKEARDRELVSIIKGEDNRLLLIIGPCSSDNEEAVLEYAKRLAKLQEEVKDRIFMVMRVYTAKPRTNGDGYKGMVHQPNTGAAPSLINGITAVRHLHYRVITETGITTADEMLYPENLPLIDDLVSYIAVGARSVEDQQHRFVASGIDVPTGMKNPTSGNLNIMFNGIYAAQNKQSFLFNGEEVETSGNPTAHVILRGGVNEYGKNIPNYYYDNVLDTIDQYEKMGLQNPFIVVDTNHDNSGKNYLEQVRIVRQTLINRDWNDKINKYVRGFMIESYLEDGRQNEPEVFGKSITDPCLGWENTKQLVHEIYDTLGN

SEQ ID NO: 1889 - DNA, 1008 bp, Streptococcus agalactiae
  CDS (1)..(1008)
atgggatttcatcagttaagtgataaaattaatattgaaatattgaagcagaaaactagcttagatctagaagttagccaaaaaaaattagccaaagaagaagagttaaaaaatatcataaaaggtgaggatcagcggtttctagtaatagtaggtccttgttctgcggataatccaaaggcggtgctaacttatgcaaagcgtttagctaaattggaagctgcctttaaagataaaatgtttttggttatgagagtttataccgctaagccaagaacgaatggtgatggttataaaggcttagttcaccattctgacaaactaggagttttttttcaagcacgtaagatgcactatgacatcattcgagagactggactcctgacagctgatgaattactttatccagagatgttatcagtgatggatgatttagtttcttactatgctattggtgcgcgttcagtggaagatcagggacaccgttttatatcttcaggtatagatgcaccagtaggtatgaaaaatccaacgtctggtaatttaagagtcatgcttaatgcggtctatgcagcacaaaatcaacaggaattattctatcaaaataagcaagttagaacagatggtaatttgctgtcacatgttattttgagaggatatcataatgccgactatcgaagtatccctaattatcattatgaaaaccttttagaaactattactcattatgaagagactgatttgcaaaatccctttattgttgttgatacaaatcatgacaattcaggtaagcaatttttagaacaaattcgcattgtgaaatcagtacttgcagaccgacagtggcatactaaaattagaaactatgttcgtggttttttgatagaatcttatttagaagatggaagacaagataaaccagatgtttttggtaagtctatcacagatccatgtctaggttgggataaaacagaaatgctaattagggatatttacaatagtttgtaa

SEQ ID NO: 1890 - protein, 335 aa, Streptococcus agalactiae
MGFHQLSDKINIEILKQKTSLDLEVSQKKLAKEEELKNIIKGEDQRFLVIVGPCSADNPKAVLTYAKRLAKLEAAFKDKMFLVMRVYTAKPRTNGDGYKGLVHHSDKLGVFFQARKMHYDIIRETGLLTADELLYPEMLSVMDDLVSYYAIGARSVEDQGHRFISSGIDAPVGMKNPTSGNLRVMLNAVYAAQNQQELFYQNKQVRTDGNLLSHVILRGYHNADYRSIPNYHYENLLETITHYEETDLQNPFIVVDTNHDNSGKQFLEQIRIVKSVLADRQWHTKIRNYVRGFLIESYLEDGRQDKPDVFGKSITDPCLGWDKTEMLIRDIYNSL

SEQ ID NO: 1891 - DNA, 1092 bp, Shewanella oneidensis
  CDS (1)..(1092)
atgcagcaggatacaattaataacgtccatatcagttcagagaatgttcttattaccccgcaggagctcaaagcggctctaccactctctgagcatgcatatcgttatatcctcaatgcacgcaaaactgtggcggatatcgtccataagcgcgataaccgcgtgctcatcatcactggaccttgttcgattcatgatatcgatgccgccaaagaatacgctttaaaactcaaaaaattacacgatgaacttagtgatgaattttacatcctgatgcgggtgtactttgagaagccacgtaccacagtgggttggaaggggatgattaacgaccccgatatggatggctcttttgatgtggaaaagggcttaaagctggcccgtgagttgatgatttggctggcggaacttgagctgcctgttgcaaccgaagcactcgaccctatcagccctcagtacatttctgagctagtgacttggtcggccataggtgcccgcaccaccgaatcgcaaacccatagggaaatggcgtcgggcttatctatgcccgttggctttaaaaatggtacagatggtaagctcgatgtggcaatcaatgccctcaaatcggcagccagtagccacagatttatggggatcaaccaacagggtcaagtggcgctgttgcaaaccgcgggcaacccagatggtcatgtgattttacgtggtggcgtaacacctaactacgatgcggccagtgtggctgaatgtgaggcgcagcttcataaggccaaactcaatgcccgtcttattatcgattgtagccatggcaactcctctaaggattacgcaaggcaagtccctgtgtgtgaagatgtatttgcgcagatctacaatggtaacaagtccattattggcgtgatgttagagagccatttaaacgaaggtaatcaaagttgtgataaaccatcaggcgaactggcctatggggtttcggtaacagactcctgtattaattgggaaaaaaccgaaagcgttttacgtgcgggcgcatcgaagttatcttcagtgttaccaactcgtttcgatttgcgtaaagtggccaatgcttaa

SEQ ID NO: 1892 - protein, 363 aa, Shewanella oneidensis
MQQDTINNVHISSENVLITPQELKAALPLSEHAYRYILNARKTVADIVHKRDNRVLIITGPCSIHDIDAAKEYALKLKKLHDELSDEFYILMRVYFEKPRTTVGWKGMINDPDMDGSFDVEKGLKLARELMIWLAELELPVATEALDPISPQYISELVTWSAIGARTTESQTHREMASGLSMPVGFKNGTDGKLDVAINALKSAASSHRFMGINQQGQVALLQTAGNPDGHVILRGGVTPNYDAASVAECEAQLHKAKLNARLIIDCSHGNSSKDYARQVPVCEDVFAQIYNGNKSIIGVMLESHLNEGNQSCDKPSGELAYGVSVTDSCINWEKTESVLRAGASKLSSVLPTRFDLRKVANA

SEQ ID NO: 1893 - DNA, 1170 bp, Corynebacterium efficiens
  CDS (1)..(1170)
atgtttccccatatgatttcccccataaacggtttccacaccaccatcaccgcccgaaaggcagaccccagcaccatgagcgccccagtgtccctccccaacccggcatccaccagcaacaaacgggtggttgccttccatgagctgcccagcccggccgaactcaccgccgacaaccccctgagtccacgtcaggcggagaaggttgagcgcgaccgccaggagatcgccgatatcttcgccggcgatgatgaccgcctcgtggttgtggtcggcccgtgttcggtccatgacccggaggctgcgatcgactacgccaaccgcctggcgcccctggccaagcggctggaccaggacctgaagatcgtcatgcgtgtctacttcgagaagccacgcaccaccgtcgggtggaaggggctgatcaatgatccgcacctcaacgagacctacgacatcgccgagggactgcgcctggcacgcaaggtgcttatcgacgttgtgaacctcgacctgcccgtcggttgtgaattcctcgaaccgaacagcccgcagtactacgccgatgccgtggcctggggtgccatcggtgcacgcaccaccgaatcccaggtccaccgccagctcgcctccgggatgtccatgcccatcggtttcaagaacggcaccgacggcaatgtccaggttgccatcgatgcggtggaatccgcccggagcccccacttcttctttggcacctccgaccacggtgcaccctcggtggtgcagaccgcgggtaactccaacagccatatcatcctccgtggtggcaccaccggacccaaccacgatgcggcatccgtggcgcaggccgtggagaagctgggggagggggcacgtctcatgatcgatgcctcccacgccaactcaggcaaggaccatatccgtcaggtcggtgtggtccgtgagatcgccgagcagatcgccgctggtgatgaggccatcgccggcatcatgatcgagtccttcctcgtcggtggcgcccagaacctggatcctgccaggctgaagatcaacggcggtgaggggctggtctacggccagtccgtcaccgacaagtgcatcgacatcgacaccaccgtcgatctgctcggtgagctcgccgcggcggtccgtacccgccggcaggcctga

SEQ ID NO: 1894 - protein, 389 aa, Corynebacterium efficiens
MFPHMISPINGFHTTITARKADPSTMSAPVSLPNPASTSNKRVVAFHELPSPAELTADNPLSPRQAEKVERDRQEIADIFAGDDDRLVVVVGPCSVHDPEAAIDYANRLAPLAKRLDQDLKIVMRVYFEKPRTTVGWKGLINDPHLNETYDIAEGLRLARKVLIDVVNLDLPVGCEFLEPNSPQYYADAVAWGAIGARTTESQVHRQLASGMSMPIGFKNGTDGNVQVAIDAVESARSPHFFFGTSDHGAPSVVQTAGNSNSHIILRGGTTGPNHDAASVAQAVEKLGEGARLMIDASHANSGKDHIRQVGVVREIAEQIAAGDEAIAGIMIESFLVGGAQNLDPARLKINGGEGLVYGQSVTDKCIDIDTTVDLLGELAAAVRTRRQA

SEQ ID NO: 1895 - DNA, 1233 bp, Bifidobacterium longum
  CDS (1)..(1233)
atgcagcagcaggaggaagcagcacattcgctgcatccgttgcaagtcggtccgcagccgttgaacaccccagaagagcttcgcgccattcgtcaggcgatgggggaggggaagaacccgctcgttgccactgatgtgccgcgttgggaagatcaggtgggtgtcagtcgcatcatcaaccgccgcgtattggagttggagccgctgcccacgcccgcgcaagtgctcgctgaactcccgctgactgatcaggctcaggaaatcgtcgcctactcgcgtgatgagattcgcgcgtgcctgtacggccaagacgacaggctgttggtcatcgtcggcccctgttcggttcatgacccgaaggccgcgctggactacgcgcgccgattggccaagctgaaagatgagctcggtgaacagctgctcatcgtcatgcgcgtgtacttcgagaagccgcgcactaccattggctggaagggcctgatcaacgacccggatattgatggcagccacaatattcgcaagggcctgttgcttgctcgcaaaaccttgcttggtgtgctgaaggaaggattggcggccgccacggaatttctggagcccaccagcccgcagttcatctcggacgcggtgagttggggcgccattggtgcgcgcaacacggaaagccagatccaccgccaattggccagcgggctttccatgccggtcggctttaagaatgccactgacggctcggtgaaggcagcggtcaacggttgcttcgccgctgctcagcagcacacgttcttcggcattgaccatctggggcgtgcctgcgcagtcgagacccttggcaacccggactgccatgtggtgttgcgcggctcgattcacggcccgaactacgatgccgaatccgtggccaaagccatggaagacgtacgcgccgaaatgcccgccgaatccgcagcctcgcatggtctgattgttgattgctcgcacggtaactccggcaaggacgaacatcgtcaggccgaagtcgtgcgcaatattgccagcagaattgcagctggcgaacagggtattaccggcatcatgatggaaagctttattgaaggaggcaatcagaaggccgcgccgcttgatcagctggtctatggcaagtcgattactgacaagtgcatcagctgggaagaaaccgaggccttgctgcgcgagcttgcggaagccgtagccacacggcgttggcactga

SEQ ID NO: 1896 - protein, 410 aa, Bifidobacterium longum
MQQQEEAAHSLHPLQVGPQPLNTPEELRAIRQAMGEGKNPLVATDVPRWEDQVGVSRIINRRVLELEPLPTPAQVLAELPLTDQAQEIVAYSRDEIRACLYGQDDRLLVIVGPCSVHDPKAALDYARRLAKLKDELGEQLLIVMRVYFEKPRTTIGWKGLINDPDIDGSHNIRKGLLLARKTLLGVLKEGLAAATEFLEPTSPQFISDAVSWGAIGARNTESQIHRQLASGLSMPVGFKNATDGSVKAAVNGCFAAAQQHTFFGIDHLGRACAVETLGNPDCHVVLRGSIHGPNYDAESVAKAMEDVRAEMPAESAASHGLIVDCSHGNSGKDEHRQAEVVRNIASRIAAGEQGITGIMMESFIEGGNQKAAPLDQLVYGKSITDKCISWEETEALLRELAEAVATRRWH

SEQ ID NO: 1897 - DNA, 1221 bp, Phytophthora infestans
  CDS (20)..(1153)
cggacctgttaagtaagaaatgccgagcacccagccgcaccctgcacctgaaaccgaacgtgtgaccaagcgtcagcgtctagaagaccgtaatgtcgtcgccattaagccgctggtgcctcctgcctgcgtcctggaggaactgcccgtgactcctgaggtgcacgaactggtggacgctacgcgcgacgccgtgtcccgcatcctgcacggtcaagatgaccgcctcgtcgtggtcgtcggcccttgctccattcacgacgtggacgctgccatggactacgccaagcgtctgaaaactcttgcgggcgagctgaacggagaacttctggtgatcatgcgcacctacttcgagaagccccgaacgactgtgggctggaagggtctgatcaatgacccggacctcgaccagtctttcaagatcaacaagggtattcgcattgcccgtaagctgttgctggacgtgaattcgctgggtcttcccgtgagtctggagttcctcgacaccatctcgccccagttcacctcagacctcatttcgtggggagccatgggcgcgcgtactaccgagtcccagctgcaccgcgaacttaccagtggcctgtcgattcctgtgggattcaagaatggcacgggcggcaacgccaaggtggcagtggacgctgccgttgcttcgtcgcagcctcacaacttcctcggtctgaacgaacacggattggcatcgattgtgcgcaccaagggcaacaaggactgccacgtcatcctgcgcggcggctccgatggccccaactacgagcaaaagtacattgatgaggctgctgccatgctaaagaaggctaagcagccgtccaaaatcatggtggactgctcgcacggcaactcgcgcaagctgcacgctaaccagcgaaaggtagttagctacctggctggtattgtttccgagggaaacacgaatgtgcttggtgttatgatcgagtccaatatcgtggagggcaaccagtcgcttggcgacgacccgtccaagctcgtctacggccagagcatcacggatgcgtgcatcaactgggatgacacagtcacgacgctgaaggaacttgcaggtgccgtcgcaaagcggcgcaaacttgatgccgcgaacccggccaccaagtagttgtcagaaacctaaagcacaccaatagcacatgtatcacgatagacacaccaaaaaaaaaaaaaaaa

SEQ ID NO: 1898 - protein, 377 aa, Phytophthora infestans
MPSTQPHPAPETERVTKRQRLEDRNVVAIKPLVPPACVLEELPVTPEVHELVDATRDAVSRILHGQDDRLVVVVGPCSIHDVDAAMDYAKRLKTLAGELNGELLVIMRTYFEKPRTTVGWKGLINDPDLDQSFKINKGIRIARKLLLDVNSLGLPVSLEFLDTISPQFTSDLISWGAMGARTTESQLHRELTSGLSIPVGFKNGTGGNAKVAVDAAVASSQPHNFLGLNEHGLASIVRTKGNKDCHVILRGGSDGPNYEQKYIDEAAAMLKKAKQPSKIMVDCSHGNSRKLHANQRKVVSYLAGIVSEGNTNVLGVMIESNIVEGNQSLGDDPSKLVYGQSITDACINWDDTVTTLKELAGAVAKRRKLDAANPATK

SEQ ID NO: 1899 - DNA, 1035 bp, Escherichia coli
  CDS (1)..(1035)
atgcagtcagtcagtaaatcaatctaccgagggaagttgcttggcagtttacctgctgtgggcgagattcataaagaaatcgcagtatcagaagaaaccgtaacatggatctctctgcaacgagagattatagcgaatattttgctgggaaaagatcctcgcttgcttgtgattgttggtccatgctcaatccatgacgttcaggctgccgttgaatatgcgaaacgattgtccgtattacagaataagtacttatcgcaaatgtacattgtaatgcgcacttattttgagaaacctcgaactcgtaaaggctggaaaggaataatgcacgagcctgatctaaatggaagctataatgttgagaaagggatacgatatgctcgccagtgtttgtcctcaatcacaacaatgcgtgtcgcaaccgctacagaattcctcgatcctttccttactccctatattgctgatttaatatgttggggggctgttggtgccagaactactgaatcacaaacgcatcgtcaacttgcatctggtttacattgtcctgttggatttaaaaacagcactgatggaaatattaacttagctattgatgctattcttgcagcccgtgaacaacatgttgtatatatgacatctttaacaaaatgtatatctaccctattaaccgatggcaatccacatggacatctcatattacgtggtggtagagagccgaactatggtttgtcggatataacgaaggcagtgaaattaatgcatgatgaaggtatcaatcatcgtctgataattgactgtagccatggtaatagtggtaaagtggctgaacggcaaatctctgttgctcgtgaagtcattgataatcggaaaaagatgccgggatatgtagctggaattatgctggaaagctttttacaaggtggaaaacaatcagacagccttccgcgagagtatggtcagtctgttactgatgagtgtctttcatggcaacagacagaacaattattatcaactctggcagcacaactttaa

SEQ ID NO: 1900 - protein, 344 aa, Escherichia coli
MQSVSKSIYRGKLLGSLPAVGEIHKEIAVSEETVTWISLQREIIANILLGKDPRLLVIVGPCSIHDVQAAVEYAKRLSVLQNKYLSQMYIVMRTYFEKPRTRKGWKGIMHEPDLNGSYNVEKGIRYARQCLSSITTMRVATATEFLDPFLTPYIADLICWGAVGARTTESQTHRQLASGLHCPVGFKNSTDGNINLAIDAILAAREQHVVYMTSLTKCISTLLTDGNPHGHLILRGGREPNYGLSDITKAVKLMHDEGINHRLIIDCSHGNSGKVAERQISVAREVIDNRKKMPGYVAGIMLESFLQGGKQSDSLPREYGQSVTDECLSWQQTEQLLSTLAAQL

SEQ ID NO: 1901 - DNA, 1200 bp, Stigmatella aurantiaca
  CDS (62)..(1147)
aattcagcgaaaccttggaatcgggccccctccatcggccaagatggcggcgagaccgcacatgaccgctcgcactgaaaatctgaacgtagttggtttcgaccacatgccctccccctccgagatcaaggagcgcgtgccgatgacaagcctcgcagccgacaccgtgctctccggacggcgcgcgctgatggacatcctcaaccgcaaggatccacgcatcttcgtcatcgtgggcccctgctccatacatgatcccaaggccggcatcgagtacgcccgtcgacttcgcaacctctccgacgagatccgggagacgatcctcgtggtgatgcgggtgtacttcgagaaaccgcgcacctccaccggctggaagggcttcatcaacgacccgaggatggacgactccttccacatcgaggaaggcatggagcggggccgccgcttcttgagggacgtggccgaactgggcctgcccgcggcgaccgaagcgctcgatcccattgccccccagtattacggcgacctgatttcctggacggcgattggcgcgcgcacggcggagtcccagacccaccgcgagatggcctcggggctgtcgacgcccgtgggcttcaagaacggaaccgacggctcgctggacgcggcggtcaacggcatcctctccgcctcgcacccccacagcttcctggggctgaacgagggcggtgaggcggcgatcatccgcaccggaggcaatgcctacagccacctggtgctccgaggcggagggggacggcccaactacgacacggtgtccatcgcgctcgccgaacaggcgctcaccaaggccaagctgccggggaacatcgtggtggactgctcccacgccaactcctggaagaagccggagttgcagcccctggtcatgcgcgacgtggtgcaccagatccgcgaaggcaaccgctccgtggtgggtttgatgctcgaaagcttcctggaagcgggcaaccagcccatccccgccgatctctcgaagctgcgctacggctgctcggtgaccgatgcgtgcgtggactggggcaccaccgaagagacgctgcgcaacgcccacaaggtgctgcgcgaggcattgcccacgcggagctcgggccgcccagcgccctgaacttgcgccccacccctctccgccctgctcgggggcggagaggcgctgtcaca

SEQ ID NO: 1902 - protein, 361 aa, Stigmatella aurantiaca
MTARTENLNVVGFDHMPSPSEIKERVPMTSLAADTVLSGRRALMDILNRKDPRIFVIVGPCSIHDPKAGIEYARRLRNLSDEIRETILVVMRVYFEKPRTSTGWKGFINDPRMDDSFHIEEGMERGRRFLRDVAELGLPAATEALDPIAPQYYGDLISWTAIGARTAESQTHREMASGLSTPVGFKNGTDGSLDAAVNGILSASHPHSFLGLNEGGEAAIIRTGGNAYSHLVLRGGGGRPNYDTVSIALAEQALTKAKLPGNIVVDCSHANSWKKPELQPLVMRDVVHQIREGNRSVVGLMLESFLEAGNQPIPADLSKLRYGCSVTDACVDWGTTEETLRNAHKVLREALPTRSSGRPAP

SEQ ID NO: 1903 - DNA, 1083 bp, Amycolatopsis mediterranei
  CDS (1)..(1083)
atgacgctctccgccggaccggccaccatcggtgacctcgacgccgcccgcaccacgtcgatcagtccgctcatttcgcccgcactgctgcgcgaagaccatccggtcgacgccgcggtcgcgaaggtggtgcgccacggccgcgccgagacggtcgacatcctcgaaggccgcgacgaccggctgctcgtcgtggtcggcccgtgctcggtgcatgaccccgaagccgccctcgactacgcccgccggctggcggcgaaggccgaggagctgcgcggcgagctgcacgtcgtgatgcgcgtgtacttcgagaagccgcgcaccacgctgggctggaagggcctgatcaacgacccggacctcgacggcacgttctccgtcaacaagggcctgcggatggcgcgcaagctgctgctcgacgtgtccgagctggggttgccggtcggctgcgagttcctcgacccgatcacgccgcagttcatcgcggacatcgtgacgtggggttcgatcggtgcccgcacggcggccagccaggtccaccgccagctgtgcagcgcgctgtcgatgccggtgggcatcaagaactccaccgagggcgacgtccaggtggcgatcgacgccacccgcgcggcggcggccagccacgtgttcccgggcatcaacaccgacggcctggcggcgctgctgacgacgtccggcaacccggactgccacgtgatcctgcgcggccacaacaccggcccgaactacgactcgctcactgtcgccgacaccctggcccggctggcgaaggcgggcctgccggagcgggtgatcatcgacgcttcgcacgggaacagcggcaaggaccacgtgcggcagggcgcggtggtgtccgagctggctgcgcggatcgcggcgggcgagcgcgggatttccgggctgatgatggagagcttcctggccggtgggcggcaggagctttcgctggggcacgcctcggagctgacctacgggcagtcgatcacggacgcgtgcctggcctgggacgacaccgcgccgctgctggacgagctcgcctcggcggtgcgggcgcgccgctga

SEQ ID NO: 1904 - protein, 360 aa, Amycolatopsis mediterranei
MTLSAGPATIGDLDAARTTSISPLISPALLREDHPVDAAVAKVVRHGRAETVDILEGRDDRLLVVVGPCSVHDPEAALDYARRLAAKAEELRGELHVVMRVYFEKPRTTLGWKGLINDPDLDGTFSVNKGLRMARKLLLDVSELGLPVGCEFLDPITPQFIADIVTWGSIGARTAASQVHRQLCSALSMPVGIKNSTEGDVQVAIDATRAAAASHVFPGINTDGLAALLTTSGNPDCHVILRGHNTGPNYDSLTVADTLARLAKAGLPERVIIDASHGNSGKDHVRQGAVVSELAARIAAGERGISGLMMESFLAGGRQELSLGHASELTYGQSITDACLAWDDTAPLLDELASAVRARR

SEQ ID NO: 1905 - DNA, 1053 bp, Pasteurella multocida
  CDS (1)..(1053)
atgaataaagataacatacataatgtcaatattgttggtgaaaaggtactgattaccccaaaagaattgaaggaaaaactccctctatcccttcctcttcgtagccaaatagcgcaatcacgccgtgatattgcgaatatcatccataaaaaagatcagcgtttattggttgtgattggaccatgttctattcatgatccgatcgcggctttagaatacgcttcacgtttaaaacacttagcagaagaattacaagatcaattgtatattgtgatgcgagtgtattttgaaaaaccaagaacaactgttggctggaaaggattgattaatgatccgaaattggatggttcatttgatgtggaacatggcttacatattgcacgagcattactgctagagctggctgaaatgggactccctttggcaaccgaagcacttgatcccattatgccgcaatatattgctgatctatttagttggtctgcgattggtgcgagaacgacagaatcacaaacgcacagagaaatgtcatcaggtttatccatggcagtgggatttaaaaatggtacggatggcagtttagccaccgcaattaatgcaatgaaagcagcgtcagttggacacagttttattgggattaatcaacaaggtcaagtcaatctattacatacagcgggcaaccctaatgggcatgtgattttgcgtggcggaaaatcaccaaattatgaagctgaacatatcgcactttgtgaacaagaattgcaaaaagcaggtttgacgcaagcaattatgatcgattgtagccatggtaactcgaataaagattaccgtttgcagccgaaagtggcaaaaaatgccgtacagcaaattgtgaagggaaatcgctctattatcgggttgatgttagaaagtcatttatacgcaggtaatcaaagtgctgatcagccattgagtgaaatgcaatatggggtttcgattacggatgcctgtattgattggcagacgacagaacaattattacgtgaaatgacgagcgcattgcgccaaaaataa

SEQ ID NO: 1906 - protein, 350 aa, Pasteurella multocida
MNKDNIHNVNIVGEKVLITPKELKEKLPLSLPLRSQIAQSRRDIANIIHKKDQRLLVVIGPCSIHDPIAALEYASRLKHLAEELQDQLYIVMRVYFEKPRTTVGWKGLINDPKLDGSFDVEHGLHIARALLLELAEMGLPLATEALDPIMPQYIADLFSWSAIGARTTESQTHREMSSGLSMAVGFKNGTDGSLATAINAMKAASVGHSFIGINQQGQVNLLHTAGNPNGHVILRGGKSPNYEAEHIALCEQELQKAGLTQAIMIDCSHGNSNKDYRLQPKVAKNAVQQIVKGNRSIIGLMLESHLYAGNQSADQPLSEMQYGVSITDACIDWQTTEQLLREMTSALRQK

SEQ ID NO: 1907 - DNA, 1125 bp, Emericella nidulans
  CDS (1)..(1125)
atgtcctccttcttccttccaaatcctaatttaggagatagcaatcaccttgaggattcaagaatccgcggatacaaccctctcacaccacccaacctcctgcaacatgagattgctctaacagagaaagcgcggcaaacggtccttcaaggccgagccgaggccattgccgtcgcccacggcacagacacagacaagcgccgcctcctcgtcgtcattggaccctgctcaattcacgaccccgaaatggccttagagtactgcgaccggctattgaaattgaaggagaaatacaaggatgagttgctaattgttatgcgctcttatctggagaagccccgaacgaccgtcggttggaagggcctcatcaacgacccggatatcgacaacagcttcaacatcaacaagggcctgcgcatctcgcgtcagctcttcgtcgacttgaccaacaagggaatgccaattgccagtgagatgctggacactatctccccgcagtttctggcggactgtctctccgtcggtgcggtcggcgcacggacaaccgaatcgcaggtccatcgtgaattggcctctgggctctcgttccccgttggcttcaagaacggtacagatggctcgttagacgtcgcggttgatgcgattggatccgtaaaacaccctcatcacttcctgtccgtcaccaagcctggtgttgtcgccattgtcggtaccgttggcaatcctgattgctttgttatcctccgcggcggcaagaaagggccgaactacgatgctgctagcatcaccgaagcaaaggagaagctcatagctaagggtctggcaccccgtctgatggtcgactgcagccacggcaactcacaaaaggatcacaagaaccagcctaaggtggcagctgttcttgcggagcagattgctgcaggcgaaaccgcaatcatgggcgtcatgatagagagtaatatcaacgagggcaaccaaaaggtcccacccgagggcaaggccggcctcaaatacggcgtcagtatcaccgacgcctgtatcaattgggaagacaccgagtcaacgctagagacccttgcaaaggctgttgcgactcggagagaaaagctcgcccccagttcatag

SEQ ID NO: 1908 - protein, 374 aa, Emericella nidulans
MSSFFLPNPNLGDSNHLEDSRIRGYNPLTPPNLLQHEIALTEKARQTVLQGRAEAIAVAHGTDTDKRRLLVVIGPCSIHDPEMALEYCDRLLKLKEKYKDELLIVMRSYLEKPRTTVGWKGLINDPDIDNSFNINKGLRISRQLFVDLTNKGMPIASEMLDTISPQFLADCLSVGAVGARTTESQVHRELASGLSFPVGFKNGTDGSLDVAVDAIGSVKHPHHFLSVTKPGVVAIVGTVGNPDCFVILRGGKKGPNYDAASITEAKEKLIAKGLAPRLMVDCSHGNSQKDHKNQPKVAAVLAEQIAAGETAIMGVMIESNINEGNQKVPPEGKAGLKYGVSITDACINWEDTESTLETLAKAVATRREKLAPSS

SEQ ID NO: 1909 - DNA, 1089 bp, Emericella nidulans
  CDS (1)..(1089)
atgagcggtcaaaacgaagatacccgcgtcctgggttacgaccctctgctttcgcctgagtttgttcagtccgagattccttctaacgagcactccattcctacggtccgctctggccgcaaccaggctgtcgaaattattgaacagcgcgatgaccgccttctagtggtcgttggcccttgctccatccacgatcccgaaaccgccctcgaatatgccactcgtcttaaggaacttgctgctcgtctctcctccgacctctgcgtcatcatgcgcgcctacctcgaaaagccccgcacaacagttggatggaaaggtctgatcaacgaccctgatattgacgagtcctaccagatcaacaagggtctccgcgtgtcccgcaagctctacgccgacctcacaggcatgggcatgcctattgccagcgagatgctcgacaccatctccccgcagtacatggctgacctgatttccctcggtgccattggtgcccgcaccaccgagtcgcaactgcaccgtgagcttgcctccggtctcagtttccccatcggttacaagaatggcactgacggcaacctgaccgttgccattgacgcgatcggcgctgctgcccacccccaccgcttccttggtgtcaccaagcaaggtcttgcggccattaccaagaccgccggtaaccctcacggcttcgtgattatgcgtggaggaaacaagggcacaaattacgaccgcgagagcatccagggggcccgcgaagcccttcgcggcaagaagcagcgtgaggttctcatggttgactgctcacatggcaactccaagaaaaaccaccgtaaccagcctctcgttgccaaggaggtcgctgaccaactccgtgagggccaggatgccatcattggtgtcatgattgaatccaacatcaacgagggtaaccagaaggttccccctgagggtccctccggtctcaagaagggtgtcagtatcaccgatgcctgcattgactgggagaccaccgtcactgtgttggaggacctcgccgatgccgtccgtgccaggcgcgccgtcaagtcaaaagccaacggtactgcttaa

SEQ ID NO: 1910 - protein, 362 aa, Emericella nidulans
MSGQNEDTRVLGYDPLLSPEFVQSEIPSNEHSIPTVRSGRNQAVEIIEQRDDRLLVVVGPCSIHDPETALEYATRLKELAARLSSDLCVIMRAYLEKPRTTVGWKGLINDPDIDESYQINKGLRVSRKLYADLTGMGMPIASEMLDTISPQYMADLISLGAIGARTTESQLHRELASGLSFPIGYKNGTDGNLTVAIDAIGAAAHPHRFLGVTKQGLAAITKTAGNPHGFVIMRGGNKGTNYDRESIQGAREALRGKKQREVLMVDCSHGNSKKNHRNQPLVAKEVADQLREGQDAIIGVMIESNINEGNQKVPPEGPSGLKKGVSITDACIDWETTVTVLEDLADAVRARRAVKSKANGTA

SEQ ID NO: 1911 - DNA, 1239 bp, Vibrio cholerae
  CDS (114)..(1175)
cggtttttacttcaatttacacccctttccgcagctgttttcggcgtaatggtttattctcgttgacaaattcgttatctttagcgcttcgcaataaaaggacaggcgctcctatgccactgaaaaccgatgaattaagaacccaagcattgggacctatgcctactccggcagaattaagtcacgcacatcctatcactgatgaagttgcgctacggatcgcgcagtctcgtcgccaaattgaaagcattcttaccggtgaagatgatcgcctattagtgatagtggggccttgttcggtgcatgataccgatgccgcactcgactacgctcgccgccttgctgcgctacaagaaaactatactgatgagctttttgtggtgatgcggacctatttcgaaaaaccacgtactgtggtgggttggaaaggactgatcaccgatccaaacttagatggctcttacgctttagaaaccggtctcaataaagcgcgaaagttgctgcttgatgtaaacaagctcggattggctaccgcgaccgagtttcttgatatgatcacaggccaatacatcgcggaccttatcacgtggggcgcaattggtgcgcgtaccactgagtcgcaaattcaccgtgagatggcctctgcgctctcctgccctgtgggttttaaaaatggcactaacggtaatgtgaaaatcgcgattgatgcgatccgcgcggccaaagcgtcacattacttctattcaccagataagaatggtcgtatgacggtttaccgtaccagtggtaacccatttggtcatattattctgcgtggtggtgatagcggaccaaactttgatgcggcttcgattaatgaagcttgccagcagttggcgcaattcaacttaccagagcgtttagtggtggatttcagccacgcgaactgtcaaaaacaacaccgtaaacaagtggatgtcgcgcgcgatatttgccagcaaattgaagctggcagccacaaaattgcgggcatcatggcggaaagcttccttgtggaaggcaatcagccaatgcacgatctcaataatctgacttatggtctgtcgatcaccgatccttgtttaggatggaaagataccgccaccatgcttgatatgctggctcaatcgatcaaagtccgtcgttctcgtcattaaggaaatacctcatgccttcttttgatattgtttcagaaattgatgcggttgagctgcgtaacgc

SEQ ID NO: 1912 - protein, 353 aa, Vibrio cholerae
MPLKTDELRTQALGPMPTPAELSHAHPITDEVALRIAQSRRQIESILTGEDDRLLVIVGPCSVHDTDAALDYARRLAALQENYTDELFVVMRTYFEKPRTVVGWKGLITDPNLDGSYALETGLNKARKLLLDVNKLGLATATEFLDMITGQYIADLITWGAIGARTTESQIHREMASALSCPVGFKNGTNGNVKIAIDAIRAAKASHYFYSPDKNGRMTVYRTSGNPFGHIILRGGDSGPNFDAASINEACQQLAQFNLPERLVVDFSHANCQKQHRKQVDVARDICQQIEAGSHKIAGIMAESFLVEGNQPMHDLNNLTYGLSITDPCLGWKDTATMLDMLAQSIKVRRSRH

SEQ ID NO: 1913 - DNA, 2184 bp, Candida albicans
  CDS (461)..(1573)
agggatttgctaatctacaaatggagtcataagtggtggtttgtaattgtcaagattttattgccccccctgtgttgcagaacgaagggaaaaaaaaaaaaaagtttttcattgttttattcaacggactatttacaaaatgtaatatgtgtgtttgtgatgactgaaaaaaaaacagaaaagttttttatgactaaatcaattcaaaccaccaccacgcaccatttctgaaaaatttaaaaaaggaacagaattttgccatttttcaagttttctttggaatatccaatttaataaattttttcttttcctcttttcttctcttttcccttctttacttatttctttcgcttttcttgttgatattagttattctttgtcaaataaataatatcattatataatactttcattaatttgtcttttgttaaattatttgaaagtataccagtttccttaaatgagtaaaactcctgttcctaccgaatacgacgacacaagaatattgggttacgatcctttagttccaccagccttattacaacacgaaataaaggcatctgccgaatcattggatgttgttataaaaggccgttacgattctgcccaaatccttaagggtaatgatgacagatgtattgtaattgttggtccatgttcaattcacgatcctccacaagccttagaatatggtaaacgtttgaagaaattggctgatgaattaaaagatgacttggtgattatcatgagagcttatttggaaaaaccaagaactaccgttggttggaaaggtttgatcaatgatcctgatgttgataattcttttgatattaaccgtgggttgaagatatctcgtcaattatattccgatttgactagtgttgttggattaccaattggatcagaaatgttagacaccatttctccacaatacttttccgatttcttgagttttggggccattggagctagaaccaccgaatcacaattacacagagaattagcttctggtttaagcttcccaattggatttaaaaatggtaccgatggtggtttagccgttgccttggatgccgtgcaagcttcttcaaaaggacatcacttcatgggtgtcaccaaaaacggtatggctgccattaccactactaaaggtaacgattgttgtttcattatattaagaggtggtaaaaaaatcaccaattacgatgttgaatcagttaaagctgctaaagaagctattgccaaatgtaccgatccaagtatcaagttgatggttgattgctctcacgacaactcaagaaaagactacagaaaccaacctcaagtattagacagtgttgctgaacaaataagtaatggtgaagactccattattggggttatgattgaatccaatattcatgaaggtaaacaaccaatgcccccagcaggtagtggtaaagaagcattgaaatacggtgtgtctatcaccgatggatgtgtttcttgggaaaccactgttgaaatgttgaccaaattgagtcaagcagtccaaactagaagaagtttaaagaaacaaaaagtttccaattaaatagagtgtttttaagtgaataaagtgaaaacaaaacaaaaacaaaaaacaaaaaacaacctaaaaaatttttcttcttgtgtataatttcgatacttctaatagcatatatattcttctatatatatatatatcttttgagtttttaaaagaataaataaaaagttgtttgtcttattcaacccaaaccatatccaagagtaaatctctaatattttcatttgaacgtgtagtagaggtggtggtggtggtgatgtcatcttttattgctcgtaggaaatcagccaatttcgggttactttcactatacccatggtatcgattaaatggatttcgagcaatctttttctttaacaaagatcccagtaatccataccaatcattctgaaaatgtttaacagcatatttgaattcactttcatttaattcttgaaaatatttttcaatttctaattcatcaagatcttttggatcaggggaattcccaatataattgattcctattttcaggaaataataatgcttgttgtaaatggtgttttaacaaatctttctcgttttaaattcaaatcccactatggtgattttctctggatacattgcaaataatt

SEQ ID NO: 1914 - protein, 370 aa, Candida albicans
MSKTPVPTEYDDTRILGYDPLVPPALLQHEIKASAESLDVVIKGRYDSAQILKGNDDRCIVIVGPCSIHDPPQALEYGKRLKKLADELKDDLVIIMRAYLEKPRTTVGWKGLINDPDVDNSFDINRGLKISRQLYSDLTSVVGLPIGSEMLDTISPQYFSDFLSFGAIGARTTESQLHRELASGLSFPIGFKNGTDGGLAVALDAVQASSKGHHFMGVTKNGMAAITTTKGNDCCFIILRGGKKITNYDVESVKAAKEAIAKCTDPSIKLMVDCSHDNSRKDYRNQPQVLDSVAEQISNGEDSIIGVMIESNIHEGKQPMPPAGSGKEALKYGVSITDGCVSWETTVEMLTKLSQAVQTRRSLKKQKVSN

SEQ ID NO: 1915 - DNA, 1101 bp, Corynebacterium glutamicum
  CDS (1)..(1101): transl_table=11
atgagttctccagtctcactcgaaaacgcggcgtcaaccagcaacaagcgcgtcgtggctttccacgagctgcctagccctacagatctcatcgccgcaaacccactgacaccaaagcaggcttccaaggtggagcaggatcgccaggacatcgctgatatcttcgctggcgacgatgaccgcctcgttgtcgttgtgggaccttgctcagttcacgatcctgaagcagccatcgattacgcaaaccgcctggctccgctggcaaagcgccttgatcaggacctcaagattgtcatgcgcgtgtacttcgagaagcctcgcaccatcgtcggatggaagggattgatcaatgatcctcacctcaacgaaacctacgacatcccagagggcttgcgcattgcgcgcaaagtgcttatcgacgttgtgaaccttgatctcccagtcggctgcgaattcctcgaaccaaacagccctcagtactacgccgacactgtcgcatggggagcaatcggcgctcgtaccaccgaatctcaggtgcaccgccagctggcttctgggatgtctatgccaattggtttcaagaacggaactgacggaaacatccaggttgcagtcgacgcggtacaggctgcccagaacccacacttcttcttcggaacctccgacgacggcgcgctgagcgtcgtggagaccgcaggcaacagcaactcccacatcattttgcgcggcggtacctccggcccgaatcatgatgcagcttcggtggaggccgtcgtcgagaagcttggtgaaaacgctcgtctcatgatcgatgcttcccatgctaactccggcaaggatcatatccgacaggttgaggttgttcgtgaaatcgcagagcagatttctggcggttctgaagctgtggctggaatcatgattgagtccttcctcgttggtggcgcacagaaccttgatcctgcgaaattgcgcatcaatggcggtgaaggcctggtgtacggacagtctgtgaccgataagtgcatcgatattgacaccaccatcgatttgctcgctgagctggccgcagcagtaagggaacgccgagcagcagccaagtaa

SEQ ID NO: 1916 - protein, 366 aa, Corynebacterium glutamicum
MSSPVSLENAASTSNKRVVAFHELPSPTDLIAANPLTPKQASKVEQDRQDIADIFAGDDDRLVVVVGPCSVHDPEAAIDYANRLAPLAKRLDQDLKIVMRVYFEKPRTIVGWKGLINDPHLNETYDIPEGLRIARKVLIDVVNLDLPVGCEFLEPNSPQYYADTVAWGAIGARTTESQVHRQLASGMSMPIGFKNGTDGNIQVAVDAVQAAQNPHFFFGTSDDGALSVVETAGNSNSHIILRGGTSGPNHDAASVEAVVEKLGENARLMIDASHANSGKDHIRQVEVVREIAEQISGGSEAVAGIMIESFLVGGAQNLDPAKLRINGGEGLVYGQSVTDKCIDIDTTIDLLAELAAAVRERRAAAK

SEQ ID NO: 1917 - DNA, 1053 bp, Escherichia coli O157
  CDS (1)..(1053): transl_table=11
atgaattatcagaacgacgatttacgcatcaaagaaatcaaagagttacttcctcctgtcgcattgctggaaaaattccccgctactgaaaatgccgcgaatacggttgcccatgcccgaaaagcgatccataagatcctgaaaggtaatgatgatcgcctgttggtggtgattggcccgtgctcaattcatgatcctgtcgcggctaaagagtatgccactcgcttgctggcgctgcgtgaagagctgaaagatgagctggaaatcgtaatgcgcgtctattttgaaaagccgcgtactacggtgggctggaaagggctgattaacgatccgcatatggataacagcttccagatcaacgacggtctgcgtatagcccgtaaattgctgcttgatattaacgacagcggtctgccagcggcgggtgaattcctcgatatgatcactcctcagtatctcgctgacctgatgagctggggcgcaattggtgcacgtaccacggaatcgcaggtgcaccgcgaactggcgtctggtctttcttgtccggtaggttttaaaaatggcacagacggtacgattaaagtggctatcgatgccattaatgccgccggtgcgccgcactgcttcctgtccgtaactaaatgggggcattcggcgattgtgaataccagcggtaacggcgattgccatatcattctgcgcggcggtaaagagcctaactacagcgcgaagcacgttgctgaagtgaaagaagggctgaacaaagcaggtctgccagctcaggtgatgatcgatttcagccatgctaattcgtccaaacaattcaaaaagcagatggatgtttgtgctgacgtttgccagcagattgccggtggcgaaaaggccattatcggtgtgatggtggaaagtcatctggtggaaggcaatcagagcctggagagcggggagccgctggcctatggtaagagcatcaccgatgcctgcattggctgggaagataccgatgctctgttacgtcaactggcgaacgcagtgaaagcgcgtcgcgggtaa

SEQ ID NO: 1918 - protein, 350 aa, Escherichia coli O157
MNYQNDDLRIKEIKELLPPVALLEKFPATENAANTVAHARKAIHKILKGNDDRLLVVIGPCSIHDPVAAKEYATRLLALREELKDELEIVMRVYFEKPRTTVGWKGLINDPHMDNSFQINDGLRIARKLLLDINDSGLPAAGEFLDMITPQYLADLMSWGAIGARTTESQVHRELASGLSCPVGFKNGTDGTIKVAIDAINAAGAPHCFLSVTKWGHSAIVNTSGNGDCHIILRGGKEPNYSAKHVAEVKEGLNKAGLPAQVMIDFSHANSSKQFKKQMDVCADVCQQIAGGEKAIIGVMVESHLVEGNQSLESGEPLAYGKSITDACIGWEDTDALLRQLANAVKARRG

SEQ ID NO: 1919 - DNA, 1089 bp, Haemophilus influenzae
  CDS (1)..(1089): transl_table=11
atggctaaagagaaaattgaaattgtcgtggcaaacgacgatacgcgaattgaaaaagtcgatcaggtgttaccacccattgccttattagaaaaatacccagcaagtgaacaggctgcggcgttagtgaagcaaactcgtcatgaggcacataatattattcatggtaaagatgatcgtttattagtcgtgattgggccttgctctattcatgatccgaaagcagccattgaatatgcgactcgtttaaaaccattacgtgaaaaatacaaagatagccttgaaattattatgcgtgtgtattttgagaaaccgcgtacaacggtgggttggaaaggtttaattaatgaaccatatttgaatgatacttatcgtttaaatgatgggttacgtattgcacggaaattactttcagatattaatgatcttggtgtgcctgcagcgggcgagtttttagatatgattacacctcagtatttggcagattttatgagctggggggcgattggggctagaacaacagaatcacaagttcatcgtgagttggcttcaggtttatcttgtgctgttgggtttaaaaatgccactaatggtggtgtgaaagtcgctttagatgcaattggtgcagcggaagctcctcactatttcttatctgtcactaaatttggtcattctgcaattgtttctacaaaagggaatgaagattgccatattattttacgaggtggagataaaggccctaactatagtgctgaagatgtagaaaaagtttgtgctgatattgaaaaaacagggcgtattccacacgttatggttgattttagccatgcaaacagcagtaaacaatataaaaagcaaatggatgtttgccaagacgtatgtaatcagattgcatttggttctaaacaaatctttggcgtaatggtggaaagccatttagtggaaggtcgtcaagatttagttgatggcaaagcacagacttatggacaaagtattacggatgcgtgcattggatgggaagattctgaaagattattgcaacaactttctgatgcagttattgctagacgtaaagcgacgagtaattaa

SEQ ID NO: 1920 - protein, 362 aa, Haemophilus influenzae
MAKEKIEIVVANDDTRIEKVDQVLPPIALLEKYPASEQAAALVKQTRHEAHNIIHGKDDRLLVVIGPCSIHDPKAAIEYATRLKPLREKYKDSLEIIMRVYFEKPRTTVGWKGLINEPYLNDTYRLNDGLRIARKLLSDINDLGVPAAGEFLDMITPQYLADFMSWGAIGARTTESQVHRELASGLSCAVGFKNATNGGVKVALDAIGAAEAPHYFLSVTKFGHSAIVSTKGNEDCHIILRGGDKGPNYSAEDVEKVCADIEKTGRIPHVMVDFSHANSSKQYKKQMDVCQDVCNQIAFGSKQIFGVMVESHLVEGRQDLVDGKAQTYGQSITDACIGWEDSERLLQQLSDAVIARRKATSN

SEQ ID NO: 1921 - DNA, 1047 bp, Buchnera aphidicola subsp
  CDS (1)..(1047): transl_table=11
atgaaaaaaacagatgaactacgtacaatacgaattgatccattaataactccagctgaattagcaaggcagtacgcgatcacttcagacatcatggacactgttatcgcaacaagacaaaatattgctcgtattatgactggacaagatgcgcgactacttgttgtaataggaccatgttcagttcatgatcctatcgcagcagtagaatatgcacatcgattgtatgaattacgagtaaaatataaagatcgtcttgaaattataatgcgtacatattttgaaaaaccaagaacagttgttggatggaaagggctgatttctgatccagatttaaatggtagttttcgagttaatcatggattagccgtagcacgtaaattattattagatattaatgcattaggaatgcctgcagcaacagagtttctcgatatagttataggacaatttatagcagatttaattagttggggtgctattggagcaagaactactgaaagtcaaattcatagagaaatggcttccgctctttcctgtccagtaggttttaaaaatggaactgacggtaatatacgcattgcaattgatgctattcgcgcagctaaagttagacatttatttttcgcgcctaataaagatggtcaaatgacgattaatcataccagtggcaatccatatgggcatataatcatgcgaggtggtcgtgcgccgaattaccatcctgatgatattaactcagcagtaaagcatttacgtgaatttgatctattagaacatttaatgattgattttagtcacggtaattgtttaaaagaacatcttcgtcaaaaaaatgtttctaagtctgtttcatatcaaatttctcatggttcgaaagctatttttggtgttatgattgaaagctttttagaagaaggttttcaaacagtaacgaataatcaaccattaatatatggtaaatcgattactgatgcctgtttaaattggaaagacagtgttttaattatcgaacaattagcagatgccgtagatgctcgtttttaa

SEQ ID NO: 1922 - protein, 348 aa, Buchnera aphidicola subsp
MKKTDELRTIRIDPLITPAELARQYAITSDIMDTVIATRQNIARIMTGQDARLLVVIGPCSVHDPIAAVEYAHRLYELRVKYKDRLEIIMRTYFEKPRTVVGWKGLISDPDLNGSFRVNHGLAVARKLLLDINALGMPAATEFLDIVIGQFIADLISWGAIGARTTESQIHREMASALSCPVGFKNGTDGNIRIAIDAIRAAKVRHLFFAPNKDGQMTINHTSGNPYGHIIMRGGRAPNYHPDDINSAVKHLREFDLLEHLMIDFSHGNCLKEHLRQKNVSKSVSYQISHGSKAIFGVMIESFLEEGFQTVTNNQPLIYGKSITDACLNWKDSVLIIEQLADAVDARF

SEQ ID NO: 1923 - DNA, 1047 bp, Buchnera aphidicola subsp
  CDS (1)..(1047): transl_table=11
atgaaaaaaacagatgaactacgtacaatacgaattgatccattgataacaccatctgaattagcaaaaaaatatgctattacttcagaaatcatggataatgttattataacgagacaaaatatagctcgaattatgactggagaagatttgcgtttgcttgttgtaataggtccatgttcagtacatgatccaattgcagcagttgaatatgctcatcgattatatgaactacgtaaaaaatatcaagatcgtcttgaaattataatgcgtacatattttgaaaaaccaagaacagtagttggttggaagggattaatttcagatccagatttaaatggtagtttcagagttaatcatggtttagctgttgcacgtaaattattattagatatcaatgaactaggaatgcctgcagcaacagagtttttagatatggtaatagggcaatttattgcggatttaattagctggggtgcgattggagctagaactactgaaagtcaaattcatagagaaatggcttcagctctttcttgtccagtaggttttaaaaatggaacagatggaaatatacgtattgcaattgatgctattagagcagcacaagcacgtcatttgttttttgctccgaataaagatggacaaatgactattaatcataccagtggaaatccttatggacatataattatgagaggtggtcgaactcctaattatcatgctcacgatattaattcagcaatagaacatttacgtgaatttaatttgttagaacatttaatgattgattttagtcatggtaattgtttaaaggaacatattcgtcaaaaagatgttgctaaatctgtttcaaaacaaatttctcaaggttcaaaaactatatttggtgtaatgattgaaagttttttagaagaaggttttcaaacagttaaagaaaatcaaccactaatatatggaaaatcaattactgatgcatgtttaaattggaaagacagtgtccttattattaagcaattagcagatgcggtagatactcgtttttaa

SEQ ID NO: 1924 - protein, 348 aa, Buchnera aphidicola subsp
MKKTDELRTIRIDPLITPSELAKKYAITSEIMDNVIITRQNIARIMTGEDLRLLVVIGPCSVHDPIAAVEYAHRLYELRKKYQDRLEIIMRTYFEKPRTVVGWKGLISDPDLNGSFRVNHGLAVARKLLLDINELGMPAATEFLDMVIGQFIADLISWGAIGARTTESQIHREMASALSCPVGFKNGTDGNIRIAIDAIRAAQARHLFFAPNKDGQMTINHTSGNPYGHIIMRGGRTPNYHAHDINSAIEHLREFNLLEHLMIDFSHGNCLKEHIRQKDVAKSVSKQISQGSKTIFGVMIESFLEEGFQTVKENQPLIYGKSITDACLNWKDSVLIIKQLADAVDTRF

SEQ ID NO: 1925 - DNA, 1047 bp, Buchnera aphidicola subsp
  CDS (1)..(1047): transl_table=11
atgaaaaaaacagatgaattgcgaacaatacgcattgacccgttagttactccagctgaattagcacaacgtcatgttataactccttcaattatggatactgttatttcaacgagaaaaaatattgctaatattatgacgggattagatcctcgtttacttgtcattataggaccttgttcagtacatgatcctgttgctgcagtagaatatgctggaagattacaagtattgcgtaagaaatatgaatcgcgtcttgaaattgttatgcgaacttattttgaaaaacctcgtacagtaataggttggaaggggctaatttcagatcctgaccttaatggtagctttcacgtaaataatggtttatcgatagctagaaaattattgttggacattaataagttaggagttccagctgcgactgaatttttagacatggtaataggacaatttattgctgatctcattagttggggcgctattggtgcgcgtactactgaaagtcaaattcatcgtgaaatggcatcagcattatcttgtcctgtaggttttaaaaatggtacggatggtaatataagaattgctgtagatgctattcgtgctgctagtgtagaacatttatttttagcgcctaacaaatatggtcaaatgactattaattataccagtggaaatcccttcggtcatgttattatgcgcggtggaaaatctccaaattatcatgctaaagatattgctattgcaataaaatacttacacgaatttactctttcagagtatttgatgatagactttagtcatggaaattgtttaaaacaacatcgtcgtcaattagatgtgggtgaatctattgctaagcagataagagatggatcaacagctatttttggtgttatgattgaaagttttttagaagaaggttctcaaaaagttattgacaataaatctttagtatatggaaaatctattactgatccttgtttgggttggaatgatagtgcatttttacttgaaaagttggcaaatgctgttgatagtagattttaa

SEQ ID NO: 1926 - protein, 348 aa, Buchnera aphidicola subsp
MKKTDELRTIRIDPLVTPAELAQRHVITPSIMDTVISTRKNIANIMTGLDPRLLVIIGPCSVHDPVAAVEYAGRLQVLRKKYESRLEIVMRTYFEKPRTVIGWKGLISDPDLNGSFHVNNGLSIARKLLLDINKLGVPAATEFLDMVIGQFIADLISWGAIGARTTESQIHREMASALSCPVGFKNGTDGNIRIAVDAIRAASVEHLFLAPNKYGQMTINYTSGNPFGHVIMRGGKSPNYHAKDIAIAIKYLHEFTLSEYLMIDFSHGNCLKQHRRQLDVGESIAKQIRDGSTAIFGVMIESFLEEGSQKVIDNKSLVYGKSITDPCLGWNDSAFLLEKLANAVDSRF

SEQ ID NO: 1927 - DNA, 1047 bp, Escherichia coli O157
  CDS (1)..(1047): transl_table=11
atgaacagaactgacgaactccgtactgcgcgtattgagagcctggtaacgcccgccgaactcgcgctacggtatcccgtaacgcctggcgtcgccacccatgtcaccgactcccgccgcagaattgaaaaaatactcaatggtgaagataagcgactgttggtcattattggcccctgctcgatccacgatctcaccgctgcaatggagtacgccacccgtctgcagtcgctgcgcaaccagtaccagtcacggctggaaatcgtaatgcgcacctattttgaaaaaccacgaactgttgtcggctggaaaggactaatctccgatccagatttaaacggcagctatcggataaatcacggtctggagctggcgcgcaaattacttttacaggtaaatgagctgggcgtcccaaccgcgactgagttcctcgatatggtgaccggtcagtttattgctgatttaatcagttggggcgcgattggcgcacgtactaccgaaagtcagatccaccgtgaaatggcttcggcactctcctgtccggtaggttttaaaaatggtaccgatggcaatacgcggattgctgtggatgctatccgcgcagcccgcgccagccatatgttcctctcgccagacaaaaatggtcagatgaccatctatcagaccagcggcaacccgtatggccacattattatgcgtggcggcaaaaaaccgaattatcatgccgatgatatcgccgcagcctgcgatacgctgcacgagtttgatttacctgaacatctggtggtggatttcagccacggtaactgccagaagcagcaccgtcgccagttagaagtttgtgaggatatttgtcagcaaatccgcaatggctctacggcgattgctggaattatggcggaaagtttcctgcgcgaaggaacgcaaaaaatcgtcggcggtcagccgctcacttacggtcaatccattaccgacccgtgtctgggctgggaagataccgaacgcctggtcgaaaaactagcctctgcggtagatacccgcttctga

SEQ ID NO: 1928 - protein, 348 aa, Escherichia coli O157
MNRTDELRTARIESLVTPAELALRYPVTPGVATHVTDSRRRIEKILNGEDKRLLVIIGPCSIHDLTAAMEYATRLQSLRNQYQSRLEIVMRTYFEKPRTVVGWKGLISDPDLNGSYRINHGLELARKLLLQVNELGVPTATEFLDMVTGQFIADLISWGAIGARTTESQIHREMASALSCPVGFKNGTDGNTRIAVDAIRAARASHMFLSPDKNGQMTIYQTSGNPYGHIIMRGGKKPNYHADDIAAACDTLHEFDLPEHLVVDFSHGNCQKQHRRQLEVCEDICQQIRNGSTAIAGIMAESFLREGTQKIVGGQPLTYGQSITDPCLGWEDTERLVEKLASAVDTRF

SEQ ID NO: 1929 - DNA, 1047 bp, Escherichia coli O6
  CDS (1)..(1047): transl_table=11
atgaacagaactgacgaactccgtactgcgcgtattgagagcctggtaacgcccgccgaactcgcgctacggtatcccgtaacgcctggcgtcgccacccatgtcaccgactcccgccgtagaattgaaaaaatactgaatggtgaagataagcgactgttggtcattattggcccctgctcgatccacgatctcaccgctgcgatggagtacgccacccgtctgcagtcgctgcgcaaccagtaccagtcacggctggaaatcgtaatgcgcacctattttgaaaaaccacgaacggttgtcggctggaaaggactcatctccgatccagatttaaacggtagctatcgggtaaatcacggtctggagctggcgcgcaaattacttttacaggtaaatgagctgggcgtccctaccgcgactgagttcctcgatatggtgaccggtcagtttattgctgatttaatcagttggggtgcgattggcgcacgtactaccgaaagtcagatccaccgcgaaatggcttcggcactctcctgtccggtgggttttaaaaatggtaccgatggcaacacgcggattgccgtggatgctatccgcgcagcccgcgccagccatatgttcctctcgccagacaaaaatggtcagatgaccatctatcagaccagcggcaacccgtatggccacattattatgcgtggtggcaaaaaaccgaattatcatgccgatgatatcgccgcagcctgcgatacgctgcacgagtttgatttacctgaacatctggtggtggatttcagccacggtaactgccagaagcagcaccgtcgccagttagaagtttgtgaggatatttgtcagcaaatccgcaatggctctacggcgattgctggaattatggcggaaagtttcctgcgcgaaggaacgcaaaaaatcgtcggcggtcagccgctcacttacggtcaatccattaccgacccgtgtctgggctgggaagataccgaacgcctggtcgaaaaactcgcctctgcggtagatactcgcttctga

SEQ ID NO: 1930 - protein, 348 aa, Escherichia coli O6
MNRTDELRTARIESLVTPAELALRYPVTPGVATHVTDSRRRIEKILNGEDKRLLVIIGPCSIHDLTAAMEYATRLQSLRNQYQSRLEIVMRTYFEKPRTVVGWKGLISDPDLNGSYRVNHGLELARKLLLQVNELGVPTATEFLDMVTGQFIADLISWGAIGARTTESQIHREMASALSCPVGFKNGTDGNTRIAVDAIRAARASHMFLSPDKNGQMTIYQTSGNPYGHIIMRGGKKPNYHADDIAAACDTLHEFDLPEHLVVDFSHGNCQKQHRRQLEVCEDICQQIRNGSTAIAGIMAESFLREGTQKIVGGQPLTYGQSITDPCLGWEDTERLVEKLASAVDTRF

SEQ ID NO: 1931 - DNA, 1047 bp, Escherichia coli; identical to SEQ ID NO: 1507
  CDS (1)..(1047): transl_table=11

SEQ ID NO: 1932 - protein, 348 aa, Escherichia coli; identical to SEQ ID NO: 1508

SEQ ID NO: 1933 - DNA, 1047 bp, Enterobacter agglomerans
  CDS (1)..(1047): transl_table=11
atgaacaaaaccgacgaactgcgtaccgcacgcattggtagtctgattaccccccccagcctggcggctgagcatcctgtctctccggcaattgccgacaatgtcaccgctgcccgtaaacgtattgcctgtattctgacgggtgaagatcaccgcctgctggtggtgattggcccctgctcgctgcacgacccgaaagcggcactggaatatgctgagcgtctgaacgcgttacgccgccgctatgaagatcggctggagattgtgatgcgcgcctactttgaaaagccgcgcaccgtagtgggctggaaaggcttaatctccgatccggatctggatgggagctacgatgtgaaccgcggcataggcatcgcccgccagctgctgattgatatcaacgcgctgggcctgcctaccgccacggaattcctggatatggtgatcggccagtttattgccgatctgattagctggggcgcgattggcgcacgcaccaccgaaagccagatccaccgcgaaatggcatcggccctctcctgcccggtcggctttaaaaacggcaccgatggtaacgtacagattgccgtggatgcgattcgcgccgcgcgcgccagccacatgttcctttcgcccgataagctgggccagatgactatctatcagaccagcggcaacccgcatggtcatgtgatcctgcgtggcggcaaacagcctaactatcatgccagtgatgtcgccgccgcagccgaaagtctgtcggcgtttaatctgccacagcagctggtgatcgacttcagtcacggtaactgcctgaagcagcatcgtcgtcagatggatgtcgcggcagaggtggcagaacagattaaagcgggatcgcaggccgttgccggtgtgatgattgaaagcttcctggaagagggcaatcagaaagtcgtcagcggcgaaccgctggtctatggcaagtcgattaccgatccctgcctcggctggcaggagagcgaaaaggtgctcgccctgctggccgaggcggtttctcaccgcctctga

SEQ ID NO: 1934 - protein, 348 aa, Enterobacter agglomerans
MNKTDELRTARIGSLITPPSLAAEHPVSPAIADNVTAARKRIACILTGEDHRLLVVIGPCSLHDPKAALEYAERLNALRRRYEDRLEIVMRAYFEKPRTVVGWKGLISDPDLDGSYDVNRGIGIARQLLIDINALGLPTATEFLDMVIGQFIADLISWGAIGARTTESQIHREMASALSCPVGFKNGTDGNVQIAVDAIRAARASHMFLSPDKLGQMTIYQTSGNPHGHVILRGGKQPNYHASDVAAAAESLSAFNLPQQLVIDFSHGNCLKQHRRQMDVAAEVAEQIKAGSQAVAGVMIESFLEEGNQKVVSGEPLVYGKSITDPCLGWQESEKVLALLAEAVSHRL

SEQ ID NO: 1935 - DNA, 1047 bp, Salmonella typhi
  CDS (1)..(1047): transl_table=11
atgaacagaaccgacgaactccgtactgcgcgtatcgacagcctggtaacaccaaccgaactcgcgcagcggtatcctgtatcgtcctccgtcgccagtcacgttaccgactcccgacgccggatagaaaagattttaaatggtgaagatccacggctactggtcgtcattggcccctgttcgattcacgatctgaatgctgccatggaatacgcgacgcagctccaggcacaacgccaaaagcatcaggcgcgtctggaaatcgtcatgcgcacctattttgaaaaaccgcgcaccgtcgtgggatggaaaggcctgatttccgatcccgacttgaatggcagttaccgcgtcaatcatgggcttgaactggcgcgtcgcttgctattgcaggtgaacgaactgggagtaccgaccgccacagaatttcttgatatggtcaccggccagtttattgccgatctgatcagttggggaacgattggcgcgcgtaccaccgaaagccaaatccatcgggaaatggcttctgcgctctcttgcccggtcggctttaaaaatggtacggatggcaatacccgcattgccgttgatgctattcgcgcctcccgcgccagtcatatgtttctctcgccggataaagacggacagatgactatctaccaaacgagtggcaacccgtatgggcacatcatcatgcgcggcggtaaaaaaccgaactaccacgctgaagatattgccgccgcctgcgacacgttgcatgaatttgatctgccggaacatctggtcgtcgacttcagccacggcaactgtcaaaaacagcatcgccgccagttggacgtatgtgatgatatttgccagcagattcgtaatggctccacggcaattgccgggattatggcagagagttttttacgggaaggcacgcaaaaaattatcagcggtcaaccgttaatctatggtcaatccattaccgatccctgcctgaactgggaagatacggaagttctgttggaaaaacttgccgcggcggtagacagccgcttttaa

SEQ ID NO: 1936 - protein, 348 aa, Salmonella typhi
MNRTDELRTARIDSLVTPTELAQRYPVSSSVASHVTDSRRRIEKILNGEDPRLLVVIGPCSIHDLNAAMEYATQLQAQRQKHQARLEIVMRTYFEKPRTVVGWKGLISDPDLNGSYRVNHGLELARRLLLQVNELGVPTATEFLDMVTGQFIADLISWGTIGARTTESQIHREMASALSCPVGFKNGTDGNTRIAVDAIRASRASHMFLSPDKDGQMTIYQTSGNPYGHIIMRGGKKPNYHAEDIAAACDTLHEFDLPEHLVVDFSHGNCQKQHRRQLDVCDDICQQIRNGSTAIAGIMAESFLREGTQKIISGQPLIYGQSITDPCLNWEDTEVLLEKLAAAVDSRF

SEQ ID NO: 1937 - DNA, 1047 bp, Salmonella typhimurium
  CDS (1)..(1047): transl_table=11
atgaacagaaccgacgaactccgtactgcgcgtatcgacagcctggtaacaccgaccgaactcgcgcagcggtatcctgtatcgtcctccgtcgccagtcacgttaccgactcccgacgccggatagaaaagattttaaatggtgaagatccacggctactggtcgtcattggcccctgttcgattcacgatctgaatgctgccatggaatacgcgacgcagctccaggcacaacgccaaaagcatcaggcgcgtctggagatcgtcatgcgcacctattttgaaaaaccgcgcaccgtcgtgggatggaaaggcctgatttccgatcccgacttgaatggcagttaccgcgtcaattatgggcttgaactggcgcgtcgcttgctattgcaggtgaacgaactgggagtaccgaccgccacagagtttcttgatatggtcaccggccagtttattgccgatctgatcagttggggagcgattggcgcgcgtaccaccgaaagccaaatccatcgggaaatggcttctgcgctctcttgtccggtcggctttaaaaatggtacggatggcaatacccgcattgccgttgatgctattcgcgcctcccgcgccagtcatatgtttctctcgccggataaagacggacagatgactatctaccagacgagtggcaacccgtatgggcacatcatcatgcgcggcggtaaaaaaccgaactaccacgctgaagatattgccgccgcctgcgatacgttgcatgaatttgatctgccggaacatctggtcgtcgacttcagccacggcaactgtcaaaaacagcatcgccgccagttagaggtatgtgatgatatttgccagcagattcgtaatggctccacggcaattgccgggattatggcagagagttttttacgggaaggcacgcaaaaaattatcagcggtcaaccattaatctatggtcagtccattaccgatccttgcctgaactgggaagatacggaagttttgttggaaaaacttgccgcggcggtagacagccgcttttaa

SEQ ID NO: 1938 - protein, 348 aa, Salmonella typhimurium
MNRTDELRTARIDSLVTPTELAQRYPVSSSVASHVTDSRRRIEKILNGEDPRLLVVIGPCSIHDLNAAMEYATQLQAQRQKHQARLEIVMRTYFEKPRTVVGWKGLISDPDLNGSYRVNYGLELARRLLLQVNELGVPTATEFLDMVTGQFIADLISWGAIGARTTESQIHREMASALSCPVGFKNGTDGNTRIAVDAIRASRASHMFLSPDKDGQMTIYQTSGNPYGHIIMRGGKKPNYHAEDIAAACDTLHEFDLPEHLVVDFSHGNCQKQHRRQLEVCDDICQQIRNGSTAIAGIMAESFLREGTQKIISGQPLIYGQSITDPCLNWEDTEVLLEKLAAAVDSRF

SEQ ID NO: 1939 - DNA, 1047 bp, Shigella flexneri
  CDS (1)..(1047): transl_table=11
atgaacagaactgacgaactccgtactgcgcgtattgagagcctggtaacgcccgccgaactcgcgctacggtatcccgtaacgcctggcgtcgccacccatgtcaccgactcccgccgcagaattgaaaaaatactgaatggtgaagataagcgactgttggtcattattggcccctgctcgatccacgatctcaccgctgcaatggagtacgccacccgtctgcagtcgctgcgcaaccagtaccagtcacggctggaaatcgtaatgcgcacctattttgaaaaaccacgaactgttgtcggctggaaagggctaatctccgatccggatttaaacggcagctatcgggtaaatcacggtctggagctggcgcgcaaattacttttacaggtaaatgagctgggtgtccctaccgcgactgagttcctcgatatggtaaccggtcagtttattgctgatttaatcagttggggcgcgattggcgctcgtactaccgaaagtcagatccaccgcgaaatggcttcagcactctcctgtccggtaggttttaaaaatggtaccgatggcaacacgcggattgccgtggatgctatccgcgcagcccgcgccagccatatgttcctctcgccagacaaaaatggtcagatgaccatctatcagaccagcggcaacccgtatggccacattattatgcgtggcggcaaaaaaccgaattatcatgccgatgatatcgccgcagcctgcgatacgctgcacgagtttgatttacctgaacatctggtggtggatttcagccacggtaactgccagaagcagcaccgtcgccagttagaagtttgtgaggatatttgtcagcaaatccgcaatggctctacggagattgctggaattatggcggaaagtttcctgcgcgaaggaacgcaaaaaatcgtcggcggtcagccgctcacttacggtcaatccattaccgacccgtgtctgggctgggaagataccgaacgcctggtcgaaaaactcgcctttgcggtagatacccgcttctga

SEQ ID NO: 1940 - protein, 348 aa, Shigella flexneri
MNRTDELRTARIESLVTPAELALRYPVTPGVATHVTDSRRRIEKILNGEDKRLLVIIGPCSIHDLTAAMEYATRLQSLRNQYQSRLEIVMRTYFEKPRTVVGWKGLISDPDLNGSYRVNHGLELARKLLLQVNELGVPTATEFLDMVTGQFIADLISWGAIGARTTESQIHREMASALSCPVGFKNGTDGNTRIAVDAIRAARASHMFLSPDKNGQMTIYQTSGNPYGHIIMRGGKKPNYHADDIAAACDTLHEFDLPEHLVVDFSHGNCQKQHRRQLEVCEDICQQIRNGSTEIAGIMAESFLREGTQKIVGGQPLTYGQSITDPCLGWEDTERLVEKLAFAVDTRF

SEQ ID NO: 1941 - DNA, 23 bp, Artificial sequence
  primer
atgaacagaactgacgaactccg

SEQ ID NO: 1942 - DNA, 24 bp, Artificial sequence
  primer
ttagaagcgggtatctaccgcaga

SEQ ID NO: 1943 - protein, 358 aa, Artificial sequence
  consensus sequence
  Variant (2)..(3): Xaa in position 2 to 3 is any amino acid
  Variant (5)..(11): Xaa in position 5 to 11 is any amino acid
  Variant (13)..(24): Xaa in position 13 to 24 is any amino acid
  Variant (25)..(25): Xaa in position 25 is any or no amino acid
  Variant (27)..(31): Xaa in position 27 to 31 is any amino acid
  Variant (33)..(34): Xaa in position 33 to 34 is any amino acid
  Variant (36)..(36): Xaa in position 36 is any amino acid
  Variant (38)..(38): Xaa in position 38 is any amino acid
  Variant (39)..(41): Xaa in position 39 to 41 is any or no amino acid
  Variant (44)..(44): Xaa in position 44 is any amino acid
  Variant (46)..(47): Xaa in position 46 to 47 is any amino acid
  Variant (52)..(52): Xaa in position 52 is any amino acid
  Variant (55)..(56): Xaa in position 55 to 56 is any amino acid
  Variant (59)..(60): Xaa in position 59 to 60 is any amino acid
  Variant (63)..(64): Xaa in position 63 to 64 is any amino acid
  Variant (66)..(75): Xaa in position 66 to 75 is any amino acid
  Variant (76)..(77): Xaa in position 76 to 77 is any or no amino acid
  Variant (79)..(80): Xaa in position 79 to 80 is any amino acid
  Variant (84)..(84): Xaa in position 84 is any amino acid
  Variant (92)..(93): Xaa in position 92 to 93 is any amino acid
  Variant (94)..(94): Xaa in position 94 is any or no amino acid
  Variant (101)..(101): Xaa in position 101 is any amino acid
  Variant (104)..(107): Xaa in position 104 to 107 is any amino acid
  Variant (108)..(113): Xaa in position 108 to 113 is any or no amino acid
  Variant (116)..(118): Xaa in position 116 to 118 is any amino acid
  Variant (120)..(120): Xaa in position 120 is any amino acid
  Variant (123)..(129): Xaa in position 123 to 129 is any amino acid
  Variant (130)..(131): Xaa in position 130 to 131 is any or no amino acid
  Variant (133)..(135): Xaa in position 133 to 135 is any amino acid
  Variant (137)..(137): Xaa in position 137 is any amino acid
  Variant (140)..(143): Xaa in position 140 to 143 is any amino acid
  Variant (146)..(147): Xaa in position 146 to 147 is any amino acid
  Variant (150)..(151): Xaa in position 150 to 151 is any amino acid
  Variant (153)..(153): Xaa in position 153 is any amino acid
  Variant (164)..(164): Xaa in position 164 is any amino acid
  Variant (167)..(168): Xaa in position 167 to 168 is any amino acid
  Variant (169)..(169): Xaa in position 169 is any or no amino acid
  Variant (172)..(172): Xaa in position 172 is any amino acid
  Variant (175)..(175): Xaa in position 175 is any amino acid
  Variant (177)..(177): Xaa in position 177 is any amino acid
  Variant (182)..(182): Xaa in position 182 is any amino acid
  Variant (184)..(184): Xaa in position 184 is any amino acid
  Variant (186)..(189): Xaa in position 186 to 189 is any amino acid
  Variant (191)..(192): Xaa in position 191 to 192 is any amino acid
  Variant (194)..(195): Xaa in position 194 to 195 is any amino acid
  Variant (198)..(200): Xaa in position 198 to 200 is any amino acid
  Variant (202)..(202): Xaa in position 202 is any amino acid
  Variant (204)..(209): Xaa in position 204 to 209 is any amino acid
  Variant (211)..(212): Xaa in position 211 to 212 is any amino acid
  Variant (213)..(216): Xaa in position 213 to 216 is any or no amino acid
  Variant (218)..(218): Xaa in position 218 is any amino acid
  Variant (221)..(223): Xaa in position 221 to 223 is any amino acid
  Variant (225)..(225): Xaa in position 225 is any amino acid
  Variant (231)..(232): Xaa in position 231 to 232 is any amino acid
  Variant (233)..(238): Xaa in position 233 to 238 is any or no amino acid
  Variant (242)..(259): Xaa in position 242 to 259 is any amino acid
  Variant (260)..(270): Xaa in position 260 to 270 is any or no amino acid
  Variant (272)..(272): Xaa in position 272 is any amino acid
  Variant (275)..(275): Xaa in position 275 is any amino acid
  Variant (276)..(279): Xaa in position 276 to 279 is any or no amino acid
  Variant (282)..(282): Xaa in position 282 is any amino acid
  Variant (284)..(287): Xaa in position 284 to 287 is any amino acid
  Variant (289)..(290): Xaa in position 289 to 290 is any amino acid
  Variant (292)..(297): Xaa in position 292 to 297 is any amino acid
  Variant (298)..(300): Xaa in position 298 to 300 is any or no amino acid
  Variant (302)..(303): Xaa in position 302 to 303 is any amino acid
  Variant (304)..(304): Xaa in position 304 is any or no amino acid
  Variant (306)..(307): Xaa in position 306 to 307 is any amino acid
  Variant (308)..(310): Xaa in position 308 to 310 is any or no amino acid
  Variant (312)..(312): Xaa in position 312 is any amino acid
  Variant (314)..(314): Xaa in position 314 is any amino acid
  Variant (317)..(320): Xaa in position 317 to 320 is any amino acid
  Variant (322)..(322): Xaa in position 322 is any amino acid
  Variant (324)..(328): Xaa in position 324 to 328 is any amino acid
  Variant (329)..(339): Xaa in position 329 to 339 is any or no amino acid
  Variant (342)..(342): Xaa in position 342 is any amino acid
  Variant (344)..(344): Xaa in position 344 is any amino acid
  Variant (347)..(347): Xaa in position 347 is any amino acid
  Variant (349)..(350): Xaa in position 349 to 350 is any amino acid
  Variant (352)..(357): Xaa in position 352 to 357 is any amino acid
LXXPXXXXXXXPXXXXXXXXXXXXXRXXXXXIXXGXDXXXXRLXVXXGPCSXHDXXAAXXYAXXLXXXXXXXXXXXXLXXVMRXYFEKPRTXXXGWKGLIXDPXXXXXXXXXXGLXXXRXLLXXXXXXXXXPXXXEXLDXXXXQYXXDLXXWXAIGARTTESQXHRXXXASXLSXPXGFKNXTXGXXXXAXXAXXAAXXXHXFXXXXXXGXXXXXXTXGNXXXHXILRGGXXXXXXXXPNYXXXXXXXXXXXXXXXXXXXXXXXXXXXXXDXSHXXXXXNSXKXXXXQXXVXXXXXXXXXQXXXGXXXXXGXMXESXXXXGXQXXXXXXXXXXXXXXXXYGXSXTDXCXXWXXXXXXL

SEQ ID NO: 1944 - protein, 23 aa, Artificial sequence
  protein pattern
  Variant (2)..(2): Xaa in position 2 is Phe or Tyr
  Variant (3)..(3): Xaa in position 3 is any amino acid
  Variant (4)..(4): Xaa in position 4 is Ala, Gly, Gln, Ser or Thr
  Variant (5)..(5): Xaa in position 5 is Asp, Glu or Gly
  Variant (6)..(7): Xaa in position 6 to 7 is any amino acid
  Variant (8)..(8): Xaa in position 8 is Ala, Cys, Gly, Ser or Thr
  Variant (9)..(9): Xaa in position 9 is any amino acid
  Variant (10)..(10): Xaa in position 10 is Ala, Gly, Ser, Thr or Val
  Variant (11)..(11): Xaa in position 11 is Ala or Thr
  Variant (12)..(12): Xaa in position 12 is Ile, Met or Val
  Variant (21)..(21): Xaa in position 21 is any amino acid
QXXXXXXXXXXXGARTTESQXHR

SEQ ID NO: 1945 - protein, 21 aa, Artificial sequence
  protein pattern
  Variant (2)..(2): Xaa in position 2 is Ile or Val
  Variant (3)..(3): Xaa in position 3 is any amino acid
  Variant (8)..(8): Xaa in position 8 is Ile, Leu or Val
  Variant (11)..(13): Xaa in position 11 to 13 is any amino acid
  Variant (15)..(15): Xaa in position 15 is any amino acid
  Variant (16)..(16): Xaa in position 16 is Ala, Asp, Glu or Gln
  Variant (18)..(18): Xaa in position 18 is Ala, Cys, Gly or Ser
  Variant (19)..(20): Xaa in position 19 to 20 is any amino acid
  Variant (21)..(21): Xaa in position 21 is Phe, Ile, Leu or Val
VXXGPCSXHDXXXAXXYXXXX

SEQ ID NO: 1946 - protein, 21 aa, Artificial sequence
  protein pattern
  Variant (6)..(6): Xaa in position 6 is Ile or Val
  Variant (7)..(7): Xaa in position 7 is Asn, Ser or Thr
  Variant (10)..(10): Xaa in position 10 is any amino acid
  Variant (11)..(11): Xaa in position 11 is Ile, Leu, Met or Val
  Variant (12)..(12): Xaa in position 12 is Asp or Asn
  Variant (13)..(13): Xaa in position 13 is any amino acid
  Variant (14)..(14): Xaa in position 14 is Ser or Thr
  Variant (15)..(16): Xaa in position 15 to 16 is any amino acid
  Variant (17)..(17): Xaa in position 17 is Ile, Leu, Pro or Val
  Variant (18)..(19): Xaa in position 18 to 19 is any amino acid
  Variant (21)..(21): Xaa in position 21 is Ile, Leu or Val
GWKGLXXDPXXXXXXXXXXGX

SEQ ID NO: 1947 - protein, 16 aa, Artificial sequence
  protein pattern
  Variant (3)..(3): Xaa in position 3 is Ala or Gly
  Variant (4)..(4): Xaa in position 4 is Leu or Met
  Variant (6)..(6): Xaa in position 6 is any amino acid
  Variant (7)..(7): Xaa in position 7 is Ala or Pro
  Variant (8)..(8): Xaa in position 8 is Ile, Leu or Val
  Variant (10)..(10): Xaa in position 10 is Phe or Tyr
  Variant (13)..(15): Xaa in position 13 to 15 is any or no amino acid
ASXXSXXXGXKNXXXG

SEQ ID NO: 1948 - protein, 16 aa, Artificial sequence
  protein pattern
  Variant (2)..(2): Xaa in position 2 is any amino acid
  Variant (3)..(3): Xaa in position 3 is Ile, Leu or Val
  Variant (4)..(4): Xaa in position 4 is Ile or Val
  Variant (7)..(7): Xaa in position 7 is Ala, Thr or Val
  Variant (9)..(9): Xaa in position 9 is Phe or Leu
  Variant (15)..(15): Xaa in position 15 is any amino acid
  Variant (16)..(16): Xaa in position 16 is Ala, Gly, Ile, Leu or Val
LXXXMRXYXEKPRTXX

SEQ ID NO: 1949 - protein, 14 aa, Artificial sequence
  protein pattern
  Variant (2)..(2): Xaa in position 2 is any amino acid
  Variant (5)..(5): Xaa in position 5 is Ala or Gly
  Variant (7)..(7): Xaa in position 7 is Cys or Ser
  Variant (8)..(8): Xaa in position 8 is any amino acid
  Variant (10)..(13): Xaa in position 10 to 13 is any amino acid
DXSHXNXXKXXXXQ

SEQ ID NO: 1950 - protein, 14 aa, Artificial sequence
  protein pattern
  Variant (2)..(2): Xaa in position 2 is any amino acid
  Variant (5)..(6): Xaa in position 5 to 6 is any amino acid
  Variant (7)..(7): Xaa in position 7 is Ala, Cys, Gly, Ser or Thr
  Variant (9)..(9): Xaa in position 9 is Ile, Leu or Val
  Variant (10)..(10): Xaa in position 10 is Ile or Val
  Variant (11)..(11): Xaa in position 11 is Leu or Met
TXGNXXXHXXXRGG

SEQ ID NO: 1951 - protein, 13 aa, Artificial sequence
  protein pattern
  Variant (2)..(2): Xaa in position 2 is Ile, Leu or Val
  Variant (4)..(4): Xaa in position 4 is Ala, Ile, Leu or Val
  Variant (7)..(7): Xaa in position 7 is any amino acid
  Variant (8)..(8): Xaa in position 8 is Ile or Leu
  Variant (9)..(9): Xaa in position 9 is any amino acid
  Variant (10)..(10): Xaa in position 10 is Ala, Glu or Gly
  Variant (12)..(12): Xaa in position 12 is any amino acid
GXMXESXXXXGXQ

SEQ ID NO: 1952 - protein, 21 aa, Artificial sequence
  protein pattern
  Variant (2)..(2): Xaa in position 2 is Ala, Ile, Leu or Val
  Variant (3)..(3): Xaa in position 3 is Asp, Glu or Asn
  Variant (4)..(4): Xaa in position 4 is Ala or Gly
  Variant (5)..(6): Xaa in position 5 to 6 is any amino acid
  Variant (7)..(8): Xaa in position 7 to 8 is Ala, Ser, Thr or Val
  Variant (9)..(11): Xaa in position 9 to 11 is any amino acid
  Variant (13)..(13): Xaa in position 13 is any amino acid
  Variant (15)..(20): Xaa in position 15 to 20 is any amino acid
AXXXXXXXXXXHXFXXXXXXG

SEQ ID NO: 1953 - DNA, 351 bp, Escherichia coli K12
  CDS (1)..(351): transl_table=11
atgatggatctcgataacattcccgatacgcaaacggaagctgaagagctggaagaagtggtgatggggctgatcatcaactccggacaagcgcgcagcctggcgtatgcggcactgaaacaggcgaagcagggcgattttgccgcagcaaaagccatgatggatcagtcacggatggcattgaatgaagcgcatctggtacagacgaaactgattgaaggcgatgcgggcgaaggtaagatgaaagtgagtctggtgctggtccacgctcaggatcatttaatgacgtccatgcttgcgcgtgaactgattactgaattaattgagcttcatgaaaaactgaaggcataa

SEQ ID NO: 1954 - protein, 116 aa, Escherichia coli K12
MMDLDNIPDTQTEAEELEEVVMGLIINSGQARSLAYAALKQAKQGDFAAAKAMMDQSRMALNEAHLVQTKLIEGDAGEGKMKVSLVLVHAQDHLMTSMLARELITELIELHEKLKA

SEQ ID NO: 1955 - DNA, 312 bp, Photobacterium profundum SS9
  CDS (1)..(312)
atggatttagaagaacaagtcatgggtattattattaatgccggtcaatcacgcagcttatgttatgaagccctacgacatgctaaaaaagctgaatttactgaagctgaaggtttgttaaaagaagctcaagaatttgcaaatcaagctcaccttgttcaaacccagctaattgaagcggatgaaggtgaagggaaaacgaagatgacgttaatcatggttcatgcacaagatcatttaatgacctcaatgctggcgaaagaacttgtgattgaaatcattgagttgcatcgtcgtattgctgtcgaataa

SEQ ID NO: 1956 - protein, 103 aa, Photobacterium profundum SS9
MDLEEQVMGIIINAGQSRSLCYEALRHAKKAEFTEAEGLLKEAQEFANQAHLVQTQLIEADEGEGKTKMTLIMVHAQDHLMTSMLAKELVIEIIELHRRIAVE

SEQ ID NO: 1957 - DNA, 318 bp, Klebsiella pneumoniae
  CDS (1)..(318)
atggaagatttagaaacgatcatcatggagctgctggttaacgcgggttccgcacgtagcgcggcgctgacggcgctacagctggcgcgcaaaggcgattttgtcgccgcggagcaggccatggctgaatcccatgagttcgtcaaacatgcgcataaaattcagacccagcttatcggcatggatgaaggcagcggtaaattgccggtcaacttgatcaccgtgcattcccaggaccatctgatgaacgctatggtcattcaggatctggcgaccgacatgattgaactctatcgtcgtctgcccctcgcgcaataa

SEQ ID NO: 1958 - protein, 105 aa, Klebsiella pneumoniae
MEDLETIIMELLVNAGSARSAALTALQLARKGDFVAAEQAMAESHEFVKHAHKIQTQLIGMDEGSGKLPVNLITVHSQDHLMNAMVIQDLATDMIELYRRLPLAQ

SEQ ID NO: 1959 - DNA, 348 bp, Salmonella typhi
  CDS (1)..(348)
  misc_feature (16)..(16): n is a, g, c or t
  misc_feature (47)..(47): n is a, g, c or t
atgtttgatcttgaanatgttgtagataaccagacagcggctgaggnactcgaagaagtcgttatggggcttatcatcaattctggtcaggcgcgcagcctggcatatggcgcgctcagaaaagcgaaagaaggcgactttgaggcggcgaaagcgatgatggaccagtcgcgcatagcgctcaatgaagcgcatcttgtgcagacaaaactcatcgaaggcgatcagggcgaaggcaaaatgaaagtcagtctggtcctggttcacgctcaggatcatttgatggcctcaatgctggctcgtgaactgatcgctgagttgattgagctccatgagaaactgaaataa

SEQ ID NO: 1960 - protein, 115 aa, Salmonella typhi
  misc_feature (6)..(6): The Xaa at location 6 stands for Asn, Asp, His, or Tyr.
  misc_feature (16)..(16): The Xaa at location 16 stands for Ala, Glu, Gly, or Val.
MFDLEXVVDNQTAAEXLEEVVMGLIINSGQARSLAYGALRKAKEGDFEAAKAMMDQSRIALNEAHLVQTKLIEGDQGEGKMKVSLVLVHAQDHLMASMLARELIAELIELHEKLK

SEQ ID NO: 1961 - DNA, 321 bp, Klebsiella pneumoniae
  CDS (1)..(321)
tcgatggaagatttagaaacgatcatcatggagctgctggttaacgcgggttccgcacgtagcgcggcgctgacggcgctacagctggcgcgcaaaggcgattttgtcgccgcggagcaggccatggctgaatcccatgagttcgtcaaacatgcgcataaaattcagacccagcttatcggcatggatgaaggcagcggtaaattgccggtcaacctgatcaccgtgcattcccaggaccatctgatgaacgctatggtcattcaggatctggcgaccgacatgattgaactctatcgtcgtctgcccctcgcgcaataa

SEQ ID NO: 1962 - protein, 106 aa, Klebsiella pneumoniae
SMEDLETIIMELLVNAGSARSAALTALQLARKGDFVAAEQAMAESHEFVKHAHKIQTQLIGMDEGSGKLPVNLITVHSQDHLMNAMVIQDLATDMIELYRRLPLAQ

SEQ ID NO: 1963 - DNA, 417 bp, Klebsiella pneumoniae
  CDS (1)..(417)
cgcactgaaattctgataccgcgcggtacgggcagcgtcccgtaccgcctgataaatgagggaaatattatgtttgatctggacaacatcgacgcggtagagaccccggaaaatgacctcgaagaggtagtgatggggctgattatcaactccggacaagcccgcagcctggcctatggcgcgctgaagcaggcgaagcagggcgactttgccgcagcgaaagcgatgatggagcagtcgcgccaggcgctgagcgaggcgcatcgcgtgcagacccagcttatcgaaagcgacgagggcgaagggaaaatgaaggtcagcctggtgctggtgcatgcccaggaccatctgatgacctccatgctggctcgtgagctggtggccgaattgattgagctgcacgagaaggtacaatag

SEQ ID NO: 1964 - protein, 138 aa, Klebsiella pneumoniae
RTEILIPRGTGSVPYRLINEGNIMFDLDNIDAVETPENDLEEVVMGLIINSGQARSLAYGALKQAKQGDFAAAKAMMEQSRQALSEAHRVQTQLIESDEGEGKMKVSLVLVHAQDHLMTSMLARELVAELIELHEKVQ

SEQ ID NO: 1965 - DNA, 324 bp, Klebsiella pneumoniae
  CDS (1)..(324)
ggaaaccgtatggatatggaagcaaccgtcatggaactcatcattaacgccggtgagtcccgcagtctggcgatgcaggcgctgcaagccgccagaaaaggagtgtggcaggacgttgataggctgatgcaggacgccgcagatgccgcaaaacgcgcgcatgatgtacaaaccatgcttatcggtatggatgagggctgtggcaaagtaccggttaatcttattctggtacatgcccaggatcatataatgacctccatgctcgcgcgggagttgatcgcggagcttattgaggttcagcgccagctgcaacatcaaaactga

SEQ ID NO: 1966 - protein, 107 aa, Klebsiella pneumoniae
GNRMDMEATVMELIINAGESRSLAMQALQAARKGVWQDVDRLMQDAADAAKRAHDVQTMLIGMDEGCGKVPVNLILVHAQDHIMTSMLARELIAELIEVQRQLQHQN

SEQ ID NO: 1967 - DNA, 360 bp, Klebsiella pneumoniae
  CDS (1)..(360)
caacgcggcgcaaaccgcttaacgctaacgattcagaggataatcatggaattagaagaacaggtgatggggatcatcatcaatgccggccagtcacgtagcctgtgctacgaagcgctgcacgccgctaaagcgggtgatttcgccaccgccgacgccaaaatgcaggaagcggcgcactattcccgcgaagctcaccttgtacagacccagcttatcgaagctgacgaaggcgagggaaaaaccaaaatgacgctggtaatggtccatgctcaggatcacctgatgacatccattctggcgaaagagctgattgccgaactgattgcgatttaccgcgcgcagccgcttcacgcctag

SEQ ID NO: 1968 - protein, 119 aa, Klebsiella pneumoniae
QRGANRLTLTIQRIIMELEEQVMGIIINAGQSRSLCYEALHAAKAGDFATADAKMQEAAHYSREAHLVQTQLIEADEGEGKTKMTLVMVHAQDHLMTSILAKELIAELIAIYRAQPLHA

SEQ ID NO: 1969 - DNA, 312 bp, Klebsiella pneumoniae
  CDS (1)..(312)
atggaattagaagaacaggtgatggggatcatcatcaatgccggccagtcacgtagcctgtgctacgaagcgctgcacgccgctaaagcgggtgatttcgccaccgccgacgccaaaatgcaggaagcggcgcactattcccgcgaagctcaccttgtacagacccagcttatcgaagctgacgaaggcgagggaaaaaccaaaatgacgctggtaatggtccatgctcaggatcacctgatgacatccattctggcgaaagagcttattgccgaactgattgcgatttaccgcgcgcagccgcttcacgcc

SEQ ID NO: 1970 - protein, 104 aa, Klebsiella pneumoniae
MELEEQVMGIIINAGQSRSLCYEALHAAKAGDFATADAKMQEAAHYSREAHLVQTQLIEADEGEGKTKMTLVMVHAQDHLMTSILAKELIAELIAIYRAQPLHA

SEQ ID NO: 1971 - DNA, 345 bp, Proteus sp
  CDS (1)..(345)
atgttagatattgagaattgcgttgatagctcagcgacagatgatgaatttgaagaaattatcatggggttaattattaattcagggcaagcacgaagtatcgcttatgcagcgttaaaaaaagcgaagcaaggtgattttgcacaagccaagaaaatgatggaacaatctcgagcagcattaaatgaagctcataaaatacagacccgcttaattggtgatgatcaaggattgggtaaaacgaaagtgagcttggtactggtgcatgctcaagatcatttaatgacatctatgttagccagagagcttgtcacagagcttatcgagttacatgaaaaaataaag

SEQ ID NO: 1972 - protein, 115 aa, Proteus sp
MLDIENCVDSSATDDEFEEIIMGLIINSGQARSIAYAALKKAKQGDFAQAKKMMEQSRAALNEAHKIQTRLIGDDQGLGKTKVSLVLVHAQDHLMTSMLARELVTELIELHEKIK

SEQ ID NO: 1973 - DNA, 402 bp, Proteus mirabilis
  CDS (1)..(402)
acaatggctgtgcagcgcttattttgcacagctaagcaccaaagagggggaatgatgttagatattgagaattgtgttgatagctcagcgacagatgatgaatttgaagaaattatcatggggttaattattaattcagggcaagcacgaagtatcgcttatgcagcgttaaaaaaagcgaagcaaggtgattttgcacaagccaagaaaatgatggaacaatctcgagcagcattaaatgaagctcataaaatacagacccgcttaattggtgatgatcaaggattgggtaaaacgaaagtgagcttggtactggtgcatgctcaagatcatttaatgacatctatgttagccagagagcttgtcacagagcttatcgagttacatgaaaaaataaagtaa

SEQ ID NO: 1974 - protein, 133 aa, Proteus mirabilis
TMAVQRLFCTAKHQRGGMMLDIENCVDSSATDDEFEEIIMGLIINSGQARSIAYAALKKAKQGDFAQAKKMMEQSRAALNEAHKIQTRLIGDDQGLGKTKVSLVLVHAQDHLMTSMLARELVTELIELHEKIK

SEQ ID NO: 1975 - DNA, 351 bp, Enterobacter cloacae
  CDS (1)..(351)
aaaatgttagatttagagagtatcgttgccgaagaaaccgcagagaacgatctggaagaggtggtgatgggcctcatcatcaactccgggcaggcacgcagcctggcgtatgcggcgcttaagcaggctaagcagggcgacttcgttgccgcgaaaaccatgatggagcagtcccgtacggcgttaaacgaagcgcatctggtgcagacgaagcttatcgaaagcgaccagggcgaagggaagatgaaagtgagtctggtgctggtacatgcgcaggatcatctgatgacctccatgctggcacgcgagctggtagcggagctcatcgagcttcacgagaagatgcaataa

SEQ ID NO: 1976 - protein, 116 aa, Enterobacter cloacae
KMLDLESIVAEETAENDLEEVVMGLIINSGQARSLAYAALKQAKQGDFVAAKTMMEQSRTALNEAHLVQTKLIESDQGEGKMKVSLVLVHAQDHLMTSMLARELVAELIELHEKMQ

SEQ ID NO: 1977 - DNA, 315 bp, Enterobacter cloacae
  CDS (1)..(315)
agagtaatgatgatgatcgcactagaagaagccgtaatggaaattatcgtcaacgccggccagtcccgcagcctgtgctttgaagccctgcacgcggcgcgtcagggcaaccttgacgaggccaaaagcctgctgcgcgaagccgacggctacgcgcgccaggcgcacaagatgcagaccaaactgattgagcaggacgcgggcgaagcccgccagccgatgacattaattatggtgcacgcgcaggatcatttaatgaattcgctattagcgcgtgaattatctgaagagattattcatttatatcagagatag

SEQ ID NO: 1978 - protein, 104 aa, Enterobacter cloacae
RVMMMIALEEAVMEIIVNAGQSRSLCFEALHAARQGNLDEAKSLLREADGYARQAHKMQTKLIEQDAGEARQPMTLIMVHAQDHLMNSLLARELSEEIIHLYQR

SEQ ID NO: 1979 - DNA, 372 bp, Lactobacillus acidophilus NCFM
  CDS (1)..(372)
atggcagaagaaaaacaaactccagaacaaaaggaccaagaaaccttgatggctgctatgggcttaattgcaaatggtggaaatgcaaaaagtttagcttttgaagcaattcgtcttgcaaagactggtgatatcgaaggcgcacgtgaaaagttaaaggaaagtgataagtcacttcttgaggcacacaattcacagacaagtatgcttactcaagaagcacaaggtgatcatatgcacgtgaccttattggtagtacactcacaagatcacttgatgaatgctattacctttagagatttggctggagaaatggtggatctttacgaaaagctatataattctggcgctcttaaaaaagaagataagtaa

SEQ ID NO: 1980 - protein, 123 aa, Lactobacillus acidophilus NCFM
MAEEKQTPEQKDQETLMAAMGLIANGGNAKSLAFEAIRLAKTGDIEGAREKLKESDKSLLEAHNSQTSMLTQEAQGDHMHVTLLVVHSQDHLMNAITFRDLAGEMVDLYEKLYNSGALKKEDK

SEQ ID NO: 1981 - DNA, 336 bp, Vibrio cholerae O1 biovar eltor str. N16961
  CDS (1)..(336): transl_table=11
atggaacaagaacttatcgtgatggaaattatttgcaacgccggtgaagcgcgaagcttgtgttatgaagcattacgtttagcgcgtactcgatcttttgagcaggcagaagagaaattgtgtcaggctaaagagtgcttaaaccgagctcatttaattcaaacacaattgattgaagccgatcagggtgaaggcaaagtaccaatgaccttggtgatggtgcatgctcaagatcatttaatgacgacaattctggcacaggaaatggcgactgaaatggtggctttacataaacacttggcgggtgaggaagcaaaatgtctcgaaatgcattaa

SEQ ID NO: 1982 - protein, 111 aa, Vibrio cholerae O1 biovar eltor str. N16961
MEQELIVMEIICNAGEARSLCYEALRLARTRSFEQAEEKLCQAKECLNRAHLIQTQLIEADQGEGKVPMTLVMVHAQDHLMTTILAQEMATEMVALHKHLAGEEAKCLEMH

SEQ ID NO: 1983 - DNA, 333 bp, Bacillus halodurans C-125
  CDS (1)..(333): transl_table=11
atgccgacacaacaaaagcctcttgaagaaattgcctttcaaatcattcttcattcagggaatgctcgctcatgtgccatggaaggcattcaattagcaaaagcaggaaaattcgctgctgcacgagaacgtatggagcaagcagataaggaatttcataaagcccatcatgcacagacgagcttaattcaacaggaagcaagtggtgatgccgtctccccttccctgctcttgatccatgcccaagatcatttaatgacctcgatgacgacgaaggacctttgtctagagatcatcgagcttcacgaaaaagtcgataaggagtgtgaatag

SEQ ID NO: 1984 - protein, 110 aa, Bacillus halodurans C-125
MPTQQKPLEEIAFQIILHSGNARSCAMEGIQLAKAGKFAAARERMEQADKEFHKAHHAQTSLIQQEASGDAVSPSLLLIHAQDHLMTSMTTKDLCLEIIELHEKVDKECE

SEQ ID NO: 1985 - DNA, 351 bp, Lactococcus lactis subsp. lactis Il1403
  CDS (1)..(351): transl_table=11
atgactgataaatacgagaatccaacaagtgatgactacatgggtgttgtaatgggcattatcatgagtggaggaaatgccaaaggtttagccttccaagccattcaacaagccaaagctggtgaatttgccgaagctgaaagttcattaaacgaagcgagtgaacaacttcgtgaagcacatgatgttcagactgaccttttgacacgtttagctcaaggcgaaaaaattggttggaatctttacatggttcatgctcaagaccacttaatgaatgcgattacctttaaagaccttgctgtagaagttgtcggtcaagaacaacgcctgcaagcacttgaaaacaaataa

SEQ ID NO: 1986 - protein, 116 aa, Lactococcus lactis subsp. lactis Il1403
MTDKYENPTSDDYMGVVMGIIMSGGNAKGLAFQAIQQAKAGEFAEAESSLNEASEQLREAHDVQTDLLTRLAQGEKIGWNLYMVHAQDHLMNAITFKDLAVEVVGQEQRLQALENK

SEQ ID NO: 1987 - DNA, 336 bp, Streptococcus pyogenes M1 GAS
  CDS (1)..(336): transl_table=11
atgacggaaccatccaacttagaagctattatgggcttaatcatgtatggaggcgaagccaagggcaaggccgtagaggctattcatgcagcacgagatgggcagtttgaggaggctcagcacttacttcaagaagcgacaaactcgttaaatattgcccataaatcgcagacacatttgctgtcccaagaagcagctggtgatgcggttgaattgtctttattgatggtgcatgggcaagatcacatgatgactgccttagcctttattgatttagccaaggaattggttaccgtttacgacaaaatgtcagcaatacaaagaggtgagtcatga

SEQ ID NO: 1988 - protein, 111 aa, Streptococcus pyogenes M1 GAS
MTEPSNLEAIMGLIMYGGEAKGKAVEAIHAARDGQFEEAQHLLQEATNSLNIAHKSQTHLLSQEAAGDAVELSLLMVHGQDHMMTALAFIDLAKELVTVYDKMSAIQRGES

SEQ ID NO: 1989 - DNA, 318 bp, Streptococcus pneumoniae TIGR4
  CDS (1)..(318): transl_table=11
atgaatagagaagaagtaacattgttaggttttgaaatcgtagcctatgctggcgatgctcgttcaaaactattggaagccttgaaggctgctgaagctggtgattttgaaaaagcggacgctctggtagaggaagctggtagctgtattgcagaggctcaccacgcgcaaacaagtctattgactaaggaagcttcaggtgaggacttggcttatagtgtaaccatgatgcatggccaagaccacttaatgacaactatcttgttaaaagatttgatgcatcatttaattgaactctacaagagaggagttcaataa

SEQ ID NO: 1990 - protein, 105 aa, Streptococcus pneumoniae TIGR4
MNREEVTLLGFEIVAYAGDARSKLLEALKAAEAGDFEKADALVEEAGSCIAEAHHAQTSLLTKEASGEDLAYSVTMMHGQDHLMTTILLKDLMHHLIELYKRGVQ

SEQ ID NO: 1991 - DNA, 321 bp, Clostridium acetobutylicum ATCC 824
  CDS (1)..(321): transl_table=11
atggatatagagcaaataataatgaatataataatttattccggcgatgctaggagctacatgtatgaagcgcttagcaaggcaagagaaggaaagtatgatgagataaatggcttaataaagcaagcaaatgatgctataggaaaggctcatgatatacagacttcaatgcttcaaaaagaagcagagggcgaggcactaaaggtttcaatattatttgtacatgcgcaggatcaattaatgaccacaatttcagaaaaaaatcttataactgaaatgattgaaatgacaaaggatataaatgctttgtccaataaataa

SEQ ID NO: 1992 - protein, 106 aa, Clostridium acetobutylicum ATCC 824
MDIEQIIMNIIIYSGDARSYMYEALSKAREGKYDEINGLIKQANDAIGKAHDIQTSMLQKEAEGEALKVSILFVHAQDQLMTTISEKNLITEMIEMTKDINALSNK

SEQ ID NO: 1993 - DNA, 315 bp, Clostridium acetobutylicum ATCC 824
  CDS (1)..(315): transl_table=11
atgaataaggaagaattagaattaactacaatggagatagtggcttatgcaggagatgcaagatcaaaatatttggaagctttaaatgcagctaatggcggagattatgataaggcacagcaattagttttagagggaaatgatcttataactgaagcacataacgttcaaactaaaatgattcaaatggaagctcaaggtaagaagatagaggtaggattcttagttgtccatgcgcaggatcatttaatgacagtaatgcttttaagagaccttgtaaagaatttaataaatttatacaagaaggtaaattag

SEQ ID NO: 1994 - protein, 104 aa, Clostridium acetobutylicum ATCC 824
MNKEELELTTMEIVAYAGDARSKYLEALNAANGGDYDKAQQLVLEGNDLITEAHNVQTKMIQMEAQGKKIEVGFLVVHAQDHLMTVMLLRDLVKNLINLYKKVN

SEQ ID NO: 1995 - DNA, 321 bp, Streptococcus pneumoniae R6
  CDS (1)..(321): transl_table=11
atggaaatgattgttccagatcaaattatcatgggtttaattttatatgctggcgatgcgaaacaacatatttataaagcattagattacataaagaacggtacatgtgaacgatgtgaagaagaaatccagttagctgatgcagccttattagaagctcataatctacaaacaaaattcttggcacaggaagcgtctggtacaaagacagaaattacagctctctttgttcattcacaagatcatctcatgactagtatgacggagattaatttaatcaaagaaattattagtttgagaaaagaacttcataaaaaataa

SEQ ID NO: 1996 - protein, 106 aa, Streptococcus pneumoniae R6
MEMIVPDQIIMGLILYAGDAKQHIYKALDYIKNGTCERCEEEIQLADAALLEAHNLQTKFLAQEASGTKTEITALFVHSQDHLMTSMTEINLIKEIISLRKELHKK

SEQ ID NO: 1997 - DNA, 315 bp, Streptococcus pneumoniae R6
  CDS (1)..(315): transl_table=11
atgaatcaagaggaactgcaggttgcagcatttgaaattatcctgcattcgggaaatgcaaggtcagaaatacatgaagcatttgcaaaaatgagagaaggtagttttgatgatgcagaaagcaaattaaatcaatcaaatgagataattcttgaagcgcatcatgcacaaaccaaactcctgcaagaatacgcaagtggagtggaaattaaaattgaaattatcatggtacatgctcaagatcatttaatgaccactatgacattattagaagtagcaaaggaaatgttagctctttataagaaagttaactaa

SEQ ID NO: 1998 - protein, 104 aa, Streptococcus pneumoniae R6
MNQEELQVAAFEIILHSGNARSEIHEAFAKMREGSFDDAESKLNQSNEIILEAHHAQTKLLQEYASGVEIKIEIIMVHAQDHLMTTMTLLEVAKEMLALYKKVN

SEQ ID NO: 1999 - DNA, 318 bp, Streptococcus pneumoniae R6
  CDS (1)..(318): transl_table=11
atgaatagagaagaagtaacattgttaggttttgaaatcgtagcctatgctggcgatgctcgttcaaaactattggaagccttgaaggctgctgaagctggtgattttgaaaaagcggacgctctggtagaggaagctggtagctgtattgcagaggctcaccacgcgcaaacaagtctattgactaaggaagcttctggtgaggacttagcgtatagtgtgaccatgatgcatggccaagaccacttgatgacaactatcttgttaaaggatttgatgcaccatttgatcgaactctataagagaggagttaaataa

SEQ ID NO: 2000 - protein, 105 aa, Streptococcus pneumoniae R6
MNREEVTLLGFEIVAYAGDARSKLLEALKAAEAGDFEKADALVEEAGSCIAEAHHAQTSLLTKEASGEDLAYSVTMMHGQDHLMTTILLKDLMHHLIELYKRGVK

SEQ ID NO: 2001 - DNA, 348 bp, Salmonella enterica subsp. enterica serovar Typhi str. CT18
  CDS (1)..(348): transl_table=11
atgtttgatcttgaaaatgttgtagataaccagacagcggctgaggaactcgaagaagtcgttatggggcttatcatcaattctggtcaggcgcgcagcctggcatatggcgcgctcagaaaagcgaaagaaggcgactttgaggcggcgaaagcgatgatggaccagtcgcgcatagcgctcaatgaagcgcatcttgtgcagacaaaactcatcgaaggcgatcagggcgaaggcaaaatgaaagtcagtctggtcctggttcacgctcaggatcatttgatggcctcaatgctggctcgtgaactgatcgctgagttgattgagctccatgagaaactgaaataa

SEQ ID NO: 2002 - protein, 115 aa, Salmonella enterica subsp. enterica serovar Typhi str. CT18
MFDLENVVDNQTAAEELEEVVMGLIINSGQARSLAYGALRKAKEGDFEAAKAMMDQSRIALNEAHLVQTKLIEGDQGEGKMKVSLVLVHAQDHLMASMLARELIAELIELHEKLK

SEQ ID NO: 2003 - DNA, 348 bp, Salmonella typhimurium LT2
  CDS (1)..(348): transl_table=11
atgtttgatcttgaaaatgttgtagataaccagaccgcggctgaggaactcgaagaagtcgttatggggcttatcatcaattctggtcaggcgcgcagcctggcatatggcgcgctcagaaaagcgaaagaaggcgattttgaggcggcgaaagcgatgatggaccagtcgcgcatagcgctcaatgaagcgcatcttgtgcagacaaaactcatcgaaggcgatcagggcgaaggcaaaatgaaagtcagtctggtcctggttcacgctcaggatcatttgatgacatcaatgctggctcgtgaactgatcgccgagttgattgagctccatgagaaactgaaataa

SEQ ID NO: 2004 - protein, 115 aa, Salmonella typhimurium LT2
MFDLENVVDNQTAAEELEEVVMGLIINSGQARSLAYGALRKAKEGDFEAAKAMMDQSRIALNEAHLVQTKLIEGDQGEGKMKVSLVLVHAQDHLMTSMLARELIAELIELHEKLK

SEQ ID NO: 2005 - DNA, 303 bp, Listeria monocytogenes EGD-e
  CDS (1)..(303): transl_table=11
atggaattagaacaaacaattatgcaattaatcgtacacgggggaaacgctaaaagtgacgcaatgctagcaatcgaagcggcaaaaaaaggggattttgacgttgcagatgagcaaatcaaaaatgcagaagcggcactacttgaggcgcatcattcacaaacttcattaattcaaggtgaagcacgtggcgaaaaagcagaagtatcattactacttgttcacgcgcaagatcacttaatgaacgctattacttttaaagacttagcgaaggaaattgttgatttataccgctctaaataa

SEQ ID NO: 2006 - protein, 100 aa, Listeria monocytogenes EGD-e
MELEQTIMQLIVHGGNAKSDAMLAIEAAKKGDFDVADEQIKNAEAALLEAHHSQTSLIQGEARGEKAEVSLLLVHAQDHLMNAITFKDLAKEIVDLYRSK

SEQ ID NO: 2007 - DNA, 303 bp, Listeria monocytogenes EGD-e
  CDS (1)..(303): transl_table=11
atggatttagagcaaactattatgagcttgatcgtgttcggtggtaacgctaaaagcgatgctatgttagccattgattccgctaaaaaaggggatttcgctcaagcagacgaacaaatcgcccaagcagaacaagcactacttgaagcgcatcattctcaaacaaaacttatacaaggtgaagcacgtggcgaaaaaacagaagtttcccttctactcgttcacgcacaagaccacttaatgaatgcaattactttcaaagatttagcgaaagaaattgttgacctttataagaataaataa

SEQ ID NO: 2008 - protein, 100 aa, Listeria monocytogenes EGD-e
MDLEQTIMSLIVFGGNAKSDAMLAIDSAKKGDFAQADEQIAQAEQALLEAHHSQTKLIQGEARGEKTEVSLLLVHAQDHLMNAITFKDLAKEIVDLYKNK

SEQ ID NO: 2009 - DNA, 315 bp, Listeria innocua Clip11262
  CDS (1)..(315): transl_table=11
atggaaggcactgaattacaatcttttaaaataatatcaagtgcaggagatgcgtcttccttgtttctaaaagccgttcaacacgctgaaaaaagtgaatttgcagaagcagaagcatgtatcgagcaagcaaatcaatctttaagagaagcacatcatgttcaaacgtctttgattcaagaagaagcaaacggtagctcaaaagaactttctttactgctgattcacgcacaagatcatctaatgaatgcttttgtatactctgacttagttaaatccgtgcttaatttgtataagcgtttagatgaaaagtaa

SEQ ID NO: 2010 - protein, 104 aa, Listeria innocua Clip11262
MEGTELQSFKIISSAGDASSLFLKAVQHAEKSEFAEAEACIEQANQSLREAHHVQTSLIQEEANGSSKELSLLLIHAQDHLMNAFVYSDLVKSVLNLYKRLDEK

SEQ ID NO: 2011 - DNA, 312 bp, Clostridium perfringens str. 13
  CDS (1)..(312): transl_table=11
atgaaagaaataatcatggatttaataattcatagtggagaagctagaagttatgccatggaagctattcagcttgctaaagcaggagaggtagacggggctagaagcttaatagaaaaagcgtcaatgcaattaggcaaagctcataaatcacaaacagctttgattcaagatgaggctagtgataataaaatagaaatatccatgctattaattcatgcacaggatcaattaatgactactatgacattaaaagatttagcaaatgaaataatagatttgtatgaaaaattaaatcaaaaaaatttttag

SEQ ID NO: 2012 - protein, 103 aa, Clostridium perfringens str. 13
MKEIIMDLIIHSGEARSYAMEAIQLAKAGEVDGARSLIEKASMQLGKAHKSQTALIQDEASDNKIEISMLLIHAQDQLMTTMTLKDLANEIIDLYEKLNQKNF

SEQ ID NO: 2013 - DNA, 318 bp, Streptococcus pyogenes MGAS8232
  CDS (1)..(318): transl_table=11
atgaatagagaagaaactactcttttaggttttgaaatcgtagcctatgctggtgatgcccgttcaaaatttttggaagcgcttaaagcagcgcaagaaggggattatgctaaagcagaagaattaatcgctgcaggtagtgactgcttgaatgatgctcacaatgctcagacaagtctactacaaaaagaagcagctggagatgacttagcttatagtgtcactttaatgcatggtcaagatcatttaatgacgaccattttattacaagatttaatgaaacacatgattgaactttataagagaggagcaaaataa

SEQ ID NO: 2014 - protein, 105 aa, Streptococcus pyogenes MGAS8232
MNREETTLLGFEIVAYAGDARSKFLEALKAAQEGDYAKAEELIAAGSDCLNDAHNAQTSLLQKEAAGDDLAYSVTLMHGQDHLMTTILLQDLMKHMIELYKRGAK

SEQ ID NO: 2015 - DNA, 321 bp, Streptococcus pyogenes MGAS8232
  CDS (1)..(321): transl_table=11
atgcaagttattgtaccagaccaaatcattatgggcttaattttaaatgcaggcgatgccaaacaacatatctaccaagctctgaaatgtgctaaagaggacgattatgccactagtgaaaaagagatggccttagcagatgatgccttattagaagcccacaatttacagacccagtttcttgcccaagaagctagtggtaataagtcagagattacagctctttttgttcactcacaggatcacttgatgacgaccattacagaaattaatctcgtcaaggagattattgaccttcgtaaagaattggcaaccaaataa

SEQ ID NO: 2016 - protein, 106 aa, Streptococcus pyogenes MGAS8232
MQVIVPDQIIMGLILNAGDAKQHIYQALKCAKEDDYATSEKEMALADDALLEAHNLQTQFLAQEASGNKSEITALFVHSQDHLMTTITEINLVKEIIDLRKELATK

SEQ ID NO: 2017 - DNA, 333 bp, Thermoanaerobacter tengcongensis MB4
  CDS (1)..(333): transl_table=11
atggatttggaacagattgtatttaccattatatctcatgcagggaatgcacggagtaattcttttgaagcattgaaatacgcaagagaaggcaattttgaagaagcagaaaaatgtttagaaaaagcgagtgaagagcttttagaagctcatcacgtacaaacagatatgatacacaaggaagcggcaggagaaaaacaagagataactttgcttttagttcatgctgaggatcatctcatgaatgctatccttgcgaaagagttgataactgaaatgattgagctctataaaattatttatcaaacaaagggggctacttataatgtctaa

SEQ ID NO: 2018 - protein, 110 aa, Thermoanaerobacter tengcongensis MB4
MDLEQIVFTIISHAGNARSNSFEALKYAREGNFEEAEKCLEKASEELLEAHHVQTDMIHKEAAGEKQEITLLLVHAEDHLMNAILAKELITEMIELYKIIYQTKGATYNV

SEQ ID NO: 2019 - DNA, 348 bp, Yersinia pestis KIM
  CDS (1)..(348): transl_table=11
atgtttgatttaagtagcatcgttgataacgaacaaaccagtgatgcgctggaagatgtggtcatggggcttatcatcaacgcgggccaagcccgtagcctggcctataacgcactgaaacaggccaaagccggtgattttgcacaagcagatgaactgatggcgcagtcccggagcgccttgaatgacgcccacttggtgcagacacaattgattgaagccgatcagggcgaagggaaaaccaaagttaccctggtgctggtacatgctcaggatcatttgatgaatgccatgttagcgcgagaattgattactgagcttatcgagctgcatcaaaaaattcagtga

SEQ ID NO: 2020 - protein, 115 aa, Yersinia pestis KIM
MFDLSSIVDNEQTSDALEDVVMGLIINAGQARSLAYNALKQAKAGDFAQADELMAQSRSALNDAHLVQTQLIEADQGEGKTKVTLVLVHAQDHLMNAMLARELITELIELHQKIQ

SEQ ID NO: 2021 - DNA, 324 bp, Streptococcus agalactiae 2603V/R
  CDS (1)..(324): transl_table=11
atggaaatcatagtcgcagaccaaattattatggggctcattttgaatgctggggatgctaaacaacatatctatcaagccttaaaacttgcaaaagaaggaaattttgcagaaagtaagattgaaatagaactagcagatagtgcactcctagaagctcataatcttcaaacacaattccttgcacaagaagcaggagggacaaggacagatatctcagcactctttattcattctcaggatcatttgatgacaagtattactgagattaacttgattaaagaaattattgatttacgccaggaattacatattcaaaaataa

SEQ ID NO: 2022 - protein, 107 aa, Streptococcus agalactiae 2603V/R
MEIIVADQIIMGLILNAGDAKQHIYQALKLAKEGNFAESKIEIELADSALLEAHNLQTQFLAQEAGGTRTDISALFIHSQDHLMTSITEINLIKEIIDLRQELHIQK

SEQ ID NO: 2023 - DNA, 336 bp, Oceanobacillus iheyensis HTE831
  CDS (1)..(336): transl_table=11
atggccacacaacaggaagaattacaaatgctttcatttcaaattatattacatgctggaaatgccagatcagaagcaatggaagcattacagcttgctagaaaaggagaatttaaagaagcagaattaaaattagaggctgctgataaagaatttaccgaagcgcatcatatacaaacttccttattacaggatgaagctaatggaaacagccctgacttttctataattcttatccatgctcaagatcatttaatgaatgctcttacagttaaagatttagcaatcgaaatgattgcaatgcaaaaacaaataaaaaaattggaggagagataa

SEQ ID NO: 2024 - protein, 111 aa, Oceanobacillus iheyensis HTE831
MATQQEELQMLSFQIILHAGNARSEAMEALQLARKGEFKEAELKLEAADKEFTEAHHIQTSLLQDEANGNSPDFSIILIHAQDHLMNALTVKDLAIEMIAMQKQIKKLEER

SEQ ID NO: 2025 - DNA, 312 bp, Streptococcus mutans UA159
  CDS (1)..(312): transl_table=11
atgaatacagaagaattacaagttgccgcatttgaaattattttaaattctggcaatgcgcgctcaattgtccatgaagcatttgatgcaatgcgtgaaaaaaattacattctagctgaacagaagcttcaggaagcgaatgatgaactgctcaaagctcatcaagcacagactgatctactgcaagagtacgctagcggaacggaaattaaaattgaaatcatcatggttcatgcgcaagatcatttaatgacaaccatgacacttcgcgaagtagctattgaaatgttggaattgtataaaaaaagttga

SEQ ID NO: 2026 - protein, 103 aa, Streptococcus mutans UA159
MNTEELQVAAFEIILNSGNARSIVHEAFDAMREKNYILAEQKLQEANDELLKAHQAQTDLLQEYASGTEIKIEIIMVHAQDHLMTTMTLREVAIEMLELYKKS

SEQ ID NO: 2027 - DNA, 315 bp, Escherichia coli CFT073
  CDS (1)..(315): transl_table=11
gtgatgtttgcagatgaagaacttgttatggagttactgatcaacgcgggacaggctcgttctgatgcgatggaagccatacgttgtgccgggcaaaaagactggcagggcgcaactaaactaatggccagctctgaatctgcctgtcttcaggcgcataagattcagaccgcgttaattagtcaggatgaaggctgtggcaaaatagaagttaatttaattctgatacatgcacaggatcatttgatgaatgcaatattatgccaggatttagccagggaaattatttcattaagaaaagagctccatgcctga

SEQ ID NO: 2028 - protein, 104 aa, Escherichia coli CFT073
MMFADEELVMELLINAGQARSDAMEAIRCAGQKDWQGATKLMASSESACLQAHKIQTALISQDEGCGKIEVNLILIHAQDHLMNAILCQDLAREIISLRKELHA

SEQ ID NO: 2029 - DNA, 309 bp, Vibrio vulnificus CMCP6
  CDS (1)..(309): transl_table=11
atggaacaagaactggtggtgatggaaatcatttgtaatgcaggtgaagcaagaagtttgtgctttgaagcattgaaattatcacggcagaaagagtttgtgctggcggacgaaaaactggctcaagcaaaggagtgtttgaacaagtcacacttagtgcaaacgcagctgattgaagaagatcaaggtgaaggcaaagtgcctatgacattggtcatggtgcatgcacaggatcaccttatgacgacaatcttggctcatgagcttgcagtagaaatggtcgaacttcataagcagttggctggatga

SEQ ID NO: 2030 - protein, 102 aa, Vibrio vulnificus CMCP6
MEQELVVMEIICNAGEARSLCFEALKLSRQKEFVLADEKLAQAKECLNKSHLVQTQLIEEDQGEGKVPMTLVMVHAQDHLMTTILAHELAVEMVELHKQLAG

SEQ ID NO: 2031 - DNA, 339 bp, Lactobacillus plantarum WCFS1
  CDS (1)..(339): transl_table=11
atgacattagccaataatactgaaactcaagatattgcaatgacacttatcgcgtattctggtgaaggtcgtacgctggcttttaatgcgttagatgcgatgcatcgcgatgctttctccgaatctaagatgttattgaagaaatctagtgaagcactggggaaagcacatgatgttcaaacccaactactggtggctgaggcgaatggtcaacaagtttccattgatattttactaattcatgctcaagatcattttatgacgagtctgttagctaacgagttaatcgctgagatgttaaagatgtctcaaaaatttgaaaggatggtcgatttatga

SEQ ID NO: 2032 - protein, 112 aa, Lactobacillus plantarum WCFS1
MTLANNTETQDIAMTLIAYSGEGRTLAFNALDAMHRDAFSESKMLLKKSSEALGKAHDVQTQLLVAEANGQQVSIDILLIHAQDHFMTSLLANELIAEMLKMSQKFERMVDL

SEQ ID NO: 2033 - DNA, 348 bp, Lactobacillus plantarum WCFS1
  CDS (1)..(348): transl_table=11
atggcagaagaacaaacaaaagaagttgaagcaagtctcgaaaccattatgggtttgatcgttaatggtggtaatgcaaagagttccgctttcgaagcaattaaagctgctaaggaaggcgactttgaaaccgctgatgccaagttaaaggaagcagataactttctaaccgaagcacacaattcacaaacctcaatgttaacggcggaagcacaaggggaacatacccacgtgtcattgttattagtacattcacaagatcacatcatgaatgccatcaccttccgcgacttagctggtgaagttgtagacgtttatcggcgtttagctgccgatgaggcgaagtag

SEQ ID NO: 2034 - protein, 115 aa, Lactobacillus plantarum WCFS1
MAEEQTKEVEASLETIMGLIVNGGNAKSSAFEAIKAAKEGDFETADAKLKEADNFLTEAHNSQTSMLTAEAQGEHTHVSLLLVHSQDHIMNAITFRDLAGEVVDVYRRLAADEAK

SEQ ID NO: 2035 - DNA, 312 bp, Vibrio parahaemolyticus RIMD 2210633
  CDS (1)..(312): transl_table=11
atggaacaagaactggttgtaatggaaatcatctgtaatgcgggtgaagccagaagtttaagttatgaagcactccgtttggcgagagagcaaaaatttgaagcagcagaagagaaattgttgcaagccagagagtgcattaacaaggcgcatttaattcagacgcaactgatcgaagaagatcagggggaaggcaaagtgccgatgactctggttatggtgcacgctcaagatcatttaatgacaacgattctagcgcaagaaatggctgttgagattgtcgctttgaacaagcaactcgcgaacaagtaa

SEQ ID NO: 2036 - protein, 103 aa, Vibrio parahaemolyticus RIMD 2210633
MEQELVVMEIICNAGEARSLSYEALRLAREQKFEAAEEKLLQARECINKAHLIQTQLIEEDQGEGKVPMTLVMVHAQDHLMTTILAQEMAVEIVALNKQLANK

SEQ ID NO: 2037 - DNA, 336 bp, Streptococcus pyogenes SSI-1
  CDS (1)..(336): transl_table=11
atgacggaaccatccaacttagaagctattatgggcttaatcatgtatggaggtgaagccaagggcaaggccgtagaggctattcatgcagcacgagatgggcagtttgaggaggctcagcacttacttcaagaagcgacaaactcgttaaatattgcccataaatcgcagacacatttgctgtcccaagaagcagctggtgatgcggttgaattgtctttattgatggtgcatgggcaagatcacatgatgactgccttagcctttattgatttagccaaggaattggttatcgtttacgataaaatgtcagcaatacaaagaggtgagtcatga

SEQ ID NO: 2038 - protein, 111 aa, Streptococcus pyogenes SSI-1
MTEPSNLEAIMGLIMYGGEAKGKAVEAIHAARDGQFEEAQHLLQEATNSLNIAHKSQTHLLSQEAAGDAVELSLLMVHGQDHMMTALAFIDLAKELVIVYDKMSAIQRGES

SEQ ID NO: 2039 - DNA, 321 bp, Streptococcus pyogenes SSI-1
  CDS (1)..(321): transl_table=11
atgcaagttattgtaccagaccaaatcattatgggcttaattttaaatgcaggcgatgccaaacaacatatctaccaagctctgaaatgtgctaaagaggacgattatgccactagtgaaaaagaaatggccttagcagatgatgccttattagaagcccacaatttacagacccagtttcttgcccaagaagctagtggtaataagtcagagattacagctctttttgttcactcacaggatcacttgatgacgaccattacagaaattaatctcatcaaagagattattgaccttcgtaaagaattggcaactaaataa

SEQ ID NO: 2040 - protein, 106 aa, Streptococcus pyogenes SSI-1
MQVIVPDQIIMGLILNAGDAKQHIYQALKCAKEDDYATSEKEMALADDALLEAHNLQTQFLAQEASGNKSEITALFVHSQDHLMTTITEINLIKEIIDLRKELATK

SEQ ID NO: 2041 - DNA, 321 bp, Enterococcus faecalis V583
  CDS (1)..(321): transl_table=11
atggacggacaacagaacttagaagcaatcatgggtttaatcatgtatggcggaaatgctaaaagcgatgcaatggaagcgattgccgcagcaaaatcgggggattttgaattagcagacaaaaaaattgcagatgcagaagaatcacttgtacatgcacatcattcgcaaacaggaatgttaacagaagaagcaaaaggcaataacatgcaagtaacattgttaacagtgcacagtcaagatcatttaatgactgcgattgcatttacagatttagcaaaagaaattatcgatctttatcgccgtattgataacgagtaa

SEQ ID NO: 2042 - protein, 106 aa, Enterococcus faecalis V583
MDGQQNLEAIMGLIMYGGNAKSDAMEAIAAAKSGDFELADKKIADAEESLVHAHHSQTGMLTEEAKGNNMQVTLLTVHSQDHLMTAIAFTDLAKEIIDLYRRIDNE

SEQ ID NO: 2043 - DNA, 321 bp, Bacillus cereus ATCC 14579
  CDS (1)..(321): transl_table=11
atggctgatatgcaaactccatttgcgttaattttacatggtggcaatgcgagaagtgcggcgcttgaagcaattgcttttgcaagacaaggagatttcgggaatgccggtgaaaagatgaaacttgctagtgaggaaatttcagcagcgcatcgtattcaaacggatttaattcaagaagaggcaagaggaaatcatgcagaaattagtttactgttggtgcacgcacaagatcatttaatgaatgcaattacagtgaaagaactggctgaagaatttattgctcttcataaacgagtagaagagaaagtgaccgtataa

SEQ ID NO: 2044 - protein, 106 aa, Bacillus cereus ATCC 14579
MADMQTPFALILHGGNARSAALEAIAFARQGDFGNAGEKMKLASEEISAAHRIQTDLIQEEARGNHAEISLLLVHAQDHLMNAITVKELAEEFIALHKRVEEKVTV

SEQ ID NO: 2045 - DNA, 324 bp, Bacillus cereus ATCC 14579
  CDS (1)..(324): transl_table=11
atgatgactacagcagaacaaattccattccaattgattttaaatagtggtaacgcacgaagctttgcgatggaggcacttcaatttgccaaacaggggaaaatggtagaagcagatgaagcgatggtaaaggcaaaagaagcgattaatgaagcgcatcatttccaaacagagctcatacaatcagaagcaagaggagaaaaaacagaggttagtgttcttttaattcacgcacaagatcatttaatgaatgcgattacagtgaaagaattagcagcagagtttatcgatctttataaaaagcttgaagcgaaaggggaataa

SEQ ID NO: 2046 - protein, 107 aa, Bacillus cereus ATCC 14579
MMTTAEQIPFQLILNSGNARSFAMEALQFAKQGKMVEADEAMVKAKEAINEAHHFQTELIQSEARGEKTEVSVLLIHAQDHLMNAITVKELAAEFIDLYKKLEAKGE

SEQ ID NO: 2047 - DNA, 318 bp, Bacillus cereus ATCC 14579
  CDS (1)..(318): transl_table=11
atggatacgatagagacgaaagcttttcatttaatcttgcatgggggaaacgcgagaagttgttcaatggaagcaattgattgtgcgaagcgtggggagtttacagaagctgaagctaaattacaagaagcactagaggaattaaaagaggcgcaccgtgtacaaacggagcttatccagaaagaagctggtggtgaaaagaccgaagttactcttttaatggtacacgcacaagaccatttaatgaatgcaattacggtgaaagaattagcgagtgagtttgtagagttatataggaagatgtcggtggatgaatga

SEQ ID NO: 2048 - protein, 105 aa, Bacillus cereus ATCC 14579
MDTIETKAFHLILHGGNARSCSMEAIDCAKRGEFTEAEAKLQEALEELKEAHRVQTELIQKEAGGEKTEVTLLMVHAQDHLMNAITVKELASEFVELYRKMSVDE

SEQ ID NO: 2049 - DNA, 321 bp, Bacillus anthracis str. Ames
  CDS (1)..(321): transl_table=11
atggctgatatgcaaactccatttgcattaattttacatggtggcaacgcgagaagtatagcgcttgaagcaattgcttttgcaagacaaggagattttgagaatgcgagtgaaaagatgacacttgctagtgaagaaatttcagcagctcatcgcattcaaacggacttaattcaagaagaagcaagaggaaatcatgcagaaatcagtttactgttagtacatgcacaagatcatttaatgaatgcaattacagtgaaagaacttgcggaagaatttattactcttcataaacgaatggaagagaaagtgatagcataa

SEQ ID NO: 2050 - protein, 106 aa, Bacillus anthracis str. Ames
MADMQTPFALILHGGNARSIALEAIAFARQGDFENASEKMTLASEEISAAHRIQTDLIQEEARGNHAEISLLLVHAQDHLMNAITVKELAEEFITLHKRMEEKVIA

SEQ ID NO: 2051 - DNA, 324 bp, Bacillus anthracis str. Ames
  CDS (1)..(324): transl_table=11
atgatgactacagcagaacaaattccattccaattgattttaaatagtggtaatgcacgaagctttgcgatggaggcacttcaatttgccaaacaggggaaaatggcagaggctgatgaagcgatggtaaaggcgaaagaagcgatcaatgaagcgcatcatttccaaacagagctcatacaatcagaagcaagaggagaaaaaacagagattagtgttcttttaattcacgcacaagatcatttaatgaatgcgattacagtaaaagaattagcggcagagtttatcgatctttataaaaaattagaagcgaaaggggaataa

SEQ ID NO: 2052 - protein, 107 aa, Bacillus anthracis str. Ames
MMTTAEQIPFQLILNSGNARSFAMEALQFAKQGKMAEADEAMVKAKEAINEAHHFQTELIQSEARGEKTEISVLLIHAQDHLMNAITVKELAAEFIDLYKKLEAKGE

SEQ ID NO: 2053 - DNA, 360 bp, Photorhabdus luminescens subsp. laumondii TTO1
  CDS (1)..(360): transl_table=11
atggatttagaacaagctattgatttagaaaaaactattgatttagaaaaaactattgtagaactgctggtttatgccggaagcgcacgcagtcatgcactaatggcattacaacatgccagaaacggtgattttcaaacagcacaaacactgatggctgaatctcaacaggcgatcaaagaagcacacacgattcagactaccctcattggattagatgaaggctgcggtaaattacctgtcaatctcatcaccgtccatgcgcaagatcatttaatgaacgcaatggttattcaagatcttgccagcgatatgattgaactctatcgccgaatgtcatcacaagaggaaaaaacatga

SEQ ID NO: 2054 - protein, 119 aa, Photorhabdus luminescens subsp. laumondii TTO1
MDLEQAIDLEKTIDLEKTIVELLVYAGSARSHALMALQHARNGDFQTAQTLMAESQQAIKEAHTIQTTLIGLDEGCGKLPVNLITVHAQDHLMNAMVIQDLASDMIELYRRMSSQEEKT

SEQ ID NO: 2055 - DNA, 351 bp, Vibrio vulnificus YJ016
  CDS (1)..(351): transl_table=11
ttgaggctgcgaagtcgcagcctctctttggaggagagaaaaatggaacaagaactggtggtgatggaaatcatttgtaatgcaggtgaagcaagaagtttgtgctttgaagcattgaaattatcacggcagaaagagtttgtgctggcggacgaaaaactggctcaagcaaaggagtgtttgaacaagtcacacttagtgcaaacgcagctgattgaagaagatcaaggtgaaggcaaagtgcctatgacattggtcatggtgcatgcacaggatcaccttatgacgacaatcttggctcatgagcttgcagtagaaatggtcgaacttcataagcagttggctggatga

SEQ ID NO: 2056 - protein, 116 aa, Vibrio vulnificus YJ016
MRLRSRSLSLEERKMEQELVVMEIICNAGEARSLCFEALKLSRQKEFVLADEKLAQAKECLNKSHLVQTQLIEEDQGEGKVPMTLVMVHAQDHLMTTILAHELAVEMVELHKQLAG

SEQ ID NO: 2057 - DNA, 327 bp, Lactobacillus johnsonii NCC 533
  CDS (1)..(327): transl_table=11
atggcacaagaaaatagcgataacatgcaagttgtaatgggaattattatgcaagctggtaatgcaaaggctgctgctatgcaagcaatccaagctgctaaaaaaggcgactttgaaaaggctgatgagtttattaagcaagcaaacgaaggcttagtaaatgcccacaatgttcaaactgatatgttaacccaagaagcacaaggtaaccatgtaaaagttgacctttacatggttcatgctcaagaccacttaatgacagctattacttttattgatttagctaaggaagtagtagctgtttacaaaaaaatggctgaaaaataa

SEQ ID NO: 2058 - protein, 108 aa, Lactobacillus johnsonii NCC 533
MAQENSDNMQVVMGIIMQAGNAKAAAMQAIQAAKKGDFEKADEFIKQANEGLVNAHNVQTDMLTQEAQGNHVKVDLYMVHAQDHLMTAITFIDLAKEVVAVYKKMAEK

SEQ ID NO: 2059 - DNA, 321 bp, Bacillus cereus ATCC 10987
  CDS (1)..(321): transl_table=11
atgactgatatgcaaacaccatttgcgttaattttacatggtggcaacgcgagaagcgcgtcacttgaagcaattgcttttgcaagacaaggagattttgagaatgcgagtgaaaagatgacacttgctagggaagaaatttcagcagctcatcgtattcaaacagacttaattcaagaggaagcaagaggaaatcatgcagaaatcagtttactgttagtgcatgcacaagatcatttaatgaatgcaattacagtgaaagaacttgctgaagaatttatcactcttcataaacgaatagaagagaaagtgacagtataa

SEQ ID NO: 2060 - protein, 106 aa, Bacillus cereus ATCC 10987
MTDMQTPFALILHGGNARSASLEAIAFARQGDFENASEKMTLAREEISAAHRIQTDLIQEEARGNHAEISLLLVHAQDHLMNAITVKELAEEFITLHKRIEEKVTV

SEQ ID NO: 2061 - DNA, 321 bp, Bacillus cereus ATCC 10987
  CDS (1)..(321): transl_table=11
atgactacagcagaacaaattccatttcaattaattttaaatagtggtaatgcacgaagctttgcgatggaggcacttcaatttgccaaacaggggaaaatggcagaagctgatgaagcgatggcaaaggcgaaagaagcgattaatgaagcgcatcattttcaaacggagctcatacaatcagaagcaagaggagaaaaaacagagattagtgttcttttaattcatgcacaagatcatttaatgaatgcgattacagtaaaagaattagcagcagagtttattgacctttataaaaagttagaagcgaaaggggaataa

SEQ ID NO: 2062 - protein, 106 aa, Bacillus cereus ATCC 10987
MTTAEQIPFQLILNSGNARSFAMEALQFAKQGKMAEADEAMAKAKEAINEAHHFQTELIQSEARGEKTEISVLLIHAQDHLMNAITVKELAAEFIDLYKKLEAKGE

SEQ ID NO: 2063 - DNA, 318 bp, Bacillus cereus ATCC 10987
  CDS (1)..(318): transl_table=11
atggatacgatagaaacgaaggcttttcacttaatcttgcatgggggaaatgcgagaagttgttcaatggaagcaattgattgtgcaaagcgtggagaatttacagaagcagaagcgaaattacaagaagccttagaagaattaaaagaggcgcaccgtgtacaaacggatctcatacagaaagaagctggtggtgaaaagaccgaagtcacccttctgatggtgcacgcgcaagatcatttaatgaatgcaattacggtgaaggaattagcaagtgaatttgtagaattatataggaagatgtcggtaactgaatga

SEQ ID NO: 2064 - protein, 105 aa, Bacillus cereus ATCC 10987
MDTIETKAFHLILHGGNARSCSMEAIDCAKRGEFTEAEAKLQEALEELKEAHRVQTDLIQKEAGGEKTEVTLLMVHAQDHLMNAITVKELASEFVELYRKMSVTE

SEQ ID NO: 2065 - DNA, 303 bp, Listeria monocytogenes str. 4b F2365
  CDS (1)..(303): transl_table=11
atggaattagaacaaacaattatgcaattaatcgtacacgggggaaacgctaaaagtgacgcaatgctagcaatcgaagcggcaaaaaaaggggattttgacgcggcagatgagcaaatcaaaagtgcagaagcagcactacttgaagcgcatcattcacaaacttcattaattcaaggggaagcacgcggcgaaaaagcagaagtatctttactactagttcacgcgcaagatcacttaatgaacgctattacttttaaagatttagccaaagaaattattgatttataccgctctaaataa

SEQ ID NO: 2066 - protein, 100 aa, Listeria monocytogenes str. 4b F2365
MELEQTIMQLIVHGGNAKSDAMLAIEAAKKGDFDAADEQIKSAEAALLEAHHSQTSLIQGEARGEKAEVSLLLVHAQDHLMNAITFKDLAKEIIDLYRSK

SEQ ID NO: 2067 - DNA, 321 bp, Bacillus thuringiensis serovar konkukian str. 97-27
  CDS (1)..(321): transl_table=11
atggctgatatgcaaactccatttgcgttaattttacatggtggcaacgcgagaagtgcagcgcttgaagcaattgcttttgcaagacaaggagattttgagaatgcgagtgaaaagatgacacttgctagtgaagaaatttcagcagctcatcgcattcaaacggacttaattcaagaagaagcaagaggaaatcatgcagaaatcagtttactgttagtacatgcacaagatcatttaatgaatgcaattacagtgaaagaacttgcggaagaatttattactcttcataaacgaatggaagagaaagtgatagcataa

SEQ ID NO: 2068 - protein, 106 aa, Bacillus thuringiensis serovar konkukian str. 97-27
MADMQTPFALILHGGNARSAALEAIAFARQGDFENASEKMTLASEEISAAHRIQTDLIQEEARGNHAEISLLLVHAQDHLMNAITVKELAEEFITLHKRMEEKVIA

SEQ ID NO: 2069 - DNA, 309 bp, Erwinia carotovora subsp. atroseptica SCRI1043
  CDS (1)..(309): transl_table=11
atgatgattacattagaagatgcagtaatggaaattatcgtcaatgctgggcagtcacgcagcctgtgttttgaggcactgcacgctgcacgtaaaggcaacattgatgaagccaaaaatctgttgaaagaagccgatggctacgcgcgcaaggcacaccatatgcaaactcagctgatcgaacaggatgcaggtgaagccagacagccgatgacgttaattatggttcatgctcaagatcatttaatgacatcattactcgcccgcgaattatcagaagaaataattcacctttatcaacgacaataa

SEQ ID NO: 2070 - protein, 102 aa, Erwinia carotovora subsp. atroseptica SCRI1043
MMITLEDAVMEIIVNAGQSRSLCFEALHAARKGNIDEAKNLLKEADGYARKAHHMQTQLIEQDAGEARQPMTLIMVHAQDHLMTSLLARELSEEIIHLYQRQ

SEQ ID NO: 2071 - DNA, 324 bp, Erwinia carotovora subsp. atroseptica SCRI1043
  CDS (1)..(324): transl_table=11
atggatgtagaaacgcggatgattgagcttatcgttaaatctggcgaaacacgttcctgcgcaatggaagcacttagagcagctcgccggggcgagtgggatcacgtcgatgaactattaaaaatggctgcggtggcgctgaatcgggcgcaattgatccagaccggatttattggctatcagagtaaggaaaaaaccaatctcgaacttattgtggtgcatgcacaggatcatctgatgaatgcgatgctgtgccgtgaactggctgaagagattattgaactcaggaaagatgtatctggcgtcaatatgcacatgcgctaa

SEQ ID NO: 2072 - protein, 107 aa, Erwinia carotovora subsp. atroseptica SCRI1043
MDVETRMIELIVKSGETRSCAMEALRAARRGEWDHVDELLKMAAVALNRAQLIQTGFIGYQSKEKTNLELIVVHAQDHLMNAMLCRELAEEIIELRKDVSGVNMHMR

SEQ ID NO: 2073 - DNA, 345 bp, Erwinia carotovora subsp. atroseptica SCRI1043
  CDS (1)..(345): transl_table=11
atgaaagacacagagaacctccctgaattcgatatggaacaaaccgtgatggagttgctgatcaacgcgggtgaagcccgctcaaacgccatgatggcaattcaggccgcgcgtcagcgagagtggcaacaggccgacgcgctgcttgccgcgtcacaagagacggcgcgtgccgctcaccgcgttcaaacacggctaatcggtttggatgaaggagaaggaaaggtgcccgtcaacctgatcatggtacatgcgcaggatcatctgatgaccgccatgctatgccgggatttggcggaagagattgtcttgttacggcgagaaatggctacatcacaaaactga

SEQ ID NO: 2074 - protein, 114 aa, Erwinia carotovora subsp. atroseptica SCRI1043
MKDTENLPEFDMEQTVMELLINAGEARSNAMMAIQAARQREWQQADALLAASQETARAAHRVQTRLIGLDEGEGKVPVNLIMVHAQDHLMTAMLCRDLAEEIVLLRREMATSQN

SEQ ID NO: 2075 - DNA, 348 bp, Erwinia carotovora subsp. atroseptica SCRI1043
  CDS (1)..(348): transl_table=11
atgctcgatgaaaccattcttgatgaaactacagtgatggaactaattatttatgcgggagaggcgcgctcaagctcgatggaagcactgagcgctgccagaaaatacgactgggacaaggccgaggaactgctgaatgcggcttctgtggcggcgcgcaaagcccatcaaattcagacggccttgatcggtgccgatgagggtagcggaaaaatccaggtcaacttgattctggttcacgcgcaagatcacctgatgaacgcgatgttatgccgtgaactggttgaggaactgattcaactgcatcgggaaatatcctccctgaaacaacatgtaaacctgaaatga

SEQ ID NO: 2076 - protein, 115 aa, Erwinia carotovora subsp. atroseptica SCRI1043
MLDETILDETTVMELIIYAGEARSSSMEALSAARKYDWDKAEELLNAASVAARKAHQIQTALIGADEGSGKIQVNLILVHAQDHLMNAMLCRELVEELIQLHREISSLKQHVNLK

SEQ ID NO: 2077 - DNA, 321 bp, Propionibacterium acnes KPA171202
  CDS (1)..(321): transl_table=11
atgccagagatcgaaaccgccatttttaccatcatcacgagcgctggtgaggcgcgtgcgtcgctgtatcaggctcttgacaaagcacgggctggcgagatggctgagagtgaacagtgcatgattagggcggacacacagttgaagaaagcccatgatatgcagaccgagctcatcacgcgtgatctcaacggctcgctgccgatgtcgcttttactcgtccatgcccaagaccagttgatgacgacgatgtcagaacagtctctcattgagcacatgattggactaattcgagacataggtatcaacggtgggaagtga

SEQ ID NO: 2078 - protein, 106 aa, Propionibacterium acnes KPA171202
MPEIETAIFTIITSAGEARASLYQALDKARAGEMAESEQCMIRADTQLKKAHDMQTELITRDLNGSLPMSLLLVHAQDQLMTTMSEQSLIEHMIGLIRDIGINGGK

SEQ ID NO: 2079 - DNA, 333 bp, Bacillus licheniformis ATCC 14580
  CDS (1)..(333): transl_table=11
atggcagatacacttcaattggaacaggtctcatttgaaatcatccttcacgccggaaatgcgcgttcttctgcaatggaagcgttgcagcttgtgaaacatcacgaatgcgaaaccggttatcaaaagatacaagaagcagaatcggagctgaaccaagcgcatcaggcacaaacccgcctcctgcaaaaagaagcacagggcgcaggcctttcacccaatctattattaatccatgctcaggaccatttaatgacagccataactgtaaaagatttggcgaaagaaatgattgatttatatcaagagcttgggaaaggaagagaaaaatga

SEQ ID NO: 2080 - protein, 110 aa, Bacillus licheniformis ATCC 14580
MADTLQLEQVSFEIILHAGNARSSAMEALQLVKHHECETGYQKIQEAESELNQAHQAQTRLLQKEAQGAGLSPNLLLIHAQDHLMTAITVKDLAKEMIDLYQELGKGREK

SEQ ID NO: 2081 - DNA, 330 bp, Bacillus licheniformis ATCC 14580
  CDS (1)..(330): transl_table=11
atgtccgaggaattggaacaaacgatatttcaaattatccttcacggaggaaacggcaggagcttttgcatggaagcgatagccgaagccaaaaagggagatttcgcagctgcaaaagaaaagatccgggcggctgacgaagaactgatcagggcgcatcactttcagacagctttgattcaaaatgaagcgaagggtgcgaaaaccgaaccttcactgctcatgattcatgcccaggatcatttaatgaatgcgatgaccatgaaagatttggccgcggagattgtcgagctctatgaaaaaatgaatatccacggaggtgtcaattga

SEQ ID NO: 2082 - protein, 109 aa, Bacillus licheniformis ATCC 14580
MSEELEQTIFQIILHGGNGRSFCMEAIAEAKKGDFAAAKEKIRAADEELIRAHHFQTALIQNEAKGAKTEPSLLMIHAQDHLMNAMTMKDLAAEIVELYEKMNIHGGVN

SEQ ID NO: 2083 - DNA, 321 bp, Bacillus cereus E33L
  CDS (1)..(321): transl_table=11
atggctgatatgcaaactccatttgcgttaattttacatggtggcaacgcgagaagtgcagcgcttgaagcaattgcttttgcaagacaaggagattttgagaatgcgagtgaaaagatgacacttgctagtgaagaaatttcagcagctcatcgcattcaaacggacttaattcaagaagaagcaagaggaaattatgcagaaatcagtttactgttagtacatgcacaagatcatttaatgaatgcaattacagtgaaagaacttgcggaagaatttattactcttcataaacgaatggaagagaaagtgatagcataa

SEQ ID NO: 2084 - protein, 106 aa, Bacillus cereus E33L
MADMQTPFALILHGGNARSAALEAIAFARQGDFENASEKMTLASEEISAAHRIQTDLIQEEARGNYAEISLLLVHAQDHLMNAITVKELAEEFITLHKRMEEKVIA

SEQ ID NO: 2085 - DNA, 324 bp, Bacillus cereus E33L
  CDS (1)..(324): transl_table=11
atgatgactacagcagaacaaattccattccaattgattttaaatagtggtaatgcacgaagctttgcaatggaggcacttcaatttgccaaacaggggaaaatggcagaggctgatgaagcgatggtaaaggcgaaagaagcgatcaatgaagcgcatcatttccaaacagagctcatacaatcagaagcaagaggagaaaaaacagagattagtgttcttttaattcacgcacaagatcatttaatgaatgcgattacagtaaaagaattagcagcagagtttattgatctttataaaaaattagaagtgaaaggggaataa

SEQ ID NO: 2086 - protein, 107 aa, Bacillus cereus E33L
MMTTAEQIPFQLILNSGNARSFAMEALQFAKQGKMAEADEAMVKAKEAINEAHHFQTELIQSEARGEKTEISVLLIHAQDHLMNAITVKELAAEFIDLYKKLEVKGE

SEQ ID NO: 2087 - DNA, 339 bp, Photobacterium profundum SS9
  CDS (1)..(339): transl_table=11
atgactttcgaaattaatactcaagaagatattactgaagaatttttaatgacactactttgcaaagcaggtgaagcacgttcagcggttatgcaagcgatgagtgaggctcgtaatggtgagtttgagcgttctgaagcaatgttagtcgctgccgaagaagcacttaccgaagtacacaaaacgcaaacaggcttaattggtttcgatgaaggtgaaggtaaggtcacgatgactcttattcttactcacattcaggatcacattatgacagctatgttatgccgcgatatggcaaatgagatcattgctattcaccgtcagctaaacaacgcatag

SEQ ID NO: 2088 - protein, 112 aa, Photobacterium profundum SS9
MTFEINTQEDITEEFLMTLLCKAGEARSAVMQAMSEARNGEFERSEAMLVAAEEALTEVHKTQTGLIGFDEGEGKVTMTLILTHIQDHIMTAMLCRDMANEIIAIHRQLNNA

SEQ ID NO: 2089 - DNA, 336 bp, Bacillus clausii KSM-K16
  CDS (1)..(336): transl_table=11
gtgagaaaagtggagaaatcgacggatataacagaggtttccttccgtatcattttgcacgctggaaatgggaaaggaagcgcgatggaagcaattcaagcggcaaaagcaggctcatttgaacaagcggacgagttaatagaagaggcaggaagagagctggccaaagcccatgaatttcagacaaatttaatccagcaagaagcaaatggagggcggacagagttaaacgtgctgctgatccattcccaagaccacttgatgacgtcgatgaccgtacgtgatttagcaattgaaatcattgaaatataccgtacgaaaaggggacttttataa

SEQ ID NO: 2090 - protein, 111 aa, Bacillus clausii KSM-K16
MRKVEKSTDITEVSFRIILHAGNGKGSAMEAIQAAKAGSFEQADELIEEAGRELAKAHEFQTNLIQQEANGGRTELNVLLIHSQDHLMTSMTVRDLAIEIIEIYRTKRGLL

SEQ ID NO: 2091 - DNA, 333 bp, Bacillus clausii KSM-K16
  CDS (1)..(333): transl_table=11
atgacggcacaacaaaagcctcttgaggaaatttcgtttcaaatcatccttcattcaggaaacgcccgttcatttgcgatggagggagtccagctagcgaaaaaaggagaatttgcagcagcgcacgaacgtctcgaacaagcagacaacgaattctaccaagcccaccatgcacaaacgaatttgctgcaaagcgaggctagaggcgatcaagttcccccttctcttttgttaatccacgcccaagaccatttaatgacatcaatgacaacgaaagagctttgtttagaaatcattgaactacacgaaaaatttgctaaggagcgtcgttaa

SEQ ID NO: 2092 - protein, 110 aa, Bacillus clausii KSM-K16
MTAQQKPLEEISFQIILHSGNARSFAMEGVQLAKKGEFAAAHERLEQADNEFYQAHHAQTNLLQSEARGDQVPPSLLLIHAQDHLMTSMTTKELCLEIIELHEKFAKERR

SEQ ID NO: 2093 - DNA, 339 bp, Bacillus clausii KSM-K16
  CDS (1)..(339): transl_table=11
atgaacgtagaggtggaaatattcaacatgatttcgaacgcaggtgatgcaaaatcgattgcttatgaagcgttaaaattagcgcaaaacaacgattttcatttagcgaatgagaaattggaaacagccaataaaacgttagcaaaagcacataatacccagacaaaattgattcaagcagaaatcaatggggagcatgtggaacagtctttattaatggtccatgcgcaagaccacttaatggcagctattagcgagatgtcattaattgaacagatgatcgccattctccgcagggtagctcaattagaagcgagatcggaaagtgagagtgtgtaa

SEQ ID NO: 2094 - protein, 112 aa, Bacillus clausii KSM-K16
MNVEVEIFNMISNAGDAKSIAYEALKLAQNNDFHLANEKLETANKTLAKAHNTQTKLIQAEINGEHVEQSLLMVHAQDHLMAAISEMSLIEQMIAILRRVAQLEARSESESV

SEQ ID NO: 2095 - DNA, 312 bp, Clostridium perfringens ATCC 13124
  CDS (1)..(312): transl_table=11
atgaaagaaataatcatggatttaataattcatagtggagaagctagaagttatgctatggaagctattcagcttgctaaagcaggagatgtagaaggggctagaagcttaatagaaaaagcatcaatacaattaggtaaagctcataaatcacaaacagctttgattcaagatgaggctagtgacaataaaatagaaatatccatgctattaattcatgcacaggatcaattgatgactactatgacattaaaagatttagcaaatgaaataatagatttgtatgaaaaattaaatcaaaaaaatttttag

SEQ ID NO: 2096 - protein, 103 aa, Clostridium perfringens ATCC 13124
MKEIIMDLIIHSGEARSYAMEAIQLAKAGDVEGARSLIEKASIQLGKAHKSQTALIQDEASDNKIEISMLLIHAQDQLMTTMTLKDLANEIIDLYEKLNQKNF

SEQ ID NO: 2097 - DNA, 357 bp, Lactobacillus gasseri
  CDS (1)..(357)
atggatgcagaaaagcaaattactaaagaagaaatttcaatgactggtttttcaattgtcgcttattcaggagatgcaagaacttacttgatgcaggcaatggataaggcaagtgaagggaaaatcactgaagcaaaggaacttgttaagaaagcagaagaatcaattaacttagctcataatgaacagactaagctcttgagtaaagaagctggaggagatgatatggatgtaaccttcattatggtccatggacaagatacattgatgaccacaatgcttttaaaggatcagatgaagacaattattaacctttatgaacgagtaaataagctcgaaggaaatagtattgaataa

SEQ ID NO: 2098 - protein, 118 aa, Lactobacillus gasseri
MDAEKQITKEEISMTGFSIVAYSGDARTYLMQAMDKASEGKITEAKELVKKAEESINLAHNEQTKLLSKEAGGDDMDVTFIMVHGQDTLMTTMLLKDQMKTIINLYERVNKLEGNSIE

SEQ ID NO: 2099 - DNA, 309 bp, Haemophilus somnus 2336
  CDS (1)..(309)
atgagtgagcaacttgaaatgcaattgatgaatttaattcttcaagcgggaatatgtcgtagtgctttaatggaagcactacaacatgctaaaaaacagcagtttgaggaagtagatagattacttaaacaggcggatgatgctttgttagcagcacatcacgctcaaacagaactcatcggacaggatgaaggtgaggggaaactacccgtcactattattatggtgcatgcacaagatcatgtaatgaatgctgttttgttaatggacatcatcaaagaatttattgagctatatcgaaaaaaataa

SEQ ID NO: 2100 - protein, 102 aa, Haemophilus somnus 2336
MSEQLEMQLMNLILQAGICRSALMEALQHAKKQQFEEVDRLLKQADDALLAAHHAQTELIGQDEGEGKLPVTIIMVHAQDHVMNAVLLMDIIKEFIELYRKK

SEQ ID NO: 2101 - DNA, 303 bp, Listeria monocytogenes str. 4b H7858
  CDS (1)..(303): transl_table=11
atggaattagaacaaacaattatgcaattaatcgtacacgggggaaacgctaaaagtgacgcaatgctagcaatcgaagcggcaaaaaaaggggattttgacgcggcagatgagcaaatcaaaagtgcagaagcagcactacttgaagcgcatcattcacaaacttcattaattcaaggggaagcacgcggcgaaaaagcagaagtatctttactactagttcacgcacaagatcacttaatgaatgctattacttttaaagatttagcaaaagaaattgttgatttataccgttctaaataa

SEQ ID NO: 2102 - protein, 100 aa, Listeria monocytogenes str. 4b H7858
MELEQTIMQLIVHGGNAKSDAMLAIEAAKKGDFDAADEQIKSAEAALLEAHHSQTSLIQGEARGEKAEVSLLLVHAQDHLMNAITFKDLAKEIVDLYRSK

SEQ ID NO: 2103 - DNA, 315 bp, Listeria monocytogenes str. 1/2a F6854
  CDS (1)..(315): transl_table=11
ttggataacaaaaatttagaagccattatggggctaatcatgcacggcggaaatgctaaaagtaatgctatggaagcaattcaagctgcgaaaaatggtgcgtttgaattagcagaagaaaaaatcagtgaagcagagcaatcaattgtggaagcacatcattcccaaacaggattactaacagaagaagcaaaaggaaatcatatggaagtaacacttcttactgtacacagccaagatcacttaatgacagccatgacatttacagatttagcgaaagagcttatcgatgtttacagaaagctgttaaaataa

SEQ ID NO: 2104 - protein, 104 aa, Listeria monocytogenes str. 1/2a F6854
MDNKNLEAIMGLIMHGGNAKSNAMEAIQAAKNGAFELAEEKISEAEQSIVEAHHSQTGLLTEEAKGNHMEVTLLTVHSQDHLMTAMTFTDLAKELIDVYRKLLK

SEQ ID NO: 2105 - DNA, 321 bp, Bacillus cereus G9241
  CDS (1)..(321): transl_table=11
atgactgatatgcaaactccatttgcgttaattttacatggtggcaacgcgagaagcgcggcacttgaagcaattgcttttgcaagacaaagagattttgagagtgcgagtgaaaagatgacacttgctagtgaagaaatttcagcagctcatcgtattcaaacggacttaattcaagaagaagcaagaggaaatcatgcagaaataagtttactgttagtgcatgcacaagatcatttaatgaatgcaattacagtgaaagaacttgcggaagaatttattactcttcataaacgagtagaagagaaagtgacagtataa

SEQ ID NO: 2106 - protein, 106 aa, Bacillus cereus G9241
MTDMQTPFALILHGGNARSAALEAIAFARQRDFESASEKMTLASEEISAAHRIQTDLIQEEARGNHAEISLLLVHAQDHLMNAITVKELAEEFITLHKRVEEKVTV

SEQ ID NO: 2107 - DNA, 321 bp, Bacillus cereus G9241
  CDS (1)..(321): transl_table=11
atgactacagcagaacaaattccattccaattaattttaaatagtggtaatgcacgaagctttgcgatggaggcacttcaatttgctaaacaggggaaaatggcagaagcggatgaagcgatggtaaaggcgaaagaagcgattaatgaagcgcatcatttccaaacagagctcatacaatcagaagcaagaggagaaaaaacagaggttagtgttcttttaatccacgcacaagatcatttaatgaatgcgattacagtaaaagaattagcagcagagtttattgacctttataaaaagttagaagcgaaaggggaataa

SEQ ID NO: 2108 - protein, 106 aa, Bacillus cereus G9241
MTTAEQIPFQLILNSGNARSFAMEALQFAKQGKMAEADEAMVKAKEAINEAHHFQTELIQSEARGEKTEVSVLLIHAQDHLMNAITVKELAAEFIDLYKKLEAKGE

SEQ ID NO: 2109 - DNA, 318 bp, Bacillus cereus G9241
  CDS (1)..(318): transl_table=11
atggatacgatagaaacgaaggcttttcatttaattttgcatgggggaaatgcgagaagttgctcaatggaagcaattgattgtgcaaagcgtggagaatttacagaagcagaagcgaaattacaagaagcgttagaggaattaaaagaggcgcaccgtgtacaaacggatctcatccagaaagaagctggtggtgaaaagactgaagttacccttctgatggtgcacgcgcaagatcatttaatgaatgcaattacggtgaaggaattagcgagtgaatttgtagagttatataggaagatgtcaatatctgaatga

SEQ ID NO: 2110 - protein, 105 aa, Bacillus cereus G9241
MDTIETKAFHLILHGGNARSCSMEAIDCAKRGEFTEAEAKLQEALEELKEAHRVQTDLIQKEAGGEKTEVTLLMVHAQDHLMNAITVKELASEFVELYRKMSISE

SEQ ID NO: 2111 - DNA, 324 bp, Bacillus cereus G9241
  CDS (1)..(324): transl_table=11
atgatgactacagcagaacaaattccattccaattaattttaaatagtggtaatgcacgaagctttgcgatggaggcacttcaatttgctaaacaggggaaaatggcagaagcggatgaagcgatggtaaaggcgaaagaagcgattaatgaagcgcatcatttccaaacagagctcatacaatcagaagcaagaggagaaaaaacagaggttagtgttcttttaatccacgcacaagatcatttaatgaatgcgattacagtaaaagaattagcagcagagtttattgacctttataaaaagttagaagcgaaaggggaataa

SEQ ID NO: 2112 - protein, 107 aa, Bacillus cereus G9241
MMTTAEQIPFQLILNSGNARSFAMEALQFAKQGKMAEADEAMVKAKEAINEAHHFQTELIQSEARGEKTEVSVLLIHAQDHLMNAITVKELAAEFIDLYKKLEAKGE

SEQ ID NO: 2113 - DNA, 318 bp, Enterococcus faecium
  CDS (1)..(318)
atggaagatcaaaaaaatctagaagccatcatgggtctgatcatgtttggcggaaatgcaaaaagcgatgcaatggaagcgattgctgctgcgaaaaaaggtgatttcactttagcagatgaaaaaatcaaagatgcagaggaatctttagtccaagcacatcactctcaaacagagatgctgacacaagaagcacaaggaaatcacgttgaagtcacgcttttgacggtccacagtcaagatcatctgatgacatctatagcttttacagatttagcaaaagagatcattgatctgtatcgtcgattgaacgcgtaa

SEQ ID NO: 2114 - protein, 105 aa, Enterococcus faecium
MEDQKNLEAIMGLIMFGGNAKSDAMEAIAAAKKGDFTLADEKIKDAEESLVQAHHSQTEMLTQEAQGNHVEVTLLTVHSQDHLMTSIAFTDLAKEIIDLYRRLNA

SEQ ID NO: 2115 - DNA, 441 bp, Enterococcus faecium
  CDS (121)..(441)
aggtattccattagatgtcatcaatatgcaagactatggcatgatgaacggagaaaaagttcttgcacaagcagaaaatctaatgaaataaatcaagtatgcagttgggggtataacaacatggaagatcaacaaaatctagaagccatcatggggttaatcatgtttggcggtaatgcaaagagcgatgcaatggaagcgattgcggctgctaaaatcggtgattttgagttagcggataggaaaatcgctgatgcagaagaatcacttatacaagcgcatcatgcacaaacagacatgttgacacaagaagcacaaggaaatcatatgcaagtgacattattgactgttcacagtcaagatcacttaatgacatctattgcgtttactgatttagcaaaagaaatcatcgaactttatcgtcgcgtatacagcgaataa

SEQ ID NO: 2116 - protein, 106 aa, Enterococcus faecium
MEDQQNLEAIMGLIMFGGNAKSDAMEAIAAAKIGDFELADRKIADAEESLIQAHHAQTDMLTQEAQGNHMQVTLLTVHSQDHLMTSIAFTDLAKEIIELYRRVYSE

SEQ ID NO: 2117 - DNA, 336 bp, Oenococcus oeni PSU-1
  CDS (1)..(336)
atggcagaagaacaacatgatgaacaactacaaacagttatgggactaattattaacggaggaaatgctaagagttcatcttttgaagctatcaatgctgctaaaaaaggtcactttacagttgctgaccaaaaattgaaggaagctgacaagttcttagttgacgctcacaattctcaaacagatatgctaactaaagaagctaatggtgatcacgctaaagttactttgctaatggtacattcacaagatcatattatgaatgctattacatttagagacttagccggagaaattgttgatctatataagaaacttgctaaagaaggagaataa

SEQ ID NO: 2118 - protein, 111 aa, Oenococcus oeni PSU-1
MAEEQHDEQLQTVMGLIINGGNAKSSSFEAINAAKKGHFTVADQKLKEADKFLVDAHNSQTDMLTKEANGDHAKVTLLMVHSQDHIMNAITFRDLAGEIVDLYKKLAKEGE

SEQ ID NO: 2119 - DNA, 324 bp, Oenococcus oeni PSU-1
  CDS (1)..(324)
atgagtgaagagattgaaaaccaaaaggtcatcatgagcctgatcatcgccggcggcaatgccaaaggagcatccttcttagccattaaggccgcaaaagaaaaagacttcaaagaagccgaactaaaactaacagaagccgatcgttttctagcccaggcccataacgcccagactgatatgttgactaaagaagcaaacggagaacacgcccaaatgtgtctgttaatggtccatgcccaggaccatgtcatgaccgcgattacctttcgtgatctggccggtgagatagttgagctgtataaaaggatcgaggataaatga

SEQ ID NO: 2120 - protein, 107 aa, Oenococcus oeni PSU-1
MSEEIENQKVIMSLIIAGGNAKGASFLAIKAAKEKDFKEAELKLTEADRFLAQAHNAQTDMLTKEANGEHAQMCLLMVHAQDHVMTAITFRDLAGEIVELYKRIEDK

SEQ ID NO: 2121 - DNA, 324 bp, Pediococcus pentosaceus ATCC 25745
  CDS (1)..(324)
atgggcgaacaagaacaaaatctagaagtgatcatgggactaattattaatggtgggaacgcaaagagctctgcatttgaagctatcaacgctgctaaagcaggagactttgaaaaagcagatgaaaaattaaaagaatctgatggttttttgactgaagctcataacgtccaaaccgggatgttaactgaagaagctaagggaaaccatgctaaagtttcactgctaacggttcattcacaagaccacatcatgaatgccattacttttagagatttagctggagaaattgttgatttatataaaaaaatggccgaaaaataa

SEQ ID NO: 2122 - protein, 107 aa, Pediococcus pentosaceus ATCC 25745
MGEQEQNLEVIMGLIINGGNAKSSAFEAINAAKAGDFEKADEKLKESDGFLTEAHNVQTGMLTEEAKGNHAKVSLLTVHSQDHIMNAITFRDLAGEIVDLYKKMAEK

SEQ ID NO: 2123 - DNA, 336 bp, Streptococcus pyogenes M49 591
  CDS (1)..(336)
atgacggaaccatccaacttagaagctattatgggcttaatcatgtatggaggcgaagccaagggcaaggccgtagaggctattcatgcagcacgagatgggcagtttgaggaggctcagcacttacttcaagaagcgacaaactcgttaaatattgcccataaatcgcagacacatttgctctcccaagaagcagctggtgatgcgattgaattgtctttattgatggtgcatgggcaagatcacatgatgactgccttagcctttattgatttagccaaggaattggttaccgtttacgacaaaatgtcagcaatacagaggggcgagtcatga

SEQ ID NO: 2124 - protein, 111 aa, Streptococcus pyogenes M49 591
MTEPSNLEAIMGLIMYGGEAKGKAVEAIHAARDGQFEEAQHLLQEATNSLNIAHKSQTHLLSQEAAGDAIELSLLMVHGQDHMMTALAFIDLAKELVTVYDKMSAIQRGES

SEQ ID NO: 2125 - DNA, 354 bp, Vibrio sp. Ex25
  CDS (1)..(354)
atgggccgcaattaccgcggcccgattttcggagagaaaatgatggaacaagaattggttgtgatggagatcatctgtaatgctggcgaagccagaagtttgagctacgaggcgttgcgtttatctagagaacaagattttgatgcggctgaggagaagctctctcaagcaagagagtgcattaacaaagcccacttaattcagactcagttgattgaggaagatcagggggaagggaaagtcccgatgacgttagtgatggtacatgctcaagatcacttaatgaccacgattttggctcaagaaatggctgtagaaatcgttgcactgaacaaaaaaatctcgaacaaataa

SEQ ID NO: 2126 - protein, 117 aa, Vibrio sp. Ex25
MGRNYRGPIFGEKMMEQELVVMEIICNAGEARSLSYEALRLSREQDFDAAEEKLSQARECINKAHLIQTQLIEEDQGEGKVPMTLVMVHAQDHLMTTILAQEMAVEIVALNKKISNK

SEQ ID NO: 2127 - DNA, 324 bp, Streptococcus suis 89/1591
  CDS (1)..(324): transl_table=11
atggaaatgattgttgcagatcaattgatcatgggattgattatttatgctggagatgcgaaaagtcacgcctaccaagctttgtcgcttgtcaaagcaggtgaagaagagcgagcagaagaggaattagaattggcagatgcagcattattagaagctcacaatatgcagacaaaattcttagcacaagaagctgggggaacaaaatctgatattacagcactatttgtccattcgcaagatcatttgatgacatctattacagagatcaatttgattaaagaaatcattgatttgcggaaagaactaaaaaaagttggctaa

SEQ ID NO: 2128 - protein, 107 aa, Streptococcus suis 89/1591
MEMIVADQLIMGLIIYAGDAKSHAYQALSLVKAGEEERAEEELELADAALLEAHNMQTKFLAQEAGGTKSDITALFVHSQDHLMTSITEINLIKEIIDLRKELKKVG

SEQ ID NO: 2129 - DNA, 315 bp, Streptococcus suis 89/1591
  CDS (1)..(315): transl_table=11
atgaatacagaagaattacaaatggctgcatttgggatcatcctcagtagtggcaatgcaagaagtgttatccacgaagcttttgctgctatgagagaaggtgattatgataaggcagaagagttattggaagccgccaatgctgacatgcttgaagcccaccattctcaaacgggtctcctacaggaatacgcaagcggtactgaagtgaaggtagagattattatggttcatgcgcaagatcatttgatgacaacaatgactttacgtgaggtagcgcttgaaatgttagctttgtatcgtaaagttggttag

SEQ ID NO: 2130 - protein, 104 aa, Streptococcus suis 89/1591
MNTEELQMAAFGIILSSGNARSVIHEAFAAMREGDYDKAEELLEAANADMLEAHHSQTGLLQEYASGTEVKVEIIMVHAQDHLMTTMTLREVALEMLALYRKVG

SEQ ID NO: 2131 - DNA, 318 bp, Photobacterium sp. SKA34
  CDS (1)..(318): transl_table=11
atgaataaagatcaatacgaagaatttgtaatgagtctgatagttcaagccggtcagactagaagtatgttaatgacagccattcgagaagctaaaaatggcaattttgatgaagccgattctcttgttaaaaatgcaagtctatcgttaaaagaagcacatcaaattcaaacaaaactcattgaatatgatgagggtgaaggaaagttaccagtgcatatcgttatggttcatgcacaagaccacctaatgaatgctgtcttaatgatggatctagccactgagataattgatttaagaaaaacagtatctcagtaa

SEQ ID NO: 2132 - protein, 105 aa, Photobacterium sp. SKA34
MNKDQYEEFVMSLIVQAGQTRSMLMTAIREAKNGNFDEADSLVKNASLSLKEAHQIQTKLIEYDEGEGKLPVHIVMVHAQDHLMNAVLMMDLATEIIDLRKTVSQ

SEQ ID NO: 2133 - DNA, 327 bp, Photobacterium sp. SKA34
  CDS (1)..(327): transl_table=11
atggaaaacattgacttagaagaacaggtgatgggtattattatcaatgcagggcaatcacgcagtctttgttacgaagcacttcgtcatgcaaaaagtggcaacttctcagaggtggatagtttattaaaagaggctcaagaatttgccaatcaagcacatcttgttcagacaaagcttattgaagccgatgaaggaactggcaaaacaaaaatgaccttaataatggttcacgcacaagatcacttgatgacatcaatgctagcaaaagaactggtcactgagatgattgaacttcacaaaaaagtggcaaaacaagcggcttaa

SEQ ID NO: 2134 - protein, 108 aa, Photobacterium sp. SKA34
MENIDLEEQVMGIIINAGQSRSLCYEALRHAKSGNFSEVDSLLKEAQEFANQAHLVQTKLIEADEGTGKTKMTLIMVHAQDHLMTSMLAKELVTEMIELHKKVAKQAA

SEQ ID NO: 2135 - DNA, 336 bp, Lactobacillus rhamnosus
  CDS (1)..(336): transl_table=11
atggcgacgagagaagagatttcgatggttgggtttgcacttgtggcttatgcaggggatgctcggactgcggctttgcgtgctttgaatgctgcagaagcgggtgactttgaaggagccgaggccaaacttgacgaagcgcaaaaagatattaatgaagcacataatcaacagacgcaattgttaagccaagaagcaggcggagcggaaatggatgtgacttttatcatggtgcatgggcaggatacgttaatgaccaccatgttgcttattgatcagtctcgttacatgattcgaatgcttaaacgtatcaagcaactcgaagacaagcaataa

SEQ ID NO: 2136 - protein, 111 aa, Lactobacillus rhamnosus
MATREEISMVGFALVAYAGDARTAALRALNAAEAGDFEGAEAKLDEAQKDINEAHNQQTQLLSQEAGGAEMDVTFIMVHGQDTLMTTMLLIDQSRYMIRMLKRIKQLEDKQ

SEQ ID NO: 2137 - DNA, 318 bp, Lactococcus lactis
  CDS (1)..(318): transl_table=11
gtgaacagagaagagatgactctcttggggtttgaaattgttgcttatgctggagatgctcgctccaaacttttagaagcgcttaaagcggctgaaaatggtgatttcgctaaggcagatagtcttgtagtagaagcaggaagttgcattgcagaggctcacaattctcagacagctatgttggctcgagaagcttctggggaggaacttccatacagtgttactatgatgcatggtcaggatcacttgatgactacgatcttattaaaagatgtgattcatcacctcatcgaactttataaaagaggagcaaagtaa

SEQ ID NO: 2138 - protein, 105 aa, Lactococcus lactis
MNREEMTLLGFEIVAYAGDARSKLLEALKAAENGDFAKADSLVVEAGSCIAEAHNSQTAMLAREASGEELPYSVTMMHGQDHLMTTILLKDVIHHLIELYKRGAK

SEQ ID NO: 2139 - DNA, 327 bp, Pectobacterium carotovorum subsp
  CDS (1)..(327): transl_table=11
atgctcgatgaaaccacgataatggaattgattatttatgcgggagaggcgcgctccagctcaatggaggcgctgagcgccgccagaaaatatgactgggacaaggctgaagaactgctgaacgcggcttctgtggcggcgcgcaaagcccatcaaatccagactgctttgattggtgccgatgagggcagcggaaaaatcccgatcaatctgattttggttcacgcgcaagatcacctgatgaacgcgatgctatgccgtgaactggtggaggagctgattcaactgcatcgggaaatctcctccctgaaacagcttataaattaa

SEQ ID NO: 2140 - protein, 108 aa, Pectobacterium carotovorum subsp
MLDETTIMELIIYAGEARSSSMEALSAARKYDWDKAEELLNAASVAARKAHQIQTALIGADEGSGKIPINLILVHAQDHLMNAMLCRELVEELIQLHREISSLKQLIN

SEQ ID NO: 2141 - DNA, 333 bp, Bacillus pumilus
  CDS (1)..(333): transl_table=11
atggaaaagaaaacactcgaagggctcacggaggaacaagtgagctttcaattgatcttacacagcgggaatgcacgcagcaaattgcttcaggctctaaaacaatatcgagaaggtctagaagaagaagcttttgatcttatgaaagaagcggaagaagatttacggcttgcacatgacatccattttcaactcgtgcagaaagaggcaggcggagaaagggcatccttttccttactgctcatgcacgctgaagatcacttaatgtcgaccattaccatcaaggagcttgtgggagagctcctgccgatattccaatcgcttaaacaataa

SEQ ID NO: 2142 - protein, 110 aa, Bacillus pumilus
MEKKTLEGLTEEQVSFQLILHSGNARSKLLQALKQYREGLEEEAFDLMKEAEEDLRLAHDIHFQLVQKEAGGERASFSLLLMHAEDHLMSTITIKELVGELLPIFQSLKQ

SEQ ID NO: 2143 - DNA, 327 bp, Bacillus stearothermophilus
  CDS (1)..(327): transl_table=11
atgcaaacgtatgaacaaactgtattccaactgattcttcatggcggaaacggccgcagttatgcaatggaggcgattacggcggcgaaaaaaggggaatttgccgaggcgcgcaggctgcttgaacaggcgggagcagaactgcaggcggcccatgggctgcagaccgcgttgctgcaacaagaagcgagcggcgggcagccggtggtgacgcttctgatggtgcatgcccaagatcatttaatgacggcgatcacggtcaaggatttagccgctgaattcgtggagctgtatgaagcgctcaagcggcaaacaaccgaatcataa

SEQ ID NO: 2144 - protein, 108 aa, Bacillus stearothermophilus
MQTYEQTVFQLILHGGNGRSYAMEAITAAKKGEFAEARRLLEQAGAELQAAHGLQTALLQQEASGGQPVVTLLMVHAQDHLMTAITVKDLAAEFVELYEALKRQTTES

SEQ ID NO: 2145 - DNA, 333 bp, Bacillus subtilis
  CDS (1)..(333): transl_table=11
gtgaatgaggaaatggaacaaatcatttttcaaatcatccttcacggaggaaacggtaggagctccgcaatggaggccattgccgctgcgaaaagcggtgacgcagaagaagcgcggaaaaagcttcaagacgctgctgaagaattgtcaaaagcccatcattatcagacagagctgatccaaaatgaagcgggcggagaaaagacggaaatgacgcttctgatggttcatgcacaggatcatttaatgaatgcaatgacagtgaaggatatggctgcagagatcattgagttatatgaaaaaatcaccgagcaaaggggagcaagcatatga

SEQ ID NO: 2146 - protein, 110 aa, Bacillus subtilis
MNEEMEQIIFQIILHGGNGRSSAMEAIAAAKSGDAEEARKKLQDAAEELSKAHHYQTELIQNEAGGEKTEMTLLMVHAQDHLMNAMTVKDMAAEIIELYEKITEQRGASI

SEQ ID NO: 2147 - DNA, 339 bp, Lactobacillus casei
  CDS (1)..(339): transl_table=11
atgatggctactaaagaagaaatttcaatggttggttttgcacttgtggcgtatgcaggcgatgctcgaacggctgctgtgcatgcacttgatgccgctgaagcaggcgatttcgataaggcaaacgaattggttgagaaggcccaacaggatatcaatgaagcccacaaccaacagacccagcttctaagtcaagaagctggcggtgctgaaatggatgtcacctttatcatggttcatggtcaagatacgttgatgacaaccatgttgctcattgatgaaacacgctacatgattcgcatgtttaagcggatcaaagaacttgagaacaagcagtaa

SEQ ID NO: 2148 - protein, 112 aa, Lactobacillus casei
MMATKEEISMVGFALVAYAGDARTAAVHALDAAEAGDFDKANELVEKAQQDINEAHNQQTQLLSQEAGGAEMDVTFIMVHGQDTLMTTMLLIDETRYMIRMFKRIKELENKQ

SEQ ID NO: 2149 - DNA, 318 bp, Lactococcus lactis subsp
  CDS (1)..(318): transl_table=11
gtgaacagagaagagatgactctcttagggtttgaaattgttgcttatgctggagatgctcgctctaagcttttagaagcgcttaaagcggctgaaaatggtgatttcgctaaggcagatagtcttgtagtagaagcaggaagctgtattgcagaggctcacagttctcagacaggtatgttggctcgagaagcttctggggaggaacttccatacagtgttactatgatgcatggtcaggatcacttgatgactacgatcttattaaaagatgtgattcatcacctcatcgaactttataaaagaggagcaaagtaa

SEQ ID NO: 2150 - protein, 105 aa, Lactococcus lactis subsp
MNREEMTLLGFEIVAYAGDARSKLLEALKAAENGDFAKADSLVVEAGSCIAEAHSSQTGMLAREASGEELPYSVTMMHGQDHLMTTILLKDVIHHLIELYKRGAK

SEQ ID NO: 2151 - DNA, 24 bp, Artificial sequence
  primer
atgatggatctcgataacattccc

SEQ ID NO: 2152 - DNA, 25 bp, Artificial sequence
  primer
ttatgccttcagtttttcatgaagc

SEQ ID NO: 2153 - protein, 86 aa, Artificial sequence
  consensus sequence
  Variant (2)..(4): Xaa in position 2 to 4 is any amino acid
  Variant (6)..(6): Xaa in position 6 is any amino acid
  Variant (8)..(8): Xaa in position 8 is any amino acid
  Variant (10)..(13): Xaa in position 10 to 13 is any amino acid
  Variant (15)..(17): Xaa in position 15 to 17 is any amino acid
  Variant (19)..(25): Xaa in position 19 to 25 is any amino acid
  Variant (27)..(39): Xaa in position 27 to 39 is any amino acid
  Variant (42)..(43): Xaa in position 42 to 43 is any amino acid
  Variant (46)..(63): Xaa in position 46 to 63 is any amino acid
  Variant (64)..(64): Xaa in position 64 is any or no amino acid
  Variant (66)..(66): Xaa in position 66 is any amino acid
  Variant (72)..(78): Xaa in position 72 to 78 is any amino acid
  Variant (80)..(81): Xaa in position 80 to 81 is any amino acid
  Variant (83)..(85): Xaa in position 83 to 85 is any amino acid
IXXXGXAXSXXXXAXXXAXXXXXXXAXXXXXXXXXXXXXAHXXQTXXXXXXXXXXXXXXXXXXXHXQDHLMXXXXXXXLXXEXXXL

SEQ ID NO: 2154 - protein, 24 aa, Artificial sequence
  protein pattern
  Variant (2)..(2): Xaa in position 2 is any amino acid
  Variant (3)..(4): Xaa in position 3 to 4 is any or no amino acid
  Variant (6)..(6): Xaa in position 6 is Ala, Gly or Ser
  Variant (10)..(10): Xaa in position 10 is Phe, Ile, Leu, Met or Val
  Variant (12)..(12): Xaa in position 12 is Ala, Asn or Thr
  Variant (13)..(13): Xaa in position 13 is Ala, Ser, Thr or Val
  Variant (14)..(14): Xaa in position 14 is Phe, Ile, Leu or Met
  Variant (15)..(17): Xaa in position 15 to 17 is any amino acid
  Variant (18)..(18): Xaa in position 18 is Asp, Glu, Asn or Ser
  Variant (19)..(19): Xaa in position 19 is Leu or Met
  Variant (20)..(22): Xaa in position 20 to 22 is any amino acid
  Variant (23)..(23): Xaa in position 23 is Phe, Ile, Leu, Met or Val
  Variant (24)..(24): Xaa in position 24 is Ile, Leu or Val
LXXXHXQDHXMXXXXXXXXXXXXX

SEQ ID NO: 2155 - protein, 46 aa, Artificial sequence
  protein pattern
  Variant (2)..(2): Xaa in position 2 is Asp, Glu, Asn, Gln or Ser
  Variant (3)..(3): Xaa in position 3 is Ala, Gly, Ser or Thr
  Variant (4)..(4): Xaa in position 4 is any amino acid
  Variant (5)..(5): Xaa in position 5 is Ala, Gly, Gln, Ser or Thr
  Variant (6)..(9): Xaa in position 6 to 9 is any amino acid
  Variant (11)..(11): Xaa in position 11 is Ile, Leu, Met or Val
  Variant (12)..(13): Xaa in position 12 to 13 is any amino acid
  Variant (15)..(19): Xaa in position 15 to 19 is any amino acid
  Variant (20)..(21): Xaa in position 20 to 21 is any or no amino acid
  Variant (23)..(35): Xaa in position 23 to 35 is any amino acid
  Variant (36)..(37): Xaa in position 36 to 37 is any or no amino acid
  Variant (40)..(41): Xaa in position 40 to 41 is any amino acid
  Variant (44)..(44): Xaa in position 44 is any amino acid
  Variant (45)..(45): Xaa in position 45 is Phe, Leu or Met
  Variant (46)..(46): Xaa in position 46 is Ile or Leu
GXXXXXXXXAXXXAXXXXXXXAXXXXXXXXXXXXXXXAHXXQTXXX

SEQ ID NO: 2156 - DNA, 639 bp, Escherichia coli K12
  CDS (1)..(639): transl_table=11
gtgttcgctgaatacggggttctgaattactggacctatctggttggggccatttttattgtgttggtgccagggccaaataccctgtttgtactcaaaaatagcgtcagtagcggtatgaaaggcggttatcttgcggcctgcggtgtatttattggcgatgcggtattgatgtttctggcatgggctggagtggcgacattaattaagaccaccccgatattattcaacattgtacgttatcttggtgcgttttatttgctctatctggggagtaaaattctttacgcgaccctgaagggtaaaaatagcgaggccaaatccgatgagccccaatacggtgctatttttaaacgcgcgttaattttgagcctgactaatccgaaagccattttgttctatgtgtcgtttttcgtacagtttatcgatgttaatgccccacatacgggaatttcattctttattctggcggcgacgctggaactggtgagtttctgctatttgagcttcctgattatatctggtgcttttgtcacgcagtacatacgtaccaaaaagaaactggctaaagttggcaactcactgattggtttgatgttcgtgggtttcgctgcccgactggcgacgctgcaatcctga

SEQ ID NO: 2157 - protein, 212 aa, Escherichia coli K12
MFAEYGVLNYWTYLVGAIFIVLVPGPNTLFVLKNSVSSGMKGGYLAACGVFIGDAVLMFLAWAGVATLIKTTPILFNIVRYLGAFYLLYLGSKILYATLKGKNSEAKSDEPQYGAIFKRALILSLTNPKAILFYVSFFVQFIDVNAPHTGISFFILAATLELVSFCYLSFLIISGAFVTQYIRTKKKLAKVGNSLIGLMFVGFAARLATLQS

SEQ ID NO: 2158 - DNA, 639 bp, Salmonella typhimurium LT2
  CDS (1)..(639): transl_table=11
gtgttcgcggagtatggtgttctgaattattggacgtacctggttggggcgatttttatcgttctggtaccggggccgaatacgctttttgtgcttaaaaacagcgtgggacgcggggttaaaggaggatatcttgccgcatgcggcgtgtttatcggcgatgcgatattaatgtttctggcgtatgcgggcgtggcgacgctgatcaaaacaacgccggttctgtttaacattgttcgctatctcggcgcgttttatctgctctaccttggcgcaaaaatcctttacgccacgctgacctcaaaagggcgtgcggcgacggaaacggtagttccttttggcgctatttttaagcgtgctttaattcttagcctgacgaatcctaaagccatacttttttatgtttccttttttgtgcaatttattgacgttactgcgccgcatactggggtgtcattttttattttggccaccacccttgaaatcgtcagtttttgctatctgagctttttaattctttctggcgcttttgtaacccactatattggtaccaaaaagaaactggcaaaagtgggcaattctttgattggccttcttttcgtcggatttgccgcccggctggcaacgctccagtcttaa

SEQ ID NO: 2159 - protein, 212 aa, Salmonella typhimurium LT2
MFAEYGVLNYWTYLVGAIFIVLVPGPNTLFVLKNSVGRGVKGGYLAACGVFIGDAILMFLAYAGVATLIKTTPVLFNIVRYLGAFYLLYLGAKILYATLTSKGRAATETVVPFGAIFKRALILSLTNPKAILFYVSFFVQFIDVTAPHTGVSFFILATTLEIVSFCYLSFLILSGAFVTHYIGTKKKLAKVGNSLIGLLFVGFAARLATLQS

SEQ ID NO: 2160 - DNA, 663 bp, Ralstonia solanacearum GMI1000
  CDS (1)..(663): transl_table=11
atgttcgcccacttcggcatcatcgagttctggaccttcctgctcggcacgatcttcatcgtgctgctgccggggccgaactcgatgtacgtgctgtcggtggcggcccgccgcggtgtgcgcgcaggctaccagggcgcgtgcggcgtgttcctgggcgatgccatcctgatggtgctgtcggcggcgggcgtgtcgtcgctgctcaaggcgagtccggtgctgttctacgtcgtgaagtccatcggcgcggcgtacctggcgtggatcggcctgcagatgctgcgcggcgcggtgcgcaactggcgcgcgcgcaaggcgggcgggtcggccgagcagaacgcggcccggggcgacgaatcgcatccgttcaagaaggcgctggtcatcagcctgctgaacccgaaggcgatcctgttcttcatctcgttcttcatccagttcgtcgatccgcacttcgcgctgccggcgctgtcgttcgtcgtgctggggctggtctgccagatcggcagcttcctgtatctgaccaccatcatcttcgtgggcgcgcggctggccgcggcgttccgcgcgcgacgacgcctggctgccggcatgagcagcggcgtcggcgccatgtttatcggcttttccgccaagctggcgacggccacactgaattaa

SEQ ID NO: 2161 - protein, 220 aa, Ralstonia solanacearum GMI1000
MFAHFGIIEFWTFLLGTIFIVLLPGPNSMYVLSVAARRGVRAGYQGACGVFLGDAILMVLSAAGVSSLLKASPVLFYVVKSIGAAYLAWIGLQMLRGAVRNWRARKAGGSAEQNAARGDESHPFKKALVISLLNPKAILFFISFFIQFVDPHFALPALSFVVLGLVCQIGSFLYLTTIIFVGARLAAAFRARRRLAAGMSSGVGAMFIGFSAKLATATLN

SEQ ID NO: 2162 - DNA, 768 bp, Pseudomonas putida KT2440
  CDS (1)..(768): transl_table=11
atggccgcggaatcatacagactccaggcattggatccaagccgcgcttggcacaggttctttgcaactgtgcaacaacaggttgaaaagcgcgcctttggcgacgatagttcagagcactgccttcgcaatgcccaacaggaactcaccatgcttggcgtcaccgactacggcgcattcgtcatcgccttcctcattcttctggccatccccggcccgggcaatttcgccctgatcaccgccaccggcaagggcggtatcaaggcaggcctggccgcgacctgtggcgtgatcgtgggtgaccaggtgctgctgtggctggcggtagccggtgtcgccaccctgctggccacctaccctgccgcctttcatatggtgcagtgggcgggggctgcatacctggcatacctgggcctgcgcatgctgctgagcaaacccggtggtgcagcacacacctgccgcatggacaacggccagtacctgcgccagaccatgatgatcaccctgctcaaccccaaggcgatcatgttctacatggcgtttttcccgctgttcgtcgacccggtgaagcaccaagggctggtgacgttcggtttcatggcggcgacagtggcggtggtgaccttcctgtatgggctgattgccgtggtgctgacccatcaactggccgagcgcatgcgcgccagcccgcgaattgccaatatgttcgagcggctggcgggggcttgcctggtgggattcggcatcaaactggcggcgatgcgctga

SEQ ID NO: 2163 - protein, 255 aa, Pseudomonas putida KT2440
MAAESYRLQALDPSRAWHRFFATVQQQVEKRAFGDDSSEHCLRNAQQELTMLGVTDYGAFVIAFLILLAIPGPGNFALITATGKGGIKAGLAATCGVIVGDQVLLWLAVAGVATLLATYPAAFHMVQWAGAAYLAYLGLRMLLSKPGGAAHTCRMDNGQYLRQTMMITLLNPKAIMFYMAFFPLFVDPVKHQGLVTFGFMAATVAVVTFLYGLIAVVLTHQLAERMRASPRIANMFERLAGACLVGFGIKLAAMR

SEQ ID NO: 2164 - DNA, 654 bp, Streptomyces avermitilis MA-4680
  CDS (1)..(654): transl_table=11
atgtttggtgtcaccgatctccccacctacctcgcaggccttgtcctgatcgtcctgctccccggtccgaactcgctgtacgtgttgtccgtcgccgcccgcaagggcgtacgcgccggatacacggcagccgcgggcgtctggtgcggtgacaccgtgctgatgacgctgtccgcggccggagtcgcctcgctgctccaggcgaacgccctgctgttcgggatcgtgaagtacgccggggccgggtatctgacctggctcgcgttcggcatgctgcgggccgcgtgggagatgtggcggacccgccgggaccgggcggacgcggcccgggcacccgtcgcgccggtcgccggagagcggcccttccggcgggcgttcgtcgtcagcctcttcaacccgaaggcgatcctgttcttcgtcgccttcttcgttcagttcgtcgacccggggtacgcctacccggccctgtccttcgtcgtcctcggcgccttcgcccagctggcgagcttcctgtacctcaccgcgctgatcttcagcggcacgaagctggcggccgccttccgccgacgcaagcggctctccgcgggggccacgaccgccgcgggcgccctcttcctgggcttcgccgtgaagctgacactggccggcgcctag

SEQ ID NO: 2165 - protein, 217 aa, Streptomyces avermitilis MA-4680
MFGVTDLPTYLAGLVLIVLLPGPNSLYVLSVAARKGVRAGYTAAAGVWCGDTVLMTLSAAGVASLLQANALLFGIVKYAGAGYLTWLAFGMLRAAWEMWRTRRDRADAARAPVAPVAGERPFRRAFVVSLFNPKAILFFVAFFVQFVDPGYAYPALSFVVLGAFAQLASFLYLTALIFSGTKLAAAFRRRKRLSAGATTAAGALFLGFAVKLTLAGA

SEQ ID NO: 2166 - DNA, 651 bp, Chromobacterium violaceum ATCC 12472
  CDS (1)..(651): transl_table=11
atgttgggcattaccgaccttaccacctacctgatcggcacgctgatcgtgatcctgctgccgggcccgaacgccatgtacgtgttgtcggtggcggcgcagcgcggcaagcgcgcgggcttcgccgccgccggcggcgtggtcagcggcgacttcatcctgatgacgctggcggccaccggcgcggccggcctgctgcaggccaacccggcgttgttcgcggtggtcaagtacatcggcggcggctacctggcctggctgggcgtcaacatgctgaagtccggcatcctggcctggcgccgcgcgcgccgcggcgacgagtcgccgacgaggccgtcggcgctgtccggcggccatccttaccgcaaggcgctgctgatcagcctgatgaacccgaaggccatcctgttcttcgtgtccttcttcgtgcagttcgtcgatccggtctacccgcatccggcggtcaccttcgccgcgctgggcgccatcgtccagtgctgcagcatcgccaacctgtcgatgctgatcctgctgggcgacaagctggccgcggccttccgccgccgccgcaagctgacggcggcgctgggcggctcggtgggcgcggttttcgtcgggttcggggccaagctggcggcggccagcctgtaa

SEQ ID NO: 2167 - protein, 216 aa, Chromobacterium violaceum ATCC 12472
MLGITDLTTYLIGTLIVILLPGPNAMYVLSVAAQRGKRAGFAAAGGVVSGDFILMTLAATGAAGLLQANPALFAVVKYIGGGYLAWLGVNMLKSGILAWRRARRGDESPTRPSALSGGHPYRKALLISLMNPKAILFFVSFFVQFVDPVYPHPAVTFAALGAIVQCCSIANLSMLILLGDKLAAAFRRRRKLTAALGGSVGAVFVGFGAKLAAASL

SEQ ID NO: 2168 - DNA, 651 bp, Acinetobacter sp. ADP1
  CDS (1)..(651): transl_table=11
gtgtttggcataacagatctaacaacttacatcgttggtactttgttaattgtgttgttaccaggcccaaattcgatttatgtgatgtcgattgcctctcgctacggtattagaacaggttatcgtggcgcgttcggggtttttacaggcgatagcattttaataattgccacagttttaggtgctgcatcgctgatgaataccttcccctggatctttacaaccttaaaaattgtgggggcactttatctttcctatcttggatttaaacttttatatgcgagttatattcgctggaacaatgcaccagcccaagatatcgaaatggcagacctaccacaacttgatcaaattcatccttatcgaactgctttaggcattagcttactaaaccctaaagcaatcctgttttttttatctttttttgtgcaattcgttgatcctgtatatccatatcctgcgctgagctttgtttcacttgcgctgatattgcaatgtattagttttggttatttaactacacttattttctctggcgtaaaactttcgagtttttttaaaaccagacataagatttccgcaatgagtatttgcttggttggatttctattttttgggtttggcttaaaactcgccacttccagcttataa

SEQ ID NO: 2169 - protein, 216 aa, Acinetobacter sp. ADP1
MFGITDLTTYIVGTLLIVLLPGPNSIYVMSIASRYGIRTGYRGAFGVFTGDSILIIATVLGAASLMNTFPWIFTTLKIVGALYLSYLGFKLLYASYIRWNNAPAQDIEMADLPQLDQIHPYRTALGISLLNPKAILFFLSFFVQFVDPVYPYPALSFVSLALILQCISFGYLTTLIFSGVKLSSFFKTRHKISAMSICLVGFLFFGFGLKLATSSL

SEQ ID NO: 2170 - DNA, 663 bp, Burkholderia mallei ATCC 23344
  CDS (1)..(663): transl_table=11
atgttcggtcacgcactcggcatcacggatctctggacctatgtgttcggcgtggtgttcatcattctgctgccggggccgaactcgatgtacgtgctgtcgctcgccgcgcagcgcggcgtgaaggccggctatcgcgccgcgtgcggcgtgttcgtcggcgacaccgtgctgatggtgctgtccgccgcgggcgtcgcgtcgctgctgaaggcgaatccgctgctgttctcggtcgtcaagtacggcggcgccgcctacctgctgtacatcggcgtcggcatgctgcgcggcgcgtggcgcaagctcgcgcggcccgccgcggacgcgggcgccgacgtgcggcgcgcggtcgacggcgagcggccgtttcgcaaggcgctcgtcgtgagcctcctgaacccgaaggcgatcctgttcttcatctcgttcttcatccagttcgtcgatccggcctacgcgcatccggcgctgtcgttcgtcgtgctgggcgcgatcgcgcagctcgcgagcttcgtctacctgagcacgctgatctttacgggcgcgcgtctcgccgaccacttccggcgccgccgcaagctcgcggcgggcgcctcgggcggcgtgggcggcctgttcgtcggcttttccgtgaagctcgcgctcgcgacgatgagctga

SEQ ID NO: 2171 - protein, 220 aa, Burkholderia mallei ATCC 23344
MFGHALGITDLWTYVFGVVFIILLPGPNSMYVLSLAAQRGVKAGYRAACGVFVGDTVLMVLSAAGVASLLKANPLLFSVVKYGGAAYLLYIGVGMLRGAWRKLARPAADAGADVRRAVDGERPFRKALVVSLLNPKAILFFISFFIQFVDPAYAHPALSFVVLGAIAQLASFVYLSTLIFTGARLADHFRRRRKLAAGASGGVGGLFVGFSVKLALATMS

SEQ ID NO: 2172 - DNA, 684 bp, Ralstonia eutropha JMP134
  CDS (1)..(684): transl_table=11
atgaacgccttcatgcataccgccttcggcatcaccgatttctggacctatgtgctgggcacgatcttcatcgtgctgctgccggggccgaactcgatgtatgtgctgtccgtggcggcgcagcgcggtgttcgcgcgggctacaagggtgcgtgcggcgttttccttggcgatgcggtgctgatggtgctgtcggccgcgggcgtggcctcgctgctcaaggcaagccccgcactgttctacgtggtgaagtacatcggcgcggcctacctcggctggatcgggttcaacatgctgcgcggcgcggtccgtaactggacgagcgccggcaagacggagcgggctgcggcggaagccgccgttgccgcgccggcggaccagtccaacgcgttccgcaaggcgctggtcatcagcctgatgaaccccaaggccatcctgttcttcatctcgttcttcatccagttcgtcgatccgggcttcggctatgcggcgctgtcgttcctggcgctgggcgtggtcgtgcagatattcagcttcctgtacctgacgacgctgatcttcgtcggtgtgaagctggccgccgcgttccgccgccgccgacgcctgtcggcaggcgtgtcgagcggcgtgggcgccatgttcatcggcttcggcgcgaagctggcgacggccaccctgagctga

SEQ ID NO: 2173 - protein, 227 aa, Ralstonia eutropha JMP134
MNAFMHTAFGITDFWTYVLGTIFIVLLPGPNSMYVLSVAAQRGVRAGYKGACGVFLGDAVLMVLSAAGVASLLKASPALFYVVKYIGAAYLGWIGFNMLRGAVRNWTSAGKTERAAAEAAVAAPADQSNAFRKALVISLMNPKAILFFISFFIQFVDPGFGYAALSFLALGVVVQIFSFLYLTTLIFVGVKLAAAFRRRRRLSAGVSSGVGAMFIGFGAKLATATLS

SEQ ID NO: 2174 - DNA, 660 bp, Burkholderia sp. 383
  CDS (1)..(660): transl_table=11
atgttcggccacgcactcggcatcacggatatctggacctacgtgttcggcgtgatcttcatcatcctgctgccggggccgaactcgatgtacgtgctgtcgctcgcggcgcagcgcggcgtgaaggccggctatcgcgcggcgtgcggcgtgttcgtcggcgacacggtgctgatggtgctgtcggccgccggcgtcgcgtcgctgctgaaggcgaacccgctgctgttctccgtcgtgaaatacggcggcgccgcgtatctgctctacatcggcaccggcatgctgcgcagcgcgtggcagaagctgcgcgcgccggcccatgcgccggtcgatgcgccgcccgcggtcgacggcgagcggccgttccgcaaggcgctgatcgtgagcctgctgaatccgaaggcgatcctgttcttcatctcgttcttcatccagttcgtcgacccggcattcccgcatcctgcgctgtcgttcgtcgtgctcggggcgatcgcgcaaagcgcgagcttcctgtacctgagcacgctgatcttcgcgggtgcgcggcttgccgagcacttccgccgccgccgcaagcttgcagcaggcgcggcgagcagcgtgggcggcctgttcatcggattctcggtgaagctcgcgctcgccacgatgagttga

SEQ ID NO: 2175 - protein, 219 aa, Burkholderia sp. 383
MFGHALGITDIWTYVFGVIFIILLPGPNSMYVLSLAAQRGVKAGYRAACGVFVGDTVLMVLSAAGVASLLKANPLLFSVVKYGGAAYLLYIGTGMLRSAWQKLRAPAHAPVDAPPAVDGERPFRKALIVSLLNPKAILFFISFFIQFVDPAFPHPALSFVVLGAIAQSASFLYLSTLIFAGARLAEHFRRRRKLAAGAASSVGGLFIGFSVKLALATMS

SEQ ID NO: 2176 - DNA, 660 bp, Burkholderia thailandensis E264
  CDS (1)..(660): transl_table=11
atgttcggtcacgcactcggcatcacggatctctggacctacgtgttcggcgtggtgttcatcattctgctgccggggccgaactcgatgtacgtgctgtcgctcgccgcgcagcgcggtgtgaaggccggctaccgcgccgcgtgcggcgtgttcgtgggcgacaccgtgctgatggtgctgtccgccgcgggcgtcgcgtcgctcctgaaggcgaacccgttgctgttctcggtcgtcaagtacggcggcgccgcatacctgctgtacatcggcgcaggcatgctgcgcggcgcgtggcgaaagctcgcgcggcccgcggacgcgggcgccgacgtgcggcgcgcggtcgacggcgagcggccgtttcgcaaggcgctcgtcgtgagcctcctgaatccgaaggcgatcctgttcttcatctcgttcttcatccagttcgtcgatccgtcctacgcgcatccggcgctgtcgttcgtcgtgctgggcgcgatcgcgcaattcgcgagcttcgtctatctgagcacgctgatcttcacgggcgcgcgcctcgccgatcatttccgtcgccgccgcaagctcgcggccggcgcgtcgggcggcgtgggcggcctgttcgtcggcttttccgtgaagctcgcgctcgcgacgatgagctga

SEQ ID NO: 2177 - protein, 219 aa, Burkholderia thailandensis E264
MFGHALGITDLWTYVFGVVFIILLPGPNSMYVLSLAAQRGVKAGYRAACGVFVGDTVLMVLSAAGVASLLKANPLLFSVVKYGGAAYLLYIGAGMLRGAWRKLARPADAGADVRRAVDGERPFRKALVVSLLNPKAILFFISFFIQFVDPSYAHPALSFVVLGAIAQFASFVYLSTLIFTGARLADHFRRRRKLAAGASGGVGGLFVGFSVKLALATMS

SEQ ID NO: 2178 - DNA, 672 bp, Ralstonia metallidurans CH34
  CDS (1)..(672): transl_table=11
atgaacgccttcatgcatgccaacctcggcatcactgatttctggacctttgtgctcggtacgatcttcatcgtactgctgccggggccgaattcgatgtatgtgctgtcggtggccgcgcagcgcggtgtgcgcgccggctacaagggggcatgcggcgttttcctcggcgatgcgatcctgatggtgctgtcggccgctggcgtggcatcgctgctgaaggccagcccggggctgttccacgtcgtcaagtacgtgggtgcggcatacctggcctggatcggcttccagatgctgcgtggcgcggtgcgtaactggtcggcgcaagccgatgtcgccacgaacgcggttgcgtcgctggatcgcgcgtcgaacccgttcagcaaggcgctgttcatcagcctgctgaacccgaaggccatcctgttcttcatctcgttcttcatccagttcgtggacccgcagttcgtcgttccggcgctgtcgttcgtggcgctgggcctggtctgccagatctgcagcttcgcctacctgaccacgatcatcttcgtgggcgcaaggctggccgatgcgttccgccgccgccgacgcctgtccgcaggtatgtcgagcggggtcggggcgatgttcatcggcttcggcgccaagctggccacggccacactgggctga

SEQ ID NO: 2179 - protein, 223 aa, Ralstonia metallidurans CH34
MNAFMHANLGITDFWTFVLGTIFIVLLPGPNSMYVLSVAAQRGVRAGYKGACGVFLGDAILMVLSAAGVASLLKASPGLFHVVKYVGAAYLAWIGFQMLRGAVRNWSAQADVATNAVASLDRASNPFSKALFISLLNPKAILFFISFFIQFVDPQFVVPALSFVALGLVCQICSFAYLTTIIFVGARLADAFRRRRRLSAGMSSGVGAMFIGFGAKLATATLG

SEQ ID NO: 2180 - DNA, 615 bp, Rubrivivax gelatinosus PM1
  CDS (1)..(615)
atgctcggagtggccgattacggcgcgttcgtcgtcacggtgatcgttttcctggcgatcccgggcccgggcaatctggcgctgatcacctccaccggcaagggcgggctgcgcggcggcttcgctgcgacgctgggcgtcatcgccggcgaccagttgctgatgtggctggcggtggccggtgtggccgcgctgttgcaggccgccccggtggtgttcggcgcggtgcagtgggtgggcgccgcctacctggcctacatcggctggcggctgatcaccagccggcccggtgatgcaccggtgctgcagatcctgccgcggcactacttccgccaagcctgcatgatcaccctgctcaaccccaaggccatcgtgttctacatggcgttcttcccgctgttcgtcgacccggcgcgtcaccagggcctgccgaccttcggcctgatggcggccacgattgccgtgctgacctttctctacggtgccatcgtggtcctgctgacgcaccggctggccgacaggctgcgcgccagcccgcgcatcaccaaggcgctggagcggctggcgggcgcgctgctgatcggtttcggcgtgaagctggtgctgagccggtag

SEQ ID NO: 2181 - protein, 204 aa, Rubrivivax gelatinosus PM1
MLGVADYGAFVVTVIVFLAIPGPGNLALITSTGKGGLRGGFAATLGVIAGDQLLMWLAVAGVAALLQAAPVVFGAVQWVGAAYLAYIGWRLITSRPGDAPVLQILPRHYFRQACMITLLNPKAIVFYMAFFPLFVDPARHQGLPTFGLMAATIAVLTFLYGAIVVLLTHRLADRLRASPRITKALERLAGALLIGFGVKLVLSR

SEQ ID NO: 2182 - DNA, 714 bp, Burkholderia vietnamiensis G4
  CDS (1)..(714): transl_table=11
atgttcggccacgcactcggcatcaccgatatctggacctacgtgttcggcgtggtgttcatcatcctgctgccggggccgaactcgatgtacgtgctgtcgctcgccgcgcagcgcggcgtgaaggccggctatcgcgcggcctgcggcgtgttcgtcggcgacacggtcctgatggtgctgtcggccgccggcgtcgcgtcgctgctgaaggcgaacccgctgctgttctcggtcgtcaagtacggcggcgccgcgtatctgctgtacatcggcgccgggatgctgcgcagcgcgtggcgtaagctgcgcgcgggcgcgggcgcggacgccgcggccgacacgaccgacacgaccgacacgaccgacacgaccgacgtgccgcagccgcccgccggcgagcgctcgttcgacacgccgtttcgcaaggcgctggtcgtgagcctgctgaacccgaaggcgatcctgttcttcatctcgttcttcatccagttcgtcgacccggcattcccgcatcccgcgctgtcgttcgtcgtgctcggggcgatcgcgcaaagcgcgagcttcctgtacctgagcacgctgatcttcgcgggcgcacggctcgccgagcatttccgccgtcgccgcaagctcgcggccggcgcggcgagcagcgtgggcggcctgttcatcggtttctcggtcaagctcgcgcttgccaccatgagctga

SEQ ID NO: 2183 - protein, 237 aa, Burkholderia vietnamiensis G4
MFGHALGITDIWTYVFGVVFIILLPGPNSMYVLSLAAQRGVKAGYRAACGVFVGDTVLMVLSAAGVASLLKANPLLFSVVKYGGAAYLLYIGAGMLRSAWRKLRAGAGADAAADTTDTTDTTDTTDVPQPPAGERSFDTPFRKALVVSLLNPKAILFFISFFIQFVDPAFPHPALSFVVLGAIAQSASFLYLSTLIFAGARLAEHFRRRRKLAAGAASSVGGLFIGFSVKLALATMS

SEQ ID NO: 2184 - DNA, 618 bp, Pseudomonas putida
  CDS (1)..(618): transl_table=11
atgctcggcgtcaccgactacggcgcattcgtcatcgccttcatcattcttctggccatcccgggcccgggcaattttgccctgatcactgccaccggcaagggcggcatcaaggcaggcctggccgcgacctgtggggtgatcgtcggtgaccaagtcctgttgtggctagcggtagctggcgtcgccaccttgctggccacctaccctgcggccttccacatcgtgcaatgggccggcgccgcgtacctcgcctacctgggcctgcgcatgctgttgagcaaaccgggtgacgcgccgcgcaccagccgcatggacaacggccaatacctgcgccagaccatgctgatcaccctgctcaaccccaaggcgatcatgttctacatggcgttcttcccattattcatcgacccggtgaagcatcaggggttggtgacgttcggcttcatggcggcaacggtggcggtgatcacgttcctgtacgggttgatcgccgtggtgctgacccaccggctggccgaacgcatgcgcgccaacccgcgcattaccaatatgttcgagcggctggccggggcttgcctggtagggttcggcatcaagctggcggcgatgcgctga

SEQ ID NO: 2185 - protein, 205 aa, Pseudomonas putida
MLGVTDYGAFVIAFIILLAIPGPGNFALITATGKGGIKAGLAATCGVIVGDQVLLWLAVAGVATLLATYPAAFHIVQWAGAAYLAYLGLRMLLSKPGDAPRTSRMDNGQYLRQTMLITLLNPKAIMFYMAFFPLFIDPVKHQGLVTFGFMAATVAVITFLYGLIAVVLTHRLAERMRANPRITNMFERLAGACLVGFGIKLAAMR

SEQ ID NO: 2186 - DNA, 651 bp, Pseudomonas aeruginosa
  CDS (1)..(651)
atgccgaccctggggataaccgatttctggacctacgtgctgggtgtggttttcgtgatcctgttgcccggaccgaactcgttgttcgtcctcgcgacttcggcccagcgtggcgtggcgaccggctaccgggccgcctgcggcgtgttcctcggcgacgcggtgctgatgctgctgtcggcccttggcgtggcgtccctgctgaaggccgagccgatgctgttcatcggcctgaagtacctcggtgcggcctacctgttctatctcggcgtcggcatgctgcggggcgcctggcgcaagctgcgcaatcccgaagcgacggcggcgcaggccgaacaggtggatgtccaccagccgttccgcaaggcgctgctgctcagcctgtcgaatcccaaggcgatcctgttcttcatctccttcttcatccagttcgtcgatcccggctatgcctatccggggctgtcgttcctggtgctggcggtgatcctggaactggtcagcgccctttacctgagcttcctgattttcaccggtgtgcggctggcggcctggttccgccggcggcaacggttggctgccggcgccacttcgggcgtcggcgccctgttcgtcggctttggtgtgaagctggccaccgcaaccctgtcctga

SEQ ID NO: 2187 - protein, 216 aa, Pseudomonas aeruginosa
MPTLGITDFWTYVLGVVFVILLPGPNSLFVLATSAQRGVATGYRAACGVFLGDAVLMLLSALGVASLLKAEPMLFIGLKYLGAAYLFYLGVGMLRGAWRKLRNPEATAAQAEQVDVHQPFRKALLLSLSNPKAILFFISFFIQFVDPGYAYPGLSFLVLAVILELVSALYLSFLIFTGVRLAAWFRRRQRLAAGATSGVGALFVGFGVKLATATLS

SEQ ID NO: 2188 - DNA, 24 bp, Artificial sequence
  primer
atgttcgctgaatacggggttctg

SEQ ID NO: 2189 - DNA, 23 bp, Artificial sequence
  primer
ttaggattgcagcgtcgccagtc

SEQ ID NO: 2190 - protein, 226 aa, Artificial sequence
  consensus sequence
  Variant (2)..(3): Xaa in position 2 to 3 is any amino acid
  Variant (5)..(6): Xaa in position 5 to 6 is any amino acid
  Variant (8)..(10): Xaa in position 8 to 10 is any amino acid
  Variant (12)..(16): Xaa in position 12 to 16 is any amino acid
  Variant (18)..(18): Xaa in position 18 is any amino acid
  Variant (23)..(25): Xaa in position 23 to 25 is any amino acid
  Variant (27)..(33): Xaa in position 27 to 33 is any amino acid
  Variant (35)..(37): Xaa in position 35 to 37 is any amino acid
  Variant (39)..(41): Xaa in position 39 to 41 is any amino acid
  Variant (43)..(43): Xaa in position 43 is any amino acid
  Variant (46)..(47): Xaa in position 46 to 47 is any amino acid
  Variant (50)..(51): Xaa in position 50 to 51 is any amino acid
  Variant (54)..(54): Xaa in position 54 is any amino acid
  Variant (56)..(57): Xaa in position 56 to 57 is any amino acid
  Variant (62)..(62): Xaa in position 62 is any amino acid
  Variant (65)..(67): Xaa in position 65 to 67 is any amino acid
  Variant (69)..(70): Xaa in position 69 to 70 is any amino acid
  Variant (72)..(73): Xaa in position 72 to 73 is any amino acid
  Variant (75)..(77): Xaa in position 75 to 77 is any amino acid
  Variant (80)..(80): Xaa in position 80 is any amino acid
  Variant (83)..(85): Xaa in position 83 to 85 is any amino acid
  Variant (87)..(89): Xaa in position 87 to 89 is any amino acid
  Variant (91)..(110): Xaa in position 91 to 110 is any amino acid
  Variant (111)..(137): Xaa in position 111 to 137 is any or no amino acid
  Variant (139)..(141): Xaa in position 139 to 141 is any amino acid
  Variant (144)..(144): Xaa in position 144 is any amino acid
  Variant (152)..(154): Xaa in position 152 to 154 is any amino acid
  Variant (157)..(157): Xaa in position 157 is any amino acid
  Variant (163)..(170): Xaa in position 163 to 170 is any amino acid
  Variant (172)..(173): Xaa in position 172 to 173 is any amino acid
  Variant (175)..(181): Xaa in position 175 to 181 is any amino acid
  Variant (184)..(184): Xaa in position 184 is any amino acid
  Variant (187)..(189): Xaa in position 187 to 189 is any amino acid
  Variant (191)..(192): Xaa in position 191 to 192 is any amino acid
  Variant (194)..(195): Xaa in position 194 to 195 is any amino acid
  Variant (198)..(200): Xaa in position 198 to 200 is any amino acid
  Variant (202)..(214): Xaa in position 202 to 214 is any amino acid
  Variant (216)..(217): Xaa in position 216 to 217 is any amino acid
  Variant (219)..(219): Xaa in position 219 is any amino acid
  Variant (222)..(223): Xaa in position 222 to 223 is any amino acid
GXXDXXTXXXGXXXXXLXPGPNXXXVXXXXXXXGXXXGXXXAXGVXXGDXXLMXLXXAGVAXLLXXXPXXFXXVXXXGAXYLXXXGXXXLXXXXXXXXXXXXXXXXXXXXXXXXXXXXXXXXXXXXXXXXXXXXXXXAXXXSLXNPKAILFXXXFFXQFVDPXXXXXXXXFXXLXXXXXXXSFXYLXXXIXXGXXLAXXXRXXXXXXXXXXXXXGXXFXGFXXKLA

SEQ ID NO: 2191 - protein, 22 aa, Artificial sequence
  protein pattern
  Variant (2)..(2): Xaa in position 2 is any or no amino acid
  Variant (4)..(4): Xaa in position 4 is any or no amino acid
  Variant (12)..(12): Xaa in position 12 is Phe or Tyr
  Variant (13)..(13): Xaa in position 13 is Ile, Leu or Val
  Variant (14)..(14): Xaa in position 14 is Ala or Ser
  Variant (17)..(17): Xaa in position 17 is Ile or Val
  Variant (20)..(20): Xaa in position 20 is Ile or Val
  Variant (22)..(22): Xaa in position 22 is Pro or Val
SXLXNPKAILFXXXFFXQFXDX

SEQ ID NO: 2192 - protein, 59 aa, Artificial sequence
  protein pattern
  Variant (4)..(4): Xaa in position 4 is Ala, Ser or Thr
  Variant (5)..(5): Xaa in position 5 is Ile, Leu or Met
  Variant (6)..(6): Xaa in position 6 is Phe or Tyr
  Variant (8)..(8): Xaa in position 8 is Leu or Met
  Variant (9)..(10): Xaa in position 9 to 10 is any amino acid
  Variant (11)..(11): Xaa in position 11 is Ala or Ser
  Variant (12)..(12): Xaa in position 12 is Ala, Ser or Val
  Variant (13)..(14): Xaa in position 13 to 14 is any amino acid
  Variant (16)..(17): Xaa in position 16 to 17 is any amino acid
  Variant (18)..(18): Xaa in position 18 is Ala, Gly or Thr
  Variant (20)..(20): Xaa in position 20 is Phe or Tyr
  Variant (21)..(21): Xaa in position 21 is any amino acid
  Variant (22)..(22): Xaa in position 22 is Ala or Gly
  Variant (24)..(24): Xaa in position 24 is any amino acid
  Variant (27)..(28): Xaa in position 27 to 28 is any amino acid
  Variant (31)..(31): Xaa in position 31 is any amino acid
  Variant (32)..(32): Xaa in position 32 is Ile or Val
  Variant (34)..(34): Xaa in position 34 is Ile or Met
  Variant (35)..(35): Xaa in position 35 is any amino acid
  Variant (36)..(36): Xaa in position 36 is Ala or Leu
  Variant (37)..(37): Xaa in position 37 is Ala, Ser or Thr
  Variant (38)..(39): Xaa in position 38 to 39 is any amino acid
  Variant (41)..(41): Xaa in position 41 is Ala or Val
  Variant (42)..(42): Xaa in position 42 is Ala or Ser
  Variant (43)..(43): Xaa in position 43 is Gly, Ser or Thr
  Variant (45)..(45): Xaa in position 45 is Ile, Leu or Met
  Variant (46)..(46): Xaa in position 46 is any amino acid
  Variant (47)..(47): Xaa in position 47 is Ala or Thr
  Variant (48)..(48): Xaa in position 48 is any amino acid
  Variant (49)..(49): Xaa in position 49 is Ala or Pro
  Variant (50)..(50): Xaa in position 50 is any amino acid
  Variant (51)..(51): Xaa in position 51 is Ile or Leu
  Variant (53)..(54): Xaa in position 53 to 54 is any amino acid
  Variant (55)..(55): Xaa in position 55 is Leu or Val
  Variant (56)..(56): Xaa in position 56 is Lys or Arg
  Variant (57)..(57): Xaa in position 57 is any amino acid
  Variant (58)..(58): Xaa in position 58 is Ala, Gly, Ile, Leu or Val
GPNXXXVXXXXXXXGXXXGXXXAXGVXXGDXXLXXXXXXGXXXLXXXXXXXFXXXXXXG

SEQ ID NO: 2193 - protein, 57 aa, Artificial sequence
  protein pattern
  Variant (2)..(8): Xaa in position 2 to 8 is any amino acid
  Variant (9)..(13): Xaa in position 9 to 13 is any or no amino acid
  Variant (15)..(17): Xaa in position 15 to 17 is any amino acid
  Variant (19)..(19): Xaa in position 19 is Ser or Thr
  Variant (20)..(20): Xaa in position 20 is any amino acid
  Variant (21)..(21): Xaa in position 21 is Ile or Leu
  Variant (23)..(23): Xaa in position 23 is Phe, Ile or Leu
  Variant (24)..(24): Xaa in position 24 is any amino acid
  Variant (26)..(26): Xaa in position 26 is Ala, Asp, Thr or Val
  Variant (27)..(27): Xaa in position 27 is any amino acid
  Variant (28)..(28): Xaa in position 28 is Leu or Val
  Variant (29)..(29): Xaa in position 29 is Ala, Ser or Thr
  Variant (30)..(31): Xaa in position 30 to 31 is any amino acid
  Variant (32)..(32): Xaa in position 32 is Phe or Ile
  Variant (33)..(34): Xaa in position 33 to 34 is any amino acid
  Variant (35)..(35): Xaa in position 35 is Lys or Arg
  Variant (36)..(36): Xaa in position 36 is any amino acid
  Variant (37)..(37): Xaa in position 37 is Lys or Arg
  Variant (38)..(38): Xaa in position 38 is Ile or Leu
  Variant (39)..(39): Xaa in position 39 is Ala, Ser or Thr
  Variant (40)..(43): Xaa in position 40 to 43 is any amino acid
  Variant (44)..(44): Xaa in position 44 is Cys, Gly, Ser or Thr
  Variant (45)..(45): Xaa in position 45 is any amino acid
  Variant (46)..(46): Xaa in position 46 is Ala, Ile or Val
  Variant (48)..(48): Xaa in position 48 is any amino acid
  Variant (49)..(49): Xaa in position 49 is Leu, Met or Val
  Variant (51)..(51): Xaa in position 51 is Phe, Ile, Leu or Val
  Variant (54)..(54): Xaa in position 54 is Ala, Gly or Ser
  Variant (55)..(55): Xaa in position 55 is Ala, Leu or Val
  Variant (56)..(56): Xaa in position 56 is Lys or Arg
LXXXXXXXXXXXXSXXXLXXXIXXGXXXXXXXXXXXXXXXXXXXXXGXXFXGFXXXL

SEQ ID NO: 2194 - protein, 15 aa, Artificial sequence
  protein pattern
  Variant (2)..(2): Xaa in position 2 is Ile or Val
  Variant (3)..(3): Xaa in position 3 is any amino acid
  Variant (4)..(4): Xaa in position 4 is Asp, Glu or Asn
  Variant (5)..(6): Xaa in position 5 to 6 is any amino acid
  Variant (8)..(8): Xaa in position 8 is Phe or Tyr
  Variant (9)..(9): Xaa in position 9 is Ile, Leu or Val
  Variant (10)..(10): Xaa in position 10 is any amino acid
  Variant (12)..(12): Xaa in position 12 is any amino acid
  Variant (13)..(13): Xaa in position 13 is Ile, Leu or Val
  Variant (14)..(14): Xaa in position 14 is Phe, Ile or Leu
  Variant (15)..(15): Xaa in position 15 is Ile or Val
GXXXXXTXXXGXXXX

SEQ ID NO: 2195 - DNA, 393 bp, Escherichia coli K12
  CDS (1)..(393): transl_table=11
atgagaaccttattagcaatattattgtttccgctgctggtgcaagccgccggggaggggatgtggcaggcaagtagtgtaggaattacgctaaatcatcgcggtgagtcgatgtcgtctgcgcctctttctacgcgacaacctgcttcaggattgatgacgctggtagcgtggcgttatcagcttatcggcccgacaccttcaggactgcgggttcgcttgtgttcgcaatctcgttgtgtcgaattagaggggcagagcggaaccaccgtggccttttccggtatagcggcagcagaaccgttgcgatttatctgggaagtgccaggcggtgggcggttaattccaccgctaaaggtacaacgtaatgaagtgattgtgaattatcgctga

SEQ ID NO: 2196 - protein, 130 aa, Escherichia coli K12
MRTLLAILLFPLLVQAAGEGMWQASSVGITLNHRGESMSSAPLSTRQPASGLMTLVAWRYQLIGPTPSGLRVRLCSQSRCVELEGQSGTTVAFSGIAAAEPLRFIWEVPGGGRLIPPLKVQRNEVIVNYR

SEQ ID NO: 2197 - DNA, 423 bp, Yersinia pestis KIM
  CDS (1)..(423): transl_table=11
atgttgattcgggcctcccaccgtgtattgattctattagcgaccagcctgttgccgcttaagattaacgccgcatccggttcttgggtagcggataatattggtatcacccagggtctgcgtggggtggtaacgccgtcatccccgttgcaaccgccagttgcactggcgcaggaaaatgcacgtattgtttcagtcggctggcgctatcagttaatgtcaacggccccggacggtttgcaagtgaagttatgcacgccaacccgctgtataccgcttgaagggggcagtgggcagagtgtagggctggcaggggaagccgcagtgaatcaactgacttttgtctactttattgcgggtaaaggccgggtcaacccgccattacaagtgatcagtaatcaggtgttggtcaattatcgttaa

SEQ ID NO: 2198 - protein, 140 aa, Yersinia pestis KIM
MLIRASHRVLILLATSLLPLKINAASGSWVADNIGITQGLRGVVTPSSPLQPPVALAQENARIVSVGWRYQLMSTAPDGLQVKLCTPTRCIPLEGGSGQSVGLAGEAAVNQLTFVYFIAGKGRVNPPLQVISNQVLVNYR

SEQ ID NO: 2199 - DNA, 339 bp, Shigella flexneri 2a str. 301
  CDS (1)..(339): transl_table=11
atgagaaccttattagcgatattattgtttccgctgctggtgcaagccgccggggaggggatgtggcaggcaagtagtgtcggaattacgctaaatcatcgcggtgagtcgatgtcgtctgcacctctttctgcgcgacaacctgcttcaggattgatgacgctggtggcgtggcgttatcagcttatcggcccgacacctgcaggactgcgggttcgcttgtgttcgcaatctcgttgtgtcgaattagaggggcagagcggtaccaccgtggccttttccggtatagcggcagcagaaccgttgcgatttatctgggaagtgccaggcggtgggtga

SEQ ID NO: 2200 - protein, 112 aa, Shigella flexneri 2a str. 301
MRTLLAILLFPLLVQAAGEGMWQASSVGITLNHRGESMSSAPLSARQPASGLMTLVAWRYQLIGPTPAGLRVRLCSQSRCVELEGQSGTTVAFSGIAAAEPLRFIWEVPGGG

SEQ ID NO: 2201 - DNA, 420 bp, Erwinia carotovora subsp. atroseptica SCRI1043
  CDS (1)..(420): transl_table=11
atgaggaaggtgatacgttctctggtagcaacagcgctagtattcccactttgtgctattgcgacgccaggtagttggaacggaagcatgccgggaataaaacttgatcatcgtggtgaaatggttacgacgtcagcttttattcctaatatagcggttaagccagatgaaacgattacgacaatatattggcggcatgtgattgattcagcgatacctgtagggcttgttgtgaaactgtgttcacaatcgccgcagcgctgtgttgacttagatggtagtggcgacggacaaactcaggcatttgatgggttagcggcaaataatgagtttcgttttgtatactacattgaaggaaatggacgtattaaccactcgttcagcgtccgtacgatcgacattgcggtgaactataagtga

SEQ ID NO: 2202 - protein, 139 aa, Erwinia carotovora subsp. atroseptica SCRI1043
MRKVIRSLVATALVFPLCAIATPGSWNGSMPGIKLDHRGEMVTTSAFIPNIAVKPDETITTIYWRHVIDSAIPVGLVVKLCSQSPQRCVDLDGSGDGQTQAFDGLAANNEFRFVYYIEGNGRINHSFSVRTIDIAVNYK

SEQ ID NO: 2203 - DNA, 423 bp, Yersinia pseudotuberculosis IP 32953
  CDS (1)..(423): transl_table=11
atgttgattcgggcctcccaccgtgtattgattctattagcggccagcctgttgccgcttaagattaacgccgcatccggttcttgggtagcggataatattggtatcacccagggtctgcgtggggtggtaacgccgtcatccccgttgcaaccgccagttgcactggcgcaggaaaatgcacgtattgtttcagtcggctggcgctatcagttaatgtcaacggccccggacggtttgcaagtgaagttatgcacgccaacccgctgtataccgcttgaagggggcagtgggcagagtgtagggctggcaggggaagccgcagtgaatcaactgacttttgtctactttattgcgggtaaaggccgggtcaacccgccattacaagtgatcagtaatcaggtgttggtcaattatcgttaa

SEQ ID NO: 2204 - protein, 140 aa, Yersinia pseudotuberculosis IP 32953
MLIRASHRVLILLAASLLPLKINAASGSWVADNIGITQGLRGVVTPSSPLQPPVALAQENARIVSVGWRYQLMSTAPDGLQVKLCTPTRCIPLEGGSGQSVGLAGEAAVNQLTFVYFIAGKGRVNPPLQVISNQVLVNYR

SEQ ID NO: 2205 - DNA, 417 bp, Ralstonia eutropha JMP134
  CDS (1)..(417): transl_table=11
atgcatgccatcgcggcgctgcttgctgcgatggcgacgattacgtgggccgcgcccgatgacggcacgaaccacagctggagcgcatcggtcaacggcccggcgctgtatggccgcgggctgcgtaccgtgtcccgcccgatcctgccgagcggcaacctgccgcagtcggagggcgtcattacctcggtgcgctggcgctacagttttgccgcgacgccgcccacggatctgcaggcctatctctgcaacgacacgcgctgcgtgctgctgccacaggccgaaggcaagaccgacgccttcgacggtgatgatgcaacccagggttttgtgtttgcgtttcggctgccggggcagggcccggtggcgccggtgctgcagggcaagagcaatcaggtggttgtggggttccgataa

SEQ ID NO: 2206 - protein, 138 aa, Ralstonia eutropha JMP134
MHAIAALLAAMATITWAAPDDGTNHSWSASVNGPALYGRGLRTVSRPILPSGNLPQSEGVITSVRWRYSFAATPPTDLQAYLCNDTRCVLLPQAEGKTDAFDGDDATQGFVFAFRLPGQGPVAPVLQGKSNQVVVGFR

SEQ ID NO: 2207 - DNA, 447 bp, Ralstonia metallidurans CH34
  CDS (1)..(447): transl_table=11
atgcgtcatcttctggcattcgcgttgtgtctttgtctggcccccacatgggtcgacgcgcagacatacgtgcgcgccacctacgagctcagtgggtcgcgttatgcctggaccagctccgcgcagggaccgctgattgccagtcgcggccagcgcacgatgtcgtcgccggtgctgccccccggcacgatgcctcaggcaagtggcatcgttacatcggtacgctggcgctacagcttcgccagtaccccgcctatcgatctggaagcatacctgtgtaacgcgcgacgctgcgtgctgctgtctggcgcgcaggggaagaccgatgcgttcgcgggcgacgatgcgaccggcgggttcgtgtttgcctaccgggttgctggccgtggggggctgtctcccaccctgcaaggccgcagtaacgaggtgacggtgagctaccgatag

SEQ ID NO: 2208 - protein, 148 aa, Ralstonia metallidurans CH34
MRHLLAFALCLCLAPTWVDAQTYVRATYELSGSRYAWTSSAQGPLIASRGQRTMSSPVLPPGTMPQASGIVTSVRWRYSFASTPPIDLEAYLCNARRCVLLSGAQGKTDAFAGDDATGGFVFAYRVAGRGGLSPTLQGRSNEVTVSYR

SEQ ID NO: 2209 - DNA, 393 bp, Salmonella typhi
  CDS (1)..(393): transl_table=11
atgcgtaaatggctggcattgttgctctttcccctaacggttcaggccgcaggcgaaggcgcgtggcaggatagcggtatgggcgtaaccttaaattaccggggcgtttccgcatcgtcttcgccattgtcggcgcgccagccggtttccggtgtgatgacgctggtcgcctggcgttatgaactgaatggcccgacccccgcaggattacgggtacgtttatgttcccagtcccgttgcgtagaacttgatggtcagagtggcacgacccacggttttgctcatgttcccgcagtcgagccgctccgctttgtctgggaagtccccggcggcggcagacttatcccggcgttaaaagtgcggagcaatcaggtgattgtgaactaccgctaa

SEQ ID NO: 2210 - protein, 130 aa, Salmonella typhi
MRKWLALLLFPLTVQAAGEGAWQDSGMGVTLNYRGVSASSSPLSARQPVSGVMTLVAWRYELNGPTPAGLRVRLCSQSRCVELDGQSGTTHGFAHVPAVEPLRFVWEVPGGGRLIPALKVRSNQVIVNYR

SEQ ID NO: 2211 - DNA, 423 bp, Yersinia enterocolitica
  CDS (1)..(423): transl_table=11
atgttgacttgtctttcccgaagagttctggtgggcttgttttcaattggaatattgccattgaatgcaatggcttcaggttcctgggtggcagatgatattggcattacccagagtgtgcgcggtgtagcaatctccgccaagccgctgcaatcaccggtcgcactggcgcaagataatgcgcgaattgtatcgataagttggcgctaccaattaatgtcagcagcaccagatggtttacaagttaagttatgtacgccaacccgctgtatgcctcttgagggtggcagcgggctgagtcgcggattggccggggaagcggctgcgactcaactgacatttatctactttatcgcaggaaaagggcgggtcaatccgccactgcaagttattaatcaccaggtcatcgttaattatcgttaa

SEQ ID NO: 2212 - protein, 140 aa, Yersinia enterocolitica
MLTCLSRRVLVGLFSIGILPLNAMASGSWVADDIGITQSVRGVAISAKPLQSPVALAQDNARIVSISWRYQLMSAAPDGLQVKLCTPTRCMPLEGGSGLSRGLAGEAAATQLTFIYFIAGKGRVNPPLQVINHQVIVNYR

SEQ ID NO: 2213 - DNA, 27 bp, Artificial sequence
  primer
atgagaaccttattagcaatattattg

SEQ ID NO: 2214 - DNA, 28 bp, Artificial sequence
  primer
ttagcgataattcacaatcacttcatta

SEQ ID NO: 2215 - protein, 140 aa, Artificial sequence
  consensus sequence
  Variant (2)..(17): Xaa in position 2 to 17 is any amino acid
  Variant (18)..(28): Xaa in position 18 to 28 is any or no amino acid
  Variant (30)..(34): Xaa in position 30 to 34 is any amino acid
  Variant (36)..(40): Xaa in position 36 to 40 is any amino acid
  Variant (43)..(48): Xaa in position 43 to 48 is any amino acid
  Variant (50)..(64): Xaa in position 50 to 64 is any amino acid
  Variant (65)..(67): Xaa in position 65 to 67 is any or no amino acid
  Variant (71)..(76): Xaa in position 71 to 76 is any amino acid
  Variant (78)..(79): Xaa in position 78 to 79 is any amino acid
  Variant (81)..(83): Xaa in position 81 to 83 is any amino acid
  Variant (86)..(88): Xaa in position 86 to 88 is any amino acid
  Variant (89)..(90): Xaa in position 89 to 90 is any or no amino acid
  Variant (93)..(94): Xaa in position 93 to 94 is any amino acid
  Variant (96)..(96): Xaa in position 96 is any amino acid
  Variant (98)..(99): Xaa in position 98 to 99 is any amino acid
  Variant (100)..(100): Xaa in position 100 is any or no amino acid
  Variant (102)..(107): Xaa in position 102 to 107 is any amino acid
  Variant (109)..(110): Xaa in position 109 to 110 is any amino acid
  Variant (112)..(116): Xaa in position 112 to 116 is any amino acid
  Variant (118)..(122): Xaa in position 118 to 122 is any amino acid
  Variant (124)..(124): Xaa in position 124 is any amino acid
  Variant (126)..(139): Xaa in position 126 to 139 is any amino acid
LXXXXXXXXXXXXXXXXXXXXXXXXXXXWXXXXXGXXXXXRGXXXXXXPXXXXXXXXXXXXXXXXXXWRYXXXXXXPXXLXXXLCXXXXXRCXXLXGXXXGXXXXXXGXXAXXXXXFXXXXXGXGXXXXXXXXXXXXXXV

SEQ ID NO: 2216 - protein, 28 aa, Artificial sequence
  protein pattern
  Variant (2)..(2): Xaa in position 2 is any amino acid
  Variant (3)..(4): Xaa in position 3 to 4 is any or no amino acid
  Variant (8)..(8): Xaa in position 8 is Glu, Gln or Ser
  Variant (9)..(9): Xaa in position 9 is Phe or Leu
  Variant (10)..(10): Xaa in position 10 is any amino acid
  Variant (11)..(11): Xaa in position 11 is Ala, Gly or Ser
  Variant (12)..(13): Xaa in position 12 to 13 is Ala, Pro or Thr
  Variant (15)..(15): Xaa in position 15 is any amino acid
  Variant (16)..(16): Xaa in position 16 is Asp or Gly
  Variant (18)..(18): Xaa in position 18 is Glu, Gln or Arg
  Variant (19)..(19): Xaa in position 19 is Ala or Val
  Variant (20)..(20): Xaa in position 20 is any amino acid
  Variant (23)..(23): Xaa in position 23 is Asn, Ser or Thr
  Variant (24)..(25): Xaa in position 24 to 25 is any amino acid
  Variant (28)..(28): Xaa in position 28 is Ile, Met or Val
VXXXWRYXXXXXXPXXLXXXLCXXXRCX

SEQ ID NO: 2217 - protein, 27 aa, Artificial sequence
  protein pattern
  Variant (2)..(4): Xaa in position 2 to 4 is any amino acid
  Variant (5)..(6): Xaa in position 5 to 6 is any or no amino acid
  Variant (8)..(9): Xaa in position 8 to 9 is any or no amino acid
  Variant (11)..(11): Xaa in position 11 is any amino acid
  Variant (12)..(12): Xaa in position 12 is Ala or Asp
  Variant (14)..(14): Xaa in position 14 is Ala, Asn, Thr or Val
  Variant (15)..(15): Xaa in position 15 is Glu, Gly, Asn, Gln or Thr
  Variant (16)..(16): Xaa in position 16 is any amino acid
  Variant (17)..(17): Xaa in position 17 is Phe or Leu
  Variant (18)..(18): Xaa in position 18 is any amino acid
  Variant (20)..(20): Xaa in position 20 is Ala, Ile or Val
  Variant (21)..(21): Xaa in position 21 is Phe, Trp or Tyr
  Variant (22)..(22): Xaa in position 22 is any amino acid
  Variant (23)..(23): Xaa in position 23 is Ile, Leu or Val
  Variant (24)..(24): Xaa in position 24 is any amino acid
  Variant (26)..(26): Xaa in position 26 is any amino acid
GXXXXXAXXGXXAXXXXXFXXXXXGXG

SEQ ID NO: 2218 - protein, 25 aa, Artificial sequence
  protein pattern
  Variant (2)..(2): Xaa in position 2 is any amino acid
  Variant (3)..(3): Xaa in position 3 is Ala, Asp or Ser
  Variant (4)..(4): Xaa in position 4 is Asp or Ser
  Variant (5)..(5): Xaa in position 5 is Ala, Asp, Gly, Asn, Ser or Val
  Variant (6)..(6): Xaa in position 6 is any amino acid
  Variant (8)..(8): Xaa in position 8 is Ile, Pro or Val
  Variant (9)..(12): Xaa in position 9 to 12 is any amino acid
  Variant (15)..(15): Xaa in position 15 is any amino acid
  Variant (16)..(18): Xaa in position 16 to 18 is any or no amino acid
  Variant (20)..(21): Xaa in position 20 to 21 is any amino acid
  Variant (22)..(22): Xaa in position 22 is Ile, Leu, Pro or Val
  Variant (23)..(24): Xaa in position 23 to 24 is any amino acid
  Variant (25)..(25): Xaa in position 25 is Ala, Pro, Ser or Thr
WXXXXXGXXXXXRGXXXXSXXXXXX

SEQ ID NO: 2219 - DNA, 990 bp, Escherichia coli K12
  CDS (1)..(990): transl_table=11
atgcacaaatttactaaagccctggcagccattggtctggcagccgttatgtcacaatccgctatggcggagaacctgaagctcggttttctggtgaagcaaccggaagagccgtggttccagaccgaatggaagtttgccgataaagccgggaaggatttagggtttgaggttattaagattgccgtgccggatggcgaaaaaacattgaacgcgatcgacagcctggctgccagtggcgcaaaaggtttcgttatttgtactccggaccccaaactcggctctgccatcgtcgcgaaagcgcgtggctacgatatgaaagtcattgccgtggatgaccagtttgttaacgccaaaggtaagccaatggataccgttccgctggtgatgatggcggcgactaaaattggcgaacgtcagggccaggaactgtataaagagatgcagaaacgtggctgggatgtcaaagaaagcgcggtgatggcgattaccgccaacgaactggataccgcccgccgccgtactacgggatctatggatgcgctgaaagcggccggattcccggaaaaacaaatttatcaggtacctaccaaatctaacgacatcccgggggcatttgacgctgccaactcaatgctggttcaacatccggaagttaaacattggctgatcgtcggtatgaacgacagcaccgtgctgggcggcgtacgcgcgacggaaggtcagggctttaaagcggccgatatcatcggcattggcattaacggtgtggatgcggtgagcgaactgtctaaagcacaggcaaccggcttctacggttccctgctgccaagcccggacgtacatggctataaatccagcgaaatgctttacaactgggtagcaaaagacgttgaaccgccaaaatttaccgaagttaccgacgtggtactgatcacgcgtgacaactttaaagaagaactggagaaaaaaggtttaggcggtaagtaa

SEQ ID NO: 2220 - protein, 329 aa, Escherichia coli K12
MHKFTKALAAIGLAAVMSQSAMAENLKLGFLVKQPEEPWFQTEWKFADKAGKDLGFEVIKIAVPDGEKTLNAIDSLAASGAKGFVICTPDPKLGSAIVAKARGYDMKVIAVDDQFVNAKGKPMDTVPLVMMAATKIGERQGQELYKEMQKRGWDVKESAVMAITANELDTARRRTTGSMDALKAAGFPEKQIYQVPTKSNDIPGAFDAANSMLVQHPEVKHWLIVGMNDSTVLGGVRATEGQGFKAADIIGIGINGVDAVSELSKAQATGFYGSLLPSPDVHGYKSSEMLYNWVAKDVEPPKFTEVTDVVLITRDNFKEELEKKGLGGK

SEQ ID NO: 2221 - DNA, 984 bp, Sinorhizobium meliloti 1021
  CDS (1)..(984): transl_table=11
atgcgctttatcaaggccgtcgctttggccggcaccgtcgcgatttttgctgcaacatccgccttcgccgccgacgtaaagatcggtttcatcgtcaagcagcctgaggagccgtggttccaggacgaatggaaattcgccgacgaggcggccaaggaaaagggcttcacgctcgtcaagatcggagcccaggatggcgaaaaggtacagtcggccatcgacaatctcggcgcccaaggtgcgcaggggttcatcatctgcacccccgacgtgaagctcggccccggcatcgtcgccaaagcggcagccaacgatctgaagctgatgacggtcgacgatcggctggtcaatgccgacggcagccccatcgaggacgtcccgcatatgggcatctccgccaccaagatcggcgaggcggtgggcgaggcgatcgtcgcggagatcaagaagcgcggctgggacatgaaggaagtcggcgcgatccgcgtttcctacgaccagctcccaaccgccgtggaccgggttgaaggcgcgctctccgttcttaaggcgaacggcttccccgaagccaatgtcttcgacgcgccgcaggcaaagaccgacaccgaagccgctctcaatgccgcaacagtcgttctcaacaagaatgccggcatcaagaagtgggtcgccgtcggtctcaacgacgaagccgtgctcggtgcagtgcgtgccaccgagacggtcggcatccccgcggacagcatgatcggcatcggcatcggcggcgcggactccgcgatcaacgagttcaagaagccttccgcgacgggcttcttcggcaccgtcatcatctcgccaaagcgccacggctacgagacggccctcaacatgtatgagtggatcgccaacggcaaggaaccggaaaagctgatcctgaccgcgggccagcttgcattgcgcgacaactatgaggccgtccgcaaggaactcgggatcgagtag

SEQ ID NO: 2222 - protein, 327 aa, Sinorhizobium meliloti 1021
MRFIKAVALAGTVAIFAATSAFAADVKIGFIVKQPEEPWFQDEWKFADEAAKEKGFTLVKIGAQDGEKVQSAIDNLGAQGAQGFIICTPDVKLGPGIVAKAAANDLKLMTVDDRLVNADGSPIEDVPHMGISATKIGEAVGEAIVAEIKKRGWDMKEVGAIRVSYDQLPTAVDRVEGALSVLKANGFPEANVFDAPQAKTDTEAALNAATVVLNKNAGIKKWVAVGLNDEAVLGAVRATETVGIPADSMIGIGIGGADSAINEFKKPSATGFFGTVIISPKRHGYETALNMYEWIANGKEPEKLILTAGQLALRDNYEAVRKELGIE

SEQ ID NO: 2223 - DNA, 996 bp, Ralstonia solanacearum GMI1000
  CDS (1)..(996): transl_table=11
atgaaccagcaacgacgcggtacgttccgggccatcgcggccgccactgtgttcgccatcgccggcggatttgtccatgcggccgaagaggtgaagatcggcttcctggtcaagcagccggaggagccgtggttccaggatgaatggaggttcgccgaccaggccgccaaggagaagggcttcaagctggtcaagatcggcgtgcccagcggcggcgaagtgctgaccgccatcgacaacctcggcgcgcagcacgcgcagggcttcgtgatctgcgtgcccgacgtgaagctcggcccggccgtggtggccaaggccaggcagaacaacctcaagctgatgacggtggacgaccgcctggtcgacggcggcggcaagccgatcgaagcggtgccgcacatgggcatctcggcgaccaggatcggcgagcaggtgggtgaggccatcgcgcaggagatgaagaagcgcggctggaacccgtcggaagtgggcgccatccgcatcgcgtacgatcagctgccgaccgccagggagcgcaccgatggcgccgtggccgcgctcgccaaggccggctttcctgccgccaatgtgctgaccagcccgcaggccaagaccgatacggaagccgccttcaacgcggccgatatcacgctgaccaagaacccgcgcttcaagcactggatcgccttcggcctgaacgacgaggcggtgctgggcgccgtgcgcgccgcggaagggcatggcatcaaggcggccgacatcatcggcgtgggcatcggcggcagccagtcggcgctcaacgagttcgccaagccggagaagacgggcttcttcggcaccgtgctgatcagccccaagcgccacggctacgagacctcgatgaacatgtacagctggatcaccgccagcaaggcacccgagccgctgatcctgaccagcggccgcctgatgacgcgcgagaacgagaaggccgtgcgccaggagatgggcctctga

SEQ ID NO: 2224 - protein, 331 aa, Ralstonia solanacearum GMI1000
MNQQRRGTFRAIAAATVFAIAGGFVHAAEEVKIGFLVKQPEEPWFQDEWRFADQAAKEKGFKLVKIGVPSGGEVLTAIDNLGAQHAQGFVICVPDVKLGPAVVAKARQNNLKLMTVDDRLVDGGGKPIEAVPHMGISATRIGEQVGEAIAQEMKKRGWNPSEVGAIRIAYDQLPTARERTDGAVAALAKAGFPAANVLTSPQAKTDTEAAFNAADITLTKNPRFKHWIAFGLNDEAVLGAVRAAEGHGIKAADIIGVGIGGSQSALNEFAKPEKTGFFGTVLISPKRHGYETSMNMYSWITASKAPEPLILTSGRLMTRENEKAVRQEMGL

SEQ ID NO: 2225 - DNA, 984 bp, Yersinia pestis KIM
  CDS (1)..(984): transl_table=11
atgcataaattaactaaggcgctggcagtagtcgggttagcggcggttatgtcacattcagctattgccgaaagtatgaaactggggtttctggttaagcaaccggaagaaccttggttccagactgaatggaagttcgctgataaggcgggtaaggatttaggctttgaagtgatcaaaattgccgtacccgatggtgagaaaaccctgaacgccatcgacagcctggcggccagtggtgcccaaggttttgttatttgtacaccagatccaaaactggggcctgccattgaagccaaagcgcgcagttataacctgaaagtgattgctgttgatgaccaatttgtgaatgccaaaggcaaaccgatggagagtgttccgctggtgatgatggcagccactaaaattggtgaacgtcaggggcaggagttgtggaaagagatgaacaaacggggttggcaacccgctgaaacagcagtaatggcgatcacttctgatgaattagataccgcgcgtcgtcgtaccggcggttcaatggcggctctgcaagcttctggcttcccggaaaagcaaatctataaagttccgactaaatctaatgatatccccggcgcatttgatgccgctaactccatgttagtacagcatccagaagtgaagaattggctgattgtcggcatgaacgataacaccgtattaggtggcgtgcgtgcaaccgaaggccaaggttttaaagcaccgaatgttattggcattggtatcaacggagttgatgccgtgagcgagctgtccaaaggccaggcgacgggtttctatggctctttattacctagcccggatatccatggctataaaagtattcagatgctgcatgactgggtcactaaagatgtcgaacctgcaaaatttactgaagtcaccgatgtggtgttgatcactcgggataacttcaaagccgagttagagaagaaaggcttattgtaa

SEQ ID NO: 2226 - protein, 327 aa, Yersinia pestis KIM
MHKLTKALAVVGLAAVMSHSAIAESMKLGFLVKQPEEPWFQTEWKFADKAGKDLGFEVIKIAVPDGEKTLNAIDSLAASGAQGFVICTPDPKLGPAIEAKARSYNLKVIAVDDQFVNAKGKPMESVPLVMMAATKIGERQGQELWKEMNKRGWQPAETAVMAITSDELDTARRRTGGSMAALQASGFPEKQIYKVPTKSNDIPGAFDAANSMLVQHPEVKNWLIVGMNDNTVLGGVRATEGQGFKAPNVIGIGINGVDAVSELSKGQATGFYGSLLPSPDIHGYKSIQMLHDWVTKDVEPAKFTEVTDVVLITRDNFKAELEKKGLL

SEQ ID NO: 2227 - DNA, 1014 bp, Pseudomonas syringae pv. tomato str. DC3000
  CDS (1)..(1014): transl_table=11
atgttgagtcgtcacgggattcgttccttgtgctgtgccgccgtcaccactgccattctcggcatgagtggtgttgcctctgctgctgaagaagtcaaaatcggcttcctggtcaagcaggctgaagagccttggttccagactgaatgggcatttgccgaaaaagccggcaaggagcatggttttacggtgctcaagattgccgtgccagacggtgaaaagaccctttccgctatcgacagcctggccgccaacggcgccaagggctttgtgatctgcccgcccgatgtttctctgggccctgcaatcgtggccaaggccaaggcgctcggcctgaaagtcatggccgtggacgatcgttttgtcgacgccaaaggcaattttatggaggacgtgccgtatctgggcatggcagccttcgaagtgggtcagaagcagggggccgccatggccaccgaagcgaagaaccgcaagtgggatgagggcggatggaaaggcacctacgcgatcatcaacacctacaacgaactggacaccggcaagaaacgcaccgacggttctgtgaaggcgcttgaagaggccggtttgccgaaagatcacatcctgttcaccgcgcagaaaacccttgatgttccgggcagcatggacgccaccaactcggcgctgccaaaactgccgggcgatgcgaaaaacctgatcatcggcggcatgaacgacaacaccgtactgggtggcgtacgcgctaccgccagcaacggtttcagcgccaaaaacgtgatcggtatcggcatcaacggcaccgatgccatcgacgaactgaagaaaaaggaaagcggcttctttggctcgatgctgccaagcccggacaaggaaggctacaacaccgcgctgtatatgtataagtgggtcaccgaaggtgtggagccgcctaaatacaccgccatggacgacgtgacattgatcacccgcgccaacttccaggaagtattgaccaagatcggtctgtggaagtga

SEQ ID NO: 2228 - protein, 337 aa, Pseudomonas syringae pv. tomato str. DC3000
MLSRHGIRSLCCAAVTTAILGMSGVASAAEEVKIGFLVKQAEEPWFQTEWAFAEKAGKEHGFTVLKIAVPDGEKTLSAIDSLAANGAKGFVICPPDVSLGPAIVAKAKALGLKVMAVDDRFVDAKGNFMEDVPYLGMAAFEVGQKQGAAMATEAKNRKWDEGGWKGTYAIINTYNELDTGKKRTDGSVKALEEAGLPKDHILFTAQKTLDVPGSMDATNSALPKLPGDAKNLIIGGMNDNTVLGGVRATASNGFSAKNVIGIGINGTDAIDELKKKESGFFGSMLPSPDKEGYNTALYMYKWVTEGVEPPKYTAMDDVTLITRANFQEVLTKIGLWK

SEQ ID NO: 2229 - DNA, 1002 bp, Vibrio parahaemolyticus RIMD 2210633
  CDS (1)..(1002): transl_table=11
atgaaattaaaaaaactactcacaatcgctgccctatctggcatgacaatgctcagtgcctctgctaacgctttttttggctccaatgacgataacgtcagacttggttacctcgtaaagcagccggaagagccttggtttcaaaccgagtggtcttttgcggaaaaagcagcgaagcaatacgattttgaattggtcaagatggccgtgcctgatggtgaaaaaacgctgaatgccattgatacgcttgctgccagcggggcgaaaggttttgtcatttgtacgccagatccaaagcttggtcctgcgattatggccaaagcgaaaagctacgatttgaaagtcattaccgttgatgatcagtttctaaacgcgaaaggcgaaccgatgaaagaggtgcctttagtgatgatggcggcgagtgaaattggttaccgtcagggctcagagctgtttaaggagatgacgaatcgtggatgggatgccgctacaacaggtgttatggccattactgctgacgaactagataccgctcgtcgccgtgtggatggttctgtaaaagcacttgaagatgctggctttcctaaatctcaaatctaccgtgttccgaccaaaacgaatgacatcccaggtgcgttagatgccgctaactcactgttggttcaatatccaaaggttaagcaatggctgattgttggtatgaacgacaacacggttttaggtggtgtacgcgcgactgaaggccaaggttttgccgctgaaaacgtgattggtattggtattaatggtgtcgatgccgtgaatgagttggcgaagtcaaacgctacgggtttctttggctcactattgccaagccctgacgtgcacggctttaagagcatcgaatcactttacaaatgggtgaaagaagatgtgcagccagagaagtttgtggaagtcaccgatgttgtgctgatcactcgcgacaacttccgtgaagagctacagaaaaaaggtctttaa

SEQ ID NO: 2230 - protein, 333 aa, Vibrio parahaemolyticus RIMD 2210633
MKLKKLLTIAALSGMTMLSASANAFFGSNDDNVRLGYLVKQPEEPWFQTEWSFAEKAAKQYDFELVKMAVPDGEKTLNAIDTLAASGAKGFVICTPDPKLGPAIMAKAKSYDLKVITVDDQFLNAKGEPMKEVPLVMMAASEIGYRQGSELFKEMTNRGWDAATTGVMAITADELDTARRRVDGSVKALEDAGFPKSQIYRVPTKTNDIPGALDAANSLLVQYPKVKQWLIVGMNDNTVLGGVRATEGQGFAAENVIGIGINGVDAVNELAKSNATGFFGSLLPSPDVHGFKSIESLYKWVKEDVQPEKFVEVTDVVLITRDNFREELQKKGL

SEQ ID NO: 2231 - DNA, 984 bp, Erwinia carotovora subsp. atroseptica SCRI1043
  CDS (1)..(984): transl_table=11
atgcataaattcactaaggcgctggcagcaatcgggttagccgctgttatgtcacaatcagctatggcagagaacataaaactgggatttctggttaagcagccggaagagccctggttccagaccgaatggaaattcgctgataaggcaggaaaagatctcggttttgatgtgataaaaattgcggttcctgacggggaaaaaaccctgaacgcaattgatagcctagcggccagcggggcgaaaggttttgttatttgtaccccagacccgaaattggggccggccattattgcaaaagcacgtagctataacctgaaagtgatcgcggttgatgaccagttcgtgaacgccaaaggtcagccaatggacacggtgccgttggtgatgatggcggccaccaaaattggtgagcgtcagggtcaggaactgtataaagagatgaacaaacgcggctggaaagtagacgaaaccggcgtgatggcgattaccgctgatgagctggacaccgcgcgccgtcgtactgctggttccatggatgcgctgaaggctgctggattcccagaaaaacagatctatcgggttccgaccaaatccaacgatatccccggtgcgtttgacgccgctaactccatgctggttcagcatcctggcgtgaaaaactggctgattatcggtatgaacgacaacaccgtactgggtggcgttcgtgcgacagaaggacagggctttaaagcggcaaacgtcattggtatcggtatcaacggcgtggatgcggtgagcgaactgtctaagggtcaggcaacgggcttctttggctcactgctgccaagcccagatattcacggctacaagagtatccagatgctgaatgactgggtcaccaaaggcgtggaaccggagaaattcaccgaagtgaccgacgtggtgctgatcactcgtgacaactttaaggtcgaactggagaaaaaaggcctgatgtaa

SEQ ID NO: 2232 - protein, 327 aa, Erwinia carotovora subsp. atroseptica SCRI1043
MHKFTKALAAIGLAAVMSQSAMAENIKLGFLVKQPEEPWFQTEWKFADKAGKDLGFDVIKIAVPDGEKTLNAIDSLAASGAKGFVICTPDPKLGPAIIAKARSYNLKVIAVDDQFVNAKGQPMDTVPLVMMAATKIGERQGQELYKEMNKRGWKVDETGVMAITADELDTARRRTAGSMDALKAAGFPEKQIYRVPTKSNDIPGAFDAANSMLVQHPGVKNWLIIGMNDNTVLGGVRATEGQGFKAANVIGIGINGVDAVSELSKGQATGFFGSLLPSPDIHGYKSIQMLNDWVTKGVEPEKFTEVTDVVLITRDNFKVELEKKGLM

SEQ ID NO: 2233 - DNA, 984 bp, Yersinia pseudotuberculosis IP 32953
  CDS (1)..(984): transl_table=11
atgcataaattaactaaggcgctggcagtagtcgggttagcggcggttatgtcacattcagctattgccgaaagtatgaaactgggctttctggttaagcaaccggaagaaccttggttccagactgaatggaagttcgctgataaggcgggtaaggatttaggctttgaagtgatcaaaattgccgtacctgatggcgagaaaaccctgaacgccatcgacagcctggcggccagtggcgcgaaaggtttcgttatctgtacaccagatccaaagctggggcctgccattgaagcaaaagcgcgcagttataacctgaaagtgattgccgttgatgaccaatttgtgaatgccaaaggcaaaccgatggagagtgttccgctggtgatgatggcagccactaaaattggtgaacgtcaggggcaggagttgtggaaagagatgaacaaacggggttggcaacccgctgaaacagcagtaatggcgatcacttctgatgaattagataccgcgcggcgtcgtaccggcggttcaatggcggctctgcaagcttctggcttcccggaaaagcaaatctataaagttccgactaaatctaatgatatccccggcgcatttgatgccgctaactccatgctagtacagcatccagaagtgaagaattggctgattgtcggcatgaacgataacaccgtattaggtggcgtgcgtgcaaccgaaggccaaggttttaaagcaccgaatgttattggcattggtatcaacggggttgatgccgtgagcgagctgtccaaaggccaggcgacgggtttctatggctctttattacctagcccggatatccatggctataaaagtattcagatgctgcatgactgggtcactaaagatgtcgaacctgcaaaatttactgaagtcaccgatgtggtgttgatcactcgggataacttcaaagccgagttagagaagaaaggcttattgtaa

SEQ ID NO: 2234 - protein, 327 aa, Yersinia pseudotuberculosis IP 32953
MHKLTKALAVVGLAAVMSHSAIAESMKLGFLVKQPEEPWFQTEWKFADKAGKDLGFEVIKIAVPDGEKTLNAIDSLAASGAKGFVICTPDPKLGPAIEAKARSYNLKVIAVDDQFVNAKGKPMESVPLVMMAATKIGERQGQELWKEMNKRGWQPAETAVMAITSDELDTARRRTGGSMAALQASGFPEKQIYKVPTKSNDIPGAFDAANSMLVQHPEVKNWLIVGMNDNTVLGGVRATEGQGFKAPNVIGIGINGVDAVSELSKGQATGFYGSLLPSPDIHGYKSIQMLHDWVTKDVEPAKFTEVTDVVLITRDNFKAELEKKGLL

SEQ ID NO: 2235 - DNA, 1014 bp, Mannheimia succiniciproducens MBEL55E
  CDS (1)..(1014): transl_table=11
atgaaattaagcaaaagaacatttcttaaatctctagttgcagtatctattctggcggtaaccggattgaattctaatcctgtatattccagctcggccgaacctattaaattgggctttttggtcaaacagcctgaagagccttggttccaaacggaatgggcgtttgccgacaaagccgcgcaggcgttaggtaacgttcaaataatcaaaatagccattcccgatggtgaaaaaaccttaaatgctattgataatttagctgctaacggggcgaaaggttttgttatttgtactccggacccgaaattaggtcctgccattatggcgaaagcccgtgcttatgacttaaaggttatcgcggtggatgaccagttcttaaatgccgccggcgaaccgatgaccaatgtgccgttaattatgatggcggcaagtgaaatcggccaacgtcagggcgaagaactttacaaagaaatgcaaaaccggaaatgggatgtgaaagataccgcggttttagccattaccgccgatgaactggataccgcccggcgccgtaccgaaggttctattgaggcattaatcaaagcgggtttcccaaaagaaaaaatttataaatcaccgactaaaagtaacgacatcccgggcgctcttgacgccgccaactctatgttagtgcaacatccggaagtaaaaaactggcttatcgtgggtatgaacgataacaccgtattaggcggtgtacgcgcaaccgaaggacaaggctttaaaccggaaaatgtcgtggctatcggtatcaatggtgtggatgcggttaatgaactttcaaaaccaagagccaccggattcttaggttcattattaccaagcccggatatccacggctatcgcagcgtagaacttcttaccaaatggatcagagaaggtgtggaaccggaaaaatatattgccgttcaggacgttgtgttcttaaaacgagacaattttaaagaagaactctccaagaaaggcctttaa

SEQ ID NO: 2236 - protein, 337 aa, Mannheimia succiniciproducens MBEL55E
MKLSKRTFLKSLVAVSILAVTGLNSNPVYSSSAEPIKLGFLVKQPEEPWFQTEWAFADKAAQALGNVQIIKIAIPDGEKTLNAIDNLAANGAKGFVICTPDPKLGPAIMAKARAYDLKVIAVDDQFLNAAGEPMTNVPLIMMAASEIGQRQGEELYKEMQNRKWDVKDTAVLAITADELDTARRRTEGSIEALIKAGFPKEKIYKSPTKSNDIPGALDAANSMLVQHPEVKNWLIVGMNDNTVLGGVRATEGQGFKPENVVAIGINGVDAVNELSKPRATGFLGSLLPSPDIHGYRSVELLTKWIREGVEPEKYIAVQDVVFLKRDNFKEELSKKGL

SEQ ID NO: 2237 - DNA, 996 bp, Burkholderia mallei ATCC 23344
  CDS (1)..(996): transl_table=11
atgaaacgcagaacgttcatcacgttggcggcagcggcggcggtcgcggcggcgggcctgcccgcgcaggcggccgagcccgtgaagatcggcttcctcgtcaagcagcccgaggagccgtggttccaggacgaatggaaattcgccgagctcgccgcgaaggacaagggcttcacgctcgtgaagatcggcgcgccgtccggcgagaaggtgatgagcgcgatcgacaatctcgccgcgcagaaggcgcagggcttcatcatctgcacgccggacgtgaagctcgggccgggcatcgtcgcgaaggcgaagtcgcacggcctgaagatgatgacggtcgatgaccggctcgtcgacggcgcgggcaagccgatcgaatcggttccgcacatgggcatttccgcgtacgacatcggcaagcaggtcggcggcgggatcgcggcggagatcaagaggcgcggctggaacatgaacgaagtcggcgcgatcgacatcacgtacgagcagttgccgaccgcgcacgaccgcacgacgggcgcgaccgacgcgctcgtcgccgcgggctttccgaaggcgaacgtgattgccgcgccgcaggcgaagaccgacaccgagaacgcgttcaacgcggcgaacatcgcgctcacgaagaatccgaagttcaagcactgggtcgcctacggcctgaacgacgaagcggtgctcggcgcggtgcgcgcggccgaagggcgcggcttcaaggcggccgacatgatcggcatcggcatcggcggctcggactcggcgctcagcgagttcaagaagccgcagccgaccggcttcttcggcaccgtgatcattagcccgaagcggcacggcgaagagacttccgagctgatgtacgcgtggatcacgcaaggcaaggcgccgccgccgctcacgctgacgacgggcatgctcgcgacgcgcgagaacgtcgcgcaggtgcgcgagacgatggggctcgcggcgaagtga

SEQ ID NO: 2238 - protein, 331 aa, Burkholderia mallei ATCC 23344
MKRRTFITLAAAAAVAAAGLPAQAAEPVKIGFLVKQPEEPWFQDEWKFAELAAKDKGFTLVKIGAPSGEKVMSAIDNLAAQKAQGFIICTPDVKLGPGIVAKAKSHGLKMMTVDDRLVDGAGKPIESVPHMGISAYDIGKQVGGGIAAEIKRRGWNMNEVGAIDITYEQLPTAHDRTTGATDALVAAGFPKANVIAAPQAKTDTENAFNAANIALTKNPKFKHWVAYGLNDEAVLGAVRAAEGRGFKAADMIGIGIGGSDSALSEFKKPQPTGFFGTVIISPKRHGEETSELMYAWITQGKAPPPLTLTTGMLATRENVAQVRETMGLAAK

SEQ ID NO: 2239 - DNA, 1002 bp, Burkholderia mallei ATCC 23344
  CDS (1)..(1002): transl_table=11
atgggattgcgctggccccaagccgccctcgtctgcgcgagcctcgccgccggtttgtcggcggcggcgcccgcacatgcgcaaggcgcggccccggtgaagatcggcttcgtcgtcaagcagcccgacgacccgtggtttcaggacgaatggcgcttcgccgagcaggcggcgaaggacaagcacttcacgctcgtgaagatcgccgcgccgagcggcgagaaggtgtcgaccgcgctcgacagcctcgccgcgcaaaaggcgcagggcgtgatcatctgcgcgcccgacgtgaagctcggccccggcatcgccgcgaaggcgaggcgctacgggatgaagctgatgtcggtcgacgatcagctcgtcgacgggcgcggcgcgccgctcgccgacgtgccgcacatgggcatttccgcataccggatcggccggcaggtcggcgatgcgatcgccgccgaggcgaagcggcgcggctggaatccggccgaggtcggcgtgctgcgcctcgcgtacgaccagttgccgaccgcccgcgagcgcacgacgggcgcggtcgatgcgctgaaggccgcgggcttcgctgcggcgaacgtcgtcgacgcgccggagatgacggccgataccgaaggcgcgttcaacgccgcgaacatcgcgttcaccaagcatcggaacttcaagcactgggtggcgttcggatcgaatgacgacacgacggtcggcgctgtgcgcgcgggcgaggggcgcggcatcggggcggacgacatgatcgcggtcggcatcaacggcagccaggtcgcgctgaacgaattcgcgaaaccgaagccgacgggctttttcggctcgatcctgctgaatccgcggctgcacggctacgacacgtcggtcaacatgtacgactggatcacgcagaaccgcgcgccgccgccggtcgtgctgacgtccggcacgctgatcacgcgcgcgaacgaaaagacggcgcgcgcgcagctcgggctgtga

SEQ ID NO: 2240 - protein, 333 aa, Burkholderia mallei ATCC 23344
MGLRWPQAALVCASLAAGLSAAAPAHAQGAAPVKIGFVVKQPDDPWFQDEWRFAEQAAKDKHFTLVKIAAPSGEKVSTALDSLAAQKAQGVIICAPDVKLGPGIAAKARRYGMKLMSVDDQLVDGRGAPLADVPHMGISAYRIGRQVGDAIAAEAKRRGWNPAEVGVLRLAYDQLPTARERTTGAVDALKAAGFAAANVVDAPEMTADTEGAFNAANIAFTKHRNFKHWVAFGSNDDTTVGAVRAGEGRGIGADDMIAVGINGSQVALNEFAKPKPTGFFGSILLNPRLHGYDTSVNMYDWITQNRAPPPVVLTSGTLITRANEKTARAQLGL

SEQ ID NO: 2241 - DNA, 996 bp, Burkholderia pseudomallei K96243
  CDS (1)..(996): transl_table=11
atgaaacgcagaacgttcatcacgctggcggcagcggcgacggtcgcggcggcgggcctgcccgcgcaggcggccgagcccgtgaagatcggcttcctcgtcaagcagcccgaggagccgtggttccaggacgaatggaaattcgccgagctcgccgcgaaggacaagggcttcacgctcgtgaagatcggcgcgccgtccggcgagaaggtgatgagcgcgatcgacaatctcgccgcgcagaaggcgcagggcttcatcatctgcacgccggacgtgaagctcgggccgggcatcgtcgcgaaggcgaagtcgcacggcctgaagatgatgacggtcgatgaccggctcgtcgacggcgcgggcaagccgatcgaatcggttccgcacatgggcatttccgcgtacgacatcggcaagcaggtcggcggcgggatcgcggcggagatcaagaggcgcggctggaacatgaacgaagtcggcgcgatcgacatcacgtacgagcagttgccgaccgcgcacgaccgcacgacgggcgcgaccgacgcgctcgtcgccgcgggctttccgaaggcgaacgtgattgccgcgccgcaggcgaagaccgacaccgagaacgcgttcaacgcggcgaacatcgcgctcacgaagaatccgaagttcaagcactgggtcgcctacggcctgaacgacgaagcggtgctcggcgcggtgcgcgcggccgaagggcgcggcttcaaggcggccgacatgatcggcatcggcatcggcggctcggactcggcgctcagcgagttcaagaagccgcagccgaccggcttcttcggcaccgtgatcatcagcccgaagcggcacggcgaagagacttccgagctgatgtacgcgtggatcacgcaaggcaaggcgccgccgccgctcacgctgacgacgggcatgctcgcgacgcgcgagaacgtcgcgcaggtgcgcgagacgatggggctcgcggcgaagtga

SEQ ID NO: 2242 - protein, 331 aa, Burkholderia pseudomallei K96243
MKRRTFITLAAAATVAAAGLPAQAAEPVKIGFLVKQPEEPWFQDEWKFAELAAKDKGFTLVKIGAPSGEKVMSAIDNLAAQKAQGFIICTPDVKLGPGIVAKAKSHGLKMMTVDDRLVDGAGKPIESVPHMGISAYDIGKQVGGGIAAEIKRRGWNMNEVGAIDITYEQLPTAHDRTTGATDALVAAGFPKANVIAAPQAKTDTENAFNAANIALTKNPKFKHWVAYGLNDEAVLGAVRAAEGRGFKAADMIGIGIGGSDSALSEFKKPQPTGFFGTVIISPKRHGEETSELMYAWITQGKAPPPLTLTTGMLATRENVAQVRETMGLAAK

SEQ ID NO: 2243 - DNA, 1014 bp, Pseudomonas syringae pv. syringae B728a
  CDS (1)..(1014): transl_table=11
atgttgagtcgtcacgggattcgttccctgtgctgtgccgctgtcactaccgccattctgggcatgagtggcatcacctccgctgccgaagaagtcaaaatcggctttctggtcaagcaggccgaagagccgtggttccaggccgaatgggcaggtgccgaaaaagccggcaaggagcatggctttaccgtcatcaagattgccgtgccagacggtgaaaagaccctgaccgctatcgataacctcgccgccaacggtgccaagggtttcgtgatctgcccgcctgacgtgtcgctcggccctgcgatcgtggccaaggccaaagcgctggggttgaaagtcatggctgtggatgatcgctttgtcgacgccaagggcaacttcatggaggacgtgccttacctgggcatggctgcctttgaagtaggccagaagcagggcgtcgaaatggccaaggaagcgaaaaatcgcaagtgggacaaggatggctggaaaggcacctacgcgatcatcaacacttataacgagctggataccggcaagaaacgcacggatggttcggtgaagtcgcttgaggaagccggcttgccgaaggaccatatcgtcttcaccgcacagaaaaccctcgatgtgccaggtagcatggacgccaccaactcggcgctgccaaaactgccaggcgatgccaagaggctgatcatcggcggtatgaacgacaacaccgtattgggtggggtacgtgcgacttctaccaatggctttgaagcggatgacgtgatcgggatcggtatcaacggcaccgatgcgatcgacgaactcaagaagaaagaaagcggcttctttggctctatgctgccgaaccctggcaaagagggttatgacaccgcgttgcatgtttacgagtgggccaccaagggcacagaaccacccaagtacaccgccctggacgacgtgacactgatcaagcgcaccaacttccaggaaatactgaccgagcgtggtctgtggaagtga

SEQ ID NO: 2244 - protein, 337 aa, Pseudomonas syringae pv. syringae B728a
MLSRHGIRSLCCAAVTTAILGMSGITSAAEEVKIGFLVKQAEEPWFQAEWAGAEKAGKEHGFTVIKIAVPDGEKTLTAIDNLAANGAKGFVICPPDVSLGPAIVAKAKALGLKVMAVDDRFVDAKGNFMEDVPYLGMAAFEVGQKQGVEMAKEAKNRKWDKDGWKGTYAIINTYNELDTGKKRTDGSVKSLEEAGLPKDHIVFTAQKTLDVPGSMDATNSALPKLPGDAKRLIIGGMNDNTVLGGVRATSTNGFEADDVIGIGINGTDAIDELKKKESGFFGSMLPNPGKEGYDTALHVYEWATKGTEPPKYTALDDVTLIKRTNFQEILTERGLWK

SEQ ID NO: 2245 - DNA, 1014 bp, Pseudomonas syringae pv. phaseolicola 1448A
  CDS (1)..(1014): transl_table=11
atgttgagtcgtcacgggattcgttccctgtgctgtgccgccgtcaccaccgccattctgggcatgagtggcatcacctccgctgctgatgaagtcaaaatcggctttctggtcaaacaggctgaagagccatggttccagactgaatgggcgtttgctgaaaaggcaggcaaggagcatggttttaccgtgctcaagattgccgtgccagatggtgaaaagaccctttccgctatcgacagcctggccgccaacggtgccaagggctttgtgatctgcccgcctgatgtctctctgggccctgcaatcgtggccaaggccaaggcgctcggtttgaaagtcatggccgtggacgatcgttttgtcgacgccaacggcaaattcatggaggacgtgccatatctgggcatggcagcctttgaagtgggccagaagcaaggtgccgcgatggccaccgaagcgaagaaccgcaagtgggatgagggcgggtggaaaggcacctacgcgatcatcaacacttacaacgagctcgacaccggtaagaaacgtactgatggttcggtgaaggcgctagaagaggccggtttgccgaaagatcacatcctgttcaccgcgcagaaaactcttgatgtaccaggcagcatggacgccaccaactcggcgctgccaaaactgcctggcgatgcgaaaaacctgatcatcggcggcatgaacgacaacactgttctggggggcgtacgcgcgacggcgagcaatggtttcagcgcgaaaaacgttatcgggatcggcatcaacggcaccgatgccattgatgagctgaagaaaaaagagagtggcttctttggctccatgctgccaagcccggacaaggaaggctacaacaccgcgctgtatatgtataaatgggtcaccgagggcgttgaaccgcctaaatataccgctatggacgatgtgacactgatcacccgcgccaacttccaggaagtattgaccaagatcggtttgtggaagtga

SEQ ID NO: 2246 - protein, 337 aa, Pseudomonas syringae pv. phaseolicola 1448A
MLSRHGIRSLCCAAVTTAILGMSGITSAADEVKIGFLVKQAEEPWFQTEWAFAEKAGKEHGFTVLKIAVPDGEKTLSAIDSLAANGAKGFVICPPDVSLGPAIVAKAKALGLKVMAVDDRFVDANGKFMEDVPYLGMAAFEVGQKQGAAMATEAKNRKWDEGGWKGTYAIINTYNELDTGKKRTDGSVKALEEAGLPKDHILFTAQKTLDVPGSMDATNSALPKLPGDAKNLIIGGMNDNTVLGGVRATASNGFSAKNVIGIGINGTDAIDELKKKESGFFGSMLPSPDKEGYNTALYMYKWVTEGVEPPKYTAMDDVTLITRANFQEVLTKIGLWK

SEQ ID NO: 2247 - DNA, 1005 bp, Pseudomonas fluorescens PfO-1
  CDS (1)..(1005): transl_table=11
atgaaacgtcgtttcgggattcgtaccctgtgcagtaccgcgctggcggtcactgcgttcagcctgagcagtgccctgctggccgccgatccggtgaagatcgggtttctggtcaagcaggccgaagagccgtggttccagactgaatgggccttcgccgagaaagctgccaaagacaaaggcttcgagctgatcaagatcgccgtgccggacggcgagaaaaccctctccgctatcgacagccttgcggccaacggcgccaagggcttcgtcatctgcccgccggacgtgtcgctcggcccggcgatcatggccaaggccaagctcaacgacctgaaagtgatcgccgtcgacgaccgtttcgtagatgccaacggcaagttcatggaagacgtgccgtacctcggcatggccgccttcgaagtcggccagaagcagggtgccgccatggccgccgaggcgaaaaagcgtaactgggactggaaagacacctacgcggtggtcaacacctacaacgaactcgacaccggcaagaagcgcaccgacggctcgatgaaggccctcgaagaggccggcgtgccgaaagagcacattctgaccgccgctctgaaaaccctcgacgtaccgggcagcatggacgccaccaactcggcgctggtcaagctgccgagtgcggcgaagaacctgatcatcggcggcatgaacgacaacactgtgctgggcggcgtgcgcgccactgaagccgccggttttgccgcggccaacgtgatcggcatcggcatcaacggcaccgacgcgatcggcgagctgaaaaagcccaacagcggcttctacggttcgatgctgccgagcccgcacatcgaaggctacaagaccgccgagatgatgtacgagtgggtcaccaccggcaaagaaccgccgaagtacaccgcaatggacgacgtcaccctgatcacccgcgacaacttcaagcaggagctggagaagatcggtctgtggaactga

SEQ ID NO: 2248 - protein, 334 aa, Pseudomonas fluorescens PfO-1
MKRRFGIRTLCSTALAVTAFSLSSALLAADPVKIGFLVKQAEEPWFQTEWAFAEKAAKDKGFELIKIAVPDGEKTLSAIDSLAANGAKGFVICPPDVSLGPAIMAKAKLNDLKVIAVDDRFVDANGKFMEDVPYLGMAAFEVGQKQGAAMAAEAKKRNWDWKDTYAVVNTYNELDTGKKRTDGSMKALEEAGVPKEHILTAALKTLDVPGSMDATNSALVKLPSAAKNLIIGGMNDNTVLGGVRATEAAGFAAANVIGIGINGTDAIGELKKPNSGFYGSMLPSPHIEGYKTAEMMYEWVTTGKEPPKYTAMDDVTLITRDNFKQELEKIGLWN

SEQ ID NO: 2249 - DNA, 996 bp, Burkholderia sp. 383
  CDS (1)..(996): transl_table=11
atgaaacgcagaacgttcgtaacgctggccgccgcggccgcggtggtgatcgggagccccgtcgtgcatgcggccgatccggtcaagatcggcttcctggtgaagcagccggaagagccgtggttccaggacgagtggaagtttgccgagatggccgcgaagcagaagggcttcacgctggtgaagatcggcgcgccgtccggtgaaaaggtgatgagcgcgatcgacaacctgtccgcgcagaaggcgcagggcttcatcatctgcacgcccgacgtgaagctcgggccgggcatcgtcgcgaaggcgaagtcgcacaacctgaagatgatgacggtggacgaccgcctcgtcgacggcgcgggcaagccgatcgagtcggtcccgcacatgggcatttccgcgtacaacatcggcaagcaggtcggcgacggcatcgcggccgagatcaagaagcgcggctgggacatgaaggacgtcggcgcgatcgacatcacctacgagcagttgccgaccgcgcacgaccgcacgagcggcgcgaccgacgcgctggtggccgccggcttcccgaaggcgaacgtgatcgcggcgccgcaggcgaagaccgacacggagaacgcattcaacgcggcgaacatcgcgctcacgaagaatccgcagttcaagcactgggtggcgtacggcctgaacgacgaagccgtgctcggcgctgtgcgcgcggccgaagggcgcggcttcaaggcggacaacatgatcggcatcggcatcggcggttccgattcggcgctgaacgagttcaagaaaccgcagccgacgggcttctacggcaccgtgatcatcagcccgaagcgtcacggcgaggaaacctcggacctgatgtacacgtggatcacgcagggcaaggcaccgccggcgctgacgctgacgaccggcatgctcgcgacgcgcgacaacgtgtcgaaggtgcgcgacgagatggggctcgcgtcgaagtaa

SEQ ID NO: 2250 - protein, 331 aa, Burkholderia sp. 383
MKRRTFVTLAAAAAVVIGSPVVHAADPVKIGFLVKQPEEPWFQDEWKFAEMAAKQKGFTLVKIGAPSGEKVMSAIDNLSAQKAQGFIICTPDVKLGPGIVAKAKSHNLKMMTVDDRLVDGAGKPIESVPHMGISAYNIGKQVGDGIAAEIKKRGWDMKDVGAIDITYEQLPTAHDRTSGATDALVAAGFPKANVIAAPQAKTDTENAFNAANIALTKNPQFKHWVAYGLNDEAVLGAVRAAEGRGFKADNMIGIGIGGSDSALNEFKKPQPTGFYGTVIISPKRHGEETSDLMYTWITQGKAPPALTLTTGMLATRDNVSKVRDEMGLASK

SEQ ID NO: 2251 - DNA, 1014 bp, Burkholderia sp. 383
  CDS (1)..(1014): transl_table=11
atgaaccgcacgacccacacgatccgccgccatacgttgcgcgcgctgctcgccgcgctttgcatcgcaccgctcggcatgcagggcgccgcgcgcgccgacgcgccgctgaagatcggcttcctggtgaagatgcccgagcaggcgtggttcatcaacgagcagaacgccgcgtccgcgctcggccagaaggagaacttctcggtcgtgaagatcggcacgcctgacggcgagaaggtgctcgccgcgattgacaacctcggctcgcagggcgcacaaggcttcgtgatctgcgcgccggacgtgcgcctcggcccggcaatcgccgcgcgtgcgaagcgctacaacatgaagttcgtgaccgtagacgaccagctcgtcgattcgaccggcaagccgctgccgaacgtgccgcacctcgggatgtcggcgaccaagatcggcaaccaggtcggccaggccattgccgacgagatgaagcggcgcggctggaagcccgaggaagtcggtgcgctgcggatcacgaactacgagctgccgaccgcgaagctgcgcaccgacggcgcgacgcaggcgctgctcgcgaacggcttccgcaaggagaacatcttcgacgcgccgcagaagacgaccgacgacgaaggcggtttcagcgcggccgcgccggtgctcgcgcgccatccgaacgtgaagaagtgggtggtctacgcgctgaacgaggaaaccgtgctcggcgcggtgcgcgcgaccgagcagctgcatatcccggcggccgacgtgatcggcgtgggcatcaacggtgcgggcgaggcgttcgccgaattccagaagaaggagccgaccggcttctacgggacgatcgccgtcagctcgacgaaccacggcaaggacagcacgcagaacctcgtcgactggatccgcaacggcaagacgccggcgcccgacacgcagacgagcggcaagctgatgacgcgcgcgaactggcaggccgtgcgtaccgagctcggcatctga

SEQ ID NO: 2252 - protein, 337 aa, Burkholderia sp. 383
MNRTTHTIRRHTLRALLAALCIAPLGMQGAARADAPLKIGFLVKMPEQAWFINEQNAASALGQKENFSVVKIGTPDGEKVLAAIDNLGSQGAQGFVICAPDVRLGPAIAARAKRYNMKFVTVDDQLVDSTGKPLPNVPHLGMSATKIGNQVGQAIADEMKRRGWKPEEVGALRITNYELPTAKLRTDGATQALLANGFRKENIFDAPQKTTDDEGGFSAAAPVLARHPNVKKWVVYALNEETVLGAVRATEQLHIPAADVIGVGINGAGEAFAEFQKKEPTGFYGTIAVSSTNHGKDSTQNLVDWIRNGKTPAPDTQTSGKLMTRANWQAVRTELGI

SEQ ID NO: 2253 - DNA, 996 bp, Burkholderia sp. 383
  CDS (1)..(996): transl_table=11
atgcgattccactggaagacgctcgcactggccatggcgagcgcggcgctggtcggcggggtacccgcccatgccgccgaccccgccgacgtgaaaatcggcttcctcgtcaaacagccggacgatccgtggttccaggacgaatggcgcttcgccgaccaggcggcgaaggaaaagcacttcacgctgatcaagatcgcgacgccgagcggtgaaaaggtgtcgaccgcactcgacagcctcgccgcgcaaaaggcccaaggcgtgatcatctgcgcacccgacgtgaagctcggccccggcatcgcggcgaaggcgaagcgcgcggggatcaagctgatgtcggtcgacgaccagctcgtcgacggccgcggcgcgccgctccagggcgtgccgcacatgggcatctccgcgtacaagatcggccagcaggtcggccaggcgatcgcggacgaaacgaagcggcgcggctggaatccggccgaggtcggcatcatccggatcgcgtacgaccagttgccgaccgcgaaagagcgcaccaccggcgcggtcgacgcgctcaaggctgccggctttccggccgcgaacgtgatcgatgcccccgaaatgacggccgataccgaaggcgcgttcaacgcagcgaacatcgcgctcaccaagcacgcgaatttcaagcgctgggtggcattcggctcgaacgacgacacgacggtcggtgcggtacgtgccgccgaggggcgcggcatcggcgccgacgcgatggtcgcggtcggcatcaacggcagccaggtcgcgctcaacgaattcgcgaagccgaagccaacgggcttctacggctcgatcctgctgaatccgcgccagcacggctaccagacgagcatcaacatgtatgactggatcacgaagaaccaggcgccgccgccgctcgtgctgacgtccggcacgctgatcacgcgcgacaacgaaaagcaggcgcgcgccgcgctcggcctgtga

SEQ ID NO: 2254 - protein, 331 aa, Burkholderia sp. 383
MRFHWKTLALAMASAALVGGVPAHAADPADVKIGFLVKQPDDPWFQDEWRFADQAAKEKHFTLIKIATPSGEKVSTALDSLAAQKAQGVIICAPDVKLGPGIAAKAKRAGIKLMSVDDQLVDGRGAPLQGVPHMGISAYKIGQQVGQAIADETKRRGWNPAEVGIIRIAYDQLPTAKERTTGAVDALKAAGFPAANVIDAPEMTADTEGAFNAANIALTKHANFKRWVAFGSNDDTTVGAVRAAEGRGIGADAMVAVGINGSQVALNEFAKPKPTGFYGSILLNPRQHGYQTSINMYDWITKNQAPPPLVLTSGTLITRDNEKQARAALGL

SEQ ID NO: 2255 - DNA, 1002 bp, Burkholderia thailandensis E264
  CDS (1)..(1002): transl_table=11
atgggattgcgttggcttcaagccgccctcgtctgcacgagtctcgccgccggtttgtcggcggcggcacccgcgcgtgcgcaaggcgcggccccggtgaagatcggctttgtcgtcaagcagcccgacgacccgtggtttcaggacgaatggcgcttcgccgagcaggcggcgaaggacaagcacttcacgctcgtgaagatcgccgcgccgagcggcgagaaagtgtcgaccgcgctcgacagccttgccgcgcaaaaggcgcaaggcgtgatcatctgcgcgcccgacgtgaagctcggtcccggcatcgccgcgaaggcgaagcgctacggaatgaagctgatgtcggtcgacgatcaactcgtcgacgggcgcggcgcgccgcttgccgacgtgccgcacatgggcatctccgcctaccggatcggccggcaggtcggcgacgcgatcgccgccgaggcgaagcggcgcggctggaatccggccgaggtcggcgtgctgcggctcgcgtacgaccagttgccgaccgcgcgcgagcgcacgacgggcgcggtcgacgcgctgaaggcggccggctttgcggccgcgaacgtcgtcgacgcgccggagatgacggccgacaccgaaggcgcgttcaacgccgcgaacatcgcgttcaccaagcaccggaacttcaggcactgggtggcgttcggatcgaatgacgacacgacggtcggcgcggtgcgcgcgggcgaaggccgcggcatcggcacggacgacatgatcgcggtcggcatcaacggcagccaggtcgcgctgaacgaattcgcgaaaccgaagccgacgggctttttcggctcgatcctgctgaatccgcggctgcacggctacgacacgtcggtcaacatgtacgactggatcacgcagaaccggacgccgccgccgctcgtgctgacctccggcacgctgatcacgcgcgcgaacgagaagacggcgcgcgcgcagctcgggctgtga

SEQ ID NO: 2256 - protein, 333 aa, Burkholderia thailandensis E264
MGLRWLQAALVCTSLAAGLSAAAPARAQGAAPVKIGFVVKQPDDPWFQDEWRFAEQAAKDKHFTLVKIAAPSGEKVSTALDSLAAQKAQGVIICAPDVKLGPGIAAKAKRYGMKLMSVDDQLVDGRGAPLADVPHMGISAYRIGRQVGDAIAAEAKRRGWNPAEVGVLRLAYDQLPTARERTTGAVDALKAAGFAAANVVDAPEMTADTEGAFNAANIAFTKHRNFRHWVAFGSNDDTTVGAVRAGEGRGIGTDDMIAVGINGSQVALNEFAKPKPTGFFGSILLNPRLHGYDTSVNMYDWITQNRTPPPLVLTSGTLITRANEKTARAQLGL

SEQ ID NO: 2257 - DNA, 1023 bp, Burkholderia thailandensis E264
  CDS (1)..(1023): transl_table=11
atgacaaggagacgcaccatgacccgcacgattcgccgactgaccctgcgcgccgcgttcgcggcgctcgtgatcgcgccgctcgcgatgcccgccgcgacccgcgcggacacgccgctgaagatcggtttcctcgtgaagatgcccgagcaggcgtggttcatcaacgagcagaaggccgcgacggcgctcggccagaaggaaggcttctcggtcgtcaacatcggcacgccggacggcgagaaggtgctcgcggcgatcgacaacctcggctcgcagggcgcgcagggcttcgtgatctgcgcgccggacgtgcgtctcgggccggcgatcgccgcgcgcgcgaaacgctacgacatgaagttcgtgaccgtcgacgaccagctcgtcgattcgtcgggcaagccgctcgcgaacgtgccgcacctcggcatgtcggcgacgaagatcggcaaccaggttggccaggcgatcgccgacgagatgaaaaagcgcggctggaagccggaggaggtcggcgcgctgcgcgtgacgaactacgagctgccgaccgcgaagctgcgcaccgacggcgcgacgcaggcgctgctcgcgagcggcttcaagaaggagaacatcttcgacgcgccgcagaagacgaccgacgacgaaggcggcttcagcgcggcggcgcccgtgctcgcgcggcatccgaacgtgaagaagtgggtgatcttcgcgctgaacgaggaaacggtgctgggcgcggtgcgcgcgaccgagcagttgcacattccggcggcggacgtgatcggcgtgggcatcaacggcgcgggcgaggcgttcgccgaattccagaagaaggagccgacgggcttcttcggcacgatcgcggtcagctcgacgaaccacggcaagcagagcgcgcagaacctcgtcgactggattcgcagcggcaaggcgccgcccgccgatacgcagacgagcggcaagctgatgacgcgcgagaactggcaggcggtgcgcgccgagctgggcatctga

SEQ ID NO: 2258 - protein, 340 aa, Burkholderia thailandensis E264
MTRRRTMTRTIRRLTLRAAFAALVIAPLAMPAATRADTPLKIGFLVKMPEQAWFINEQKAATALGQKEGFSVVNIGTPDGEKVLAAIDNLGSQGAQGFVICAPDVRLGPAIAARAKRYDMKFVTVDDQLVDSSGKPLANVPHLGMSATKIGNQVGQAIADEMKKRGWKPEEVGALRVTNYELPTAKLRTDGATQALLASGFKKENIFDAPQKTTDDEGGFSAAAPVLARHPNVKKWVIFALNEETVLGAVRATEQLHIPAADVIGVGINGAGEAFAEFQKKEPTGFFGTIAVSSTNHGKQSAQNLVDWIRSGKAPPADTQTSGKLMTRENWQAVRAELGI

SEQ ID NO: 2259 - DNA, 1008 bp, Burkholderia thailandensis E264
  CDS (1)..(1008): transl_table=11
atgaaacgcagaacgttcatcacgctggcggcagcggcagcggcagcggcggcggtcgcggcggcgggcctgtccgcgcacgcggccgagcccgtgaagatcggcttcctcgtcaagcagcccgaggagccgtggttccaggacgaatggaaattcgccgagatcgccgcgaaggacaagggcttcacgctcgtgaagatcggcgcgccgtccggcgagaaggtgatgagcgcgatcgacaatctcgccgcgcagaaggcgcagggcttcatcatctgcacgccggacgtgaagctcgggccgggcatcgtcgcgaaggcgaagtcgcacggcctgaagatgatgacggtcgacgaccggctcgtcgacggcgcgggcaagccgatcgaatcggtcccgcacatgggcatttccgcgtacgacatcggcaagcaggtcggcggcgggatcgcggccgagatcaagaagcgcggctggaacatgaacgaagtcggcgcgatcgacatcacgtacgagcagttgccgaccgcgcacgaccgcacggcgggcgcgaccgacgcgctcgtcgccgcgggctttccgaaggcgaacgtgatcgccgcgccgcaggcgaagaccgataccgaaaacgcgttcaacgcggcgaacatcgcgctcacgaagaatccgaagttcaagcattgggtcgcctacggcctgaacgacgaggcggtgctcggcgctgtgcgcgcggccgaagggcgcggcttcaaggcggcggacatgatcggcatcggcatcggcgggtcggactcggcgctcagcgagttcaagaagccgcagccgacgggcttcttcggcaccgtgatcatcagcccgaagcgacacggcgaagagacgtcggagctgatgtatgcgtggatcacgcgaggcaaggcgccgccgccgctcacgctcacgacgggcatgctcgcgacgcgcgagaacgtcgcgcaggtgcgcgagacgatggggctcgcggcgaagtag

SEQ ID NO: 2260 - protein, 335 aa, Burkholderia thailandensis E264
MKRRTFITLAAAAAAAAAVAAAGLSAHAAEPVKIGFLVKQPEEPWFQDEWKFAEIAAKDKGFTLVKIGAPSGEKVMSAIDNLAAQKAQGFIICTPDVKLGPGIVAKAKSHGLKMMTVDDRLVDGAGKPIESVPHMGISAYDIGKQVGGGIAAEIKKRGWNMNEVGAIDITYEQLPTAHDRTAGATDALVAAGFPKANVIAAPQAKTDTENAFNAANIALTKNPKFKHWVAYGLNDEAVLGAVRAAEGRGFKAADMIGIGIGGSDSALSEFKKPQPTGFFGTVIISPKRHGEETSELMYAWITRGKAPPPLTLTTGMLATRENVAQVRETMGLAAK

SEQ ID NO: 2261 - DNA, 999 bp, Burkholderia xenovorans LB400
  CDS (1)..(999): transl_table=11
atgaaacgtagaattttcctcacgctggcagcagcggcggcgggtgtgctcttcaacgcaccggtcgcgcaggccgctgatccggtgaagatcggtttcctcgtgaagcagccggaagagccgtggttccaggacgagtggaagttcgccgagatcgccgccaaagagaagggcttcacgctggtgaagatcggcgcgccgtcgggcgagaaggtgatgagcgccatcgacaacctggcggcgcagaaggcgcaaggcttcgtgatctgcacgcctgacgtcaagctcggaccgggcatcgtcgcgaaagcgaaagccgacggcctgaagatgatgacggtggacgaccgtctggtcgacggcgcgggcaagccgatcgcgtcggtgccgcatatgggcatctcggcgtacaacatcggcaagcaggtcggcgacggcctggctgccgaaatcaagaagcgcggctgggacatgaaggacgtgggcgcgatcgacgtgacctacgaacagttgcccaccgcgcatgaccgcaccagcggcgcaaccgacgcactggtcgccgccggcttcccgaaagcgaacgtgatcgccgcgccgcaagcgaagaccgacacggaaaacgcgttcaacgcggccaacatcgcgctgacgaagaatccgaacttcaagcactgggtcgcctacggtctgaacgacgaagccgtgctcggcgcggtgcgcgcagcggaagggcgcggcttcaaggcggacaacatgatcggtatcggcatcggcggttcggactcggcactcaacgagttcaagaagccgtcgccgacgggcttctacggcacggtgatcatcagcccgaagcgccacggcgaggaaacctccacgctgatgtacgactggatcacgcaaggcaaggcaccgccgccgctgaccctgaccaccggcatgctggccacgcgtgacaacgtcgcggatgtgcgccagaagatgggcctcgcggccaactaa

SEQ ID NO: 2262 - protein, 332 aa, Burkholderia xenovorans LB400
MKRRIFLTLAAAAAGVLFNAPVAQAADPVKIGFLVKQPEEPWFQDEWKFAEIAAKEKGFTLVKIGAPSGEKVMSAIDNLAAQKAQGFVICTPDVKLGPGIVAKAKADGLKMMTVDDRLVDGAGKPIASVPHMGISAYNIGKQVGDGLAAEIKKRGWDMKDVGAIDVTYEQLPTAHDRTSGATDALVAAGFPKANVIAAPQAKTDTENAFNAANIALTKNPNFKHWVAYGLNDEAVLGAVRAAEGRGFKADNMIGIGIGGSDSALNEFKKPSPTGFYGTVIISPKRHGEETSTLMYDWITQGKAPPPLTLTTGMLATRDNVADVRQKMGLAAN

SEQ ID NO: 2263 - DNA, 1005 bp, Burkholderia vietnamiensis G4
  CDS (1)..(1005): transl_table=11
atgaaccgcacgattcgccgacacaccctgcgcgcgctgctcgccgcgctttgcatcgcgccgctcgggatgcagggcgccgcccacgccgacgcgccgttgaagatcggcttcctggtgaagatgcccgagcaggcatggttcatcaacgagcagaacgcggccgccgcgctcggccagaaggagaacttctcggtcgtgaagatcggcacgccggacggcgagaaggtgctggccgcgatcgacaacctcggctcgcagggcgcgcagggcttcgtgatctgcgcgccggacgtgcgcctcgggccggcgatcgccgcgcgcgcgaagcgctacaacatgaagttcgtgacggtcgacgaccagctcgtcgactcgaccggcaagccgctgccgaacgtgccgcacctcggcatgtcggcgaccaagatcggcaaccaggtcggccaggcgatcgccgacgagatgaagcggcgcggctggaagcccgaggaagtcggcgcgctgcgcatcaccaactacgagctgccgaccgccaagctacgcaccgacggcgcgacgcaggcgctgctcgcgaacggcttccgcaaggagaacattttcaacgcgccgcagaagacgaccgacgacgaaggcggcttcagcgcggccgcgccggtgctcgcgcgccatccgaacgtgaagaaatgggtcgtctacgcgctcaacgaggagaccgtgctcggcgcggtgcgcgcgaccgaacagctgcacatcccggccgcggacgtgatcggcgtcggcatcaacggtgcgggcgaggcgttcgccgagttccagaagaaggagccgaccggcttctacgggacgatcgcggtcagctcgacgaaccacggcaaggacagcacgcagaacctcgtcgactggatccgcaacggcaagatgccgccggccgacacgcagacgagcggcaagctgatgacgcgcgcgaactggcaggccgtgcgcgccgagctgggcatctga

SEQ ID NO: 2264 - protein, 334 aa, Burkholderia vietnamiensis G4
MNRTIRRHTLRALLAALCIAPLGMQGAAHADAPLKIGFLVKMPEQAWFINEQNAAAALGQKENFSVVKIGTPDGEKVLAAIDNLGSQGAQGFVICAPDVRLGPAIAARAKRYNMKFVTVDDQLVDSTGKPLPNVPHLGMSATKIGNQVGQAIADEMKRRGWKPEEVGALRITNYELPTAKLRTDGATQALLANGFRKENIFNAPQKTTDDEGGFSAAAPVLARHPNVKKWVVYALNEETVLGAVRATEQLHIPAADVIGVGINGAGEAFAEFQKKEPTGFYGTIAVSSTNHGKDSTQNLVDWIRNGKMPPADTQTSGKLMTRANWQAVRAELGI

SEQ ID NO: 2265 - DNA, 996 bp, Burkholderia vietnamiensis G4
  CDS (1)..(996): transl_table=11
atgaaacgcagaaccttcgtaacactggccgcggcggccgcggtggtgatcggcagcccgctcgcgcaggcggccgatccggtcaagatcggcttcctcgtgaagcagccggaagagccgtggttccaggacgaatggaagttcgccgagatcgccgccaaggaccgcggcttcacactcgtgaagatcggcgcgccgtcgggcgagaaggtgatgagcgcgatcgacaacctgtccgcgcagaaggcgcagggcttcatcatctgcacgcccgacgtgaagctcgggccgggcatcgtcgccaaggcgaagtcgcacaacctgaagatgatgacggtcgacgaccgcctcgtcgacggcgcgggcaagccgatcgaatcggtgccgcacatgggcatctccgcgtacaacatcggcaagcaggtcggcgacggcatcgcggcggagatcaagaagcgcggctggaacatgaaggaagtcggcgcgatcgacatcacctacgagcagctgccgaccgcgcacgaccgcacgagcggcgcgaccgacgcgctggtcgccgccggcttcccgaaggccaacgtgatcgccgcgccgcaggcgaagaccgacaccgagaacgcgttcaacgcggcgaacatcgcgctcaccaagaacccgcagttcaagcactgggtcgcctacggcctgaacgacgaggccgtgctcggcgcggtgcgcgcggccgaagggcgcggcttcaaggccgacaacatgatcgggatcggcatcggcggctcggagtcggcgctgaacgagttcaagaagccgcagccgaccggcttctacggcaccgtgatcatcagcccgaagcgccacggcgaagaaacctcggagctgatgtacgcgtggatcacacagggcaaggcgccgccgccgctcacgctgacgacgggcatgctcgcgacgcgcgagaacgtggcgaaggtgcgcgaggagatggggctcgcgtcgaagtaa

SEQ ID NO: 2266 - protein, 331 aa, Burkholderia vietnamiensis G4
MKRRTFVTLAAAAAVVIGSPLAQAADPVKIGFLVKQPEEPWFQDEWKFAEIAAKDRGFTLVKIGAPSGEKVMSAIDNLSAQKAQGFIICTPDVKLGPGIVAKAKSHNLKMMTVDDRLVDGAGKPIESVPHMGISAYNIGKQVGDGIAAEIKKRGWNMKEVGAIDITYEQLPTAHDRTSGATDALVAAGFPKANVIAAPQAKTDTENAFNAANIALTKNPQFKHWVAYGLNDEAVLGAVRAAEGRGFKADNMIGIGIGGSESALNEFKKPQPTGFYGTVIISPKRHGEETSELMYAWITQGKAPPPLTLTTGMLATRENVAKVREEMGLASK

SEQ ID NO: 2267 - DNA, 1005 bp, Azospirillum brasilense
  CDS (1)..(1005): transl_table=11
atgaaccgcacgattcgccgccataccctacgcgcgctgctggccgcgctttgcattgcaccgctcggcatgcagggcgccgcgcgcgccgacgcgccgctgaagatcggcttcctggtgaagatgcccgagcaggcctggttcatcaacgagcagaatgcggcgtccgcgctcggccagaaggagaatttctcggtcgtgaagatcggtacgcccgacggcgagaaggtgctggccgcgatcgacaacctcggctcgcagggtgcgcagggcttcgtgatctgcgcgccggacgtgcgcctcggcccggcgatcgccgcacgcgcgaagcgctacaacatgaagttcgtgaccgtcgacgaccagctcgtcgattcgaccggcaagccgctgccgaacgtgccgcacctcgggatgtcggcaaccaagatcggcaaccaggtcggccaggcgatttccgacgagatgaagcggcgcggctggaagcccgaggaagtcggcgcgctgcggatcacgaactacgagctgccgaccgcgaagctgcgcaccgacggcgcgacgcaggcgctgctcgcgaacggcttccgcaaggagaacatcttcgacgcgccgcagaagacgaccgacgacgaaggcggtttcagcgcggccgcgcccgtgctcgcgcgccatccgaacgtgaagaagtgggtggtctacgcgctgaacgaggaaaccgtgctcggcgcggtgcgcgcgaccgagcagctgcatatcccggcggccgacgtgatcggcgtgggcatcaacggcgcgggcgaggcgttcgccgaattccagaagaaggagccgaccggcttctacgggacgattgcggtcagctcgacgaaccacggcaaggacagcacgcagaacctcgtcgaatggattcgcgacggcaagacgccgccggccgacacgcagacgagcggcaagctgatgacgcgcgcgaactggcaggccgtacgcgccgaactcggcatctga

SEQ ID NO: 2268 - protein, 334 aa, Azospirillum brasilense
MNRTIRRHTLRALLAALCIAPLGMQGAARADAPLKIGFLVKMPEQAWFINEQNAASALGQKENFSVVKIGTPDGEKVLAAIDNLGSQGAQGFVICAPDVRLGPAIAARAKRYNMKFVTVDDQLVDSTGKPLPNVPHLGMSATKIGNQVGQAISDEMKRRGWKPEEVGALRITNYELPTAKLRTDGATQALLANGFRKENIFDAPQKTTDDEGGFSAAAPVLARHPNVKKWVVYALNEETVLGAVRATEQLHIPAADVIGVGINGAGEAFAEFQKKEPTGFYGTIAVSSTNHGKDSTQNLVEWIRDGKTPPADTQTSGKLMTRANWQAVRAELGI

SEQ ID NO: 2269 - DNA, 22 bp, Artificial sequence
  primer
atgcacaaatttactaaagccc

SEQ ID NO: 2270 - DNA, 25 bp, Artificial sequence
  primer
ttacttaccgcctaaaccttttttc

SEQ ID NO: 2271 - protein, 332 aa, Artificial sequence
  consensus sequence
  Variant (2)..(15): Xaa in position 2 to 15 is any amino acid
  Variant (16)..(26): Xaa in position 16 to 26 is any or no amino acid
  Variant (28)..(28): Xaa in position 28 is any amino acid
  Variant (37)..(37): Xaa in position 37 is any amino acid
  Variant (42)..(42): Xaa in position 42 is any amino acid
  Variant (45)..(45): Xaa in position 45 is any amino acid
  Variant (48)..(49): Xaa in position 48 to 49 is any amino acid
  Variant (51)..(51): Xaa in position 51 is any amino acid
  Variant (53)..(55): Xaa in position 53 to 55 is any amino acid
  Variant (56)..(56): Xaa in position 56 is any or no amino acid
  Variant (58)..(60): Xaa in position 58 to 60 is any amino acid
  Variant (63)..(64): Xaa in position 63 to 64 is any amino acid
  Variant (66)..(66): Xaa in position 66 is any amino acid
  Variant (70)..(72): Xaa in position 70 to 72 is any amino acid
  Variant (76)..(76): Xaa in position 76 is any amino acid
  Variant (78)..(78): Xaa in position 78 is any amino acid
  Variant (80)..(81): Xaa in position 80 to 81 is any amino acid
  Variant (83)..(83): Xaa in position 83 is any amino acid
  Variant (86)..(86): Xaa in position 86 is any amino acid
  Variant (89)..(89): Xaa in position 89 is any amino acid
  Variant (92)..(93): Xaa in position 92 to 93 is any amino acid
  Variant (97)..(97): Xaa in position 97 is any amino acid
  Variant (99)..(99): Xaa in position 99 is any amino acid
  Variant (103)..(107): Xaa in position 103 to 107 is any amino acid
  Variant (109)..(111): Xaa in position 109 to 111 is any amino acid
  Variant (115)..(116): Xaa in position 115 to 116 is any amino acid
  Variant (118)..(120): Xaa in position 118 to 120 is any amino acid
  Variant (122)..(122): Xaa in position 122 is any amino acid
  Variant (124)..(126): Xaa in position 124 to 126 is any amino acid
  Variant (129)..(133): Xaa in position 129 to 133 is any amino acid
  Variant (135)..(136): Xaa in position 135 to 136 is any amino acid
  Variant (139)..(141): Xaa in position 139 to 141 is any amino acid
  Variant (143)..(147): Xaa in position 143 to 147 is any amino acid
  Variant (149)..(151): Xaa in position 149 to 151 is any amino acid
  Variant (155)..(164): Xaa in position 155 to 164 is any amino acid
  Variant (165)..(167): Xaa in position 165 to 167 is any or no amino acid
  Variant (169)..(171): Xaa in position 169 to 171 is any amino acid
  Variant (173)..(173): Xaa in position 173 is any amino acid
  Variant (176)..(177): Xaa in position 176 to 177 is any amino acid
  Variant (180)..(180): Xaa in position 180 is any amino acid
  Variant (182)..(184): Xaa in position 182 to 184 is any amino acid
  Variant (187)..(189): Xaa in position 187 to 189 is any amino acid
  Variant (192)..(199): Xaa in position 192 to 199 is any amino acid
  Variant (201)..(204): Xaa in position 201 to 204 is any amino acid
  Variant (206)..(211): Xaa in position 206 to 211 is any amino acid
  Variant (214)..(216): Xaa in position 214 to 216 is any amino acid
  Variant (218)..(220): Xaa in position 218 to 220 is any amino acid
  Variant (222)..(223): Xaa in position 222 to 223 is any amino acid
  Variant (224)..(224): Xaa in position 224 is any or no amino acid
  Variant (226)..(226): Xaa in position 226 is any amino acid
  Variant (228)..(230): Xaa in position 228 to 230 is any amino acid
  Variant (232)..(232): Xaa in position 232 is any amino acid
  Variant (235)..(236): Xaa in position 235 to 236 is any amino acid
  Variant (240)..(240): Xaa in position 240 is any amino acid
  Variant (244)..(244): Xaa in position 244 is any amino acid
  Variant (246)..(247): Xaa in position 246 to 247 is any amino acid
  Variant (249)..(250): Xaa in position 249 to 250 is any amino acid
  Variant (252)..(254): Xaa in position 252 to 254 is any amino acid
  Variant (257)..(257): Xaa in position 257 is any amino acid
  Variant (260)..(260): Xaa in position 260 is any amino acid
  Variant (262)..(263): Xaa in position 262 to 263 is any amino acid
  Variant (264)..(264): Xaa in position 264 is any or no amino acid
  Variant (266)..(267): Xaa in position 266 to 267 is any amino acid
  Variant (269)..(270): Xaa in position 269 to 270 is any amino acid
  Variant (272)..(273): Xaa in position 272 to 273 is any amino acid
  Variant (274)..(274): Xaa in position 274 is any or no amino acid
  Variant (278)..(278): Xaa in position 278 is any amino acid
  Variant (280)..(283): Xaa in position 280 to 283 is any amino acid
  Variant (286)..(287): Xaa in position 286 to 287 is any amino acid
  Variant (290)..(298): Xaa in position 290 to 298 is any amino acid
  Variant (300)..(305): Xaa in position 300 to 305 is any amino acid
  Variant (307)..(315): Xaa in position 307 to 315 is any amino acid
  Variant (316)..(316): Xaa in position 316 is any or no amino acid
  Variant (318)..(318): Xaa in position 318 is any amino acid
  Variant (321)..(321): Xaa in position 321 is any amino acid
  Variant (323)..(330): Xaa in position 323 to 330 is any amino acid
AXXXXXXXXXXXXXXXXXXXXXXXXXKXGFLVKQPEXPWFQXEWXFAXXAXKXXXXFXXXKIXXPXGEKXXXAIDXLXAXXAXGFXICXPDXXLGPXIXAKAXXXXXKXXXVDDXXVXXXGXPXXXVPXXXXXAXXIGXXXGXXXXXEXXXRGWXXXXXXXXXXXXXTXXXLXTAXXRTXGXXXALXXXGFXXXXXXXXPXXXXDXXXXXXAAXXXLXXXPXXXKXWXXXGXNDXXVLGXVRAXEXXGXXAXXXIGXGIXGXXXAXXEXXKXXXTGFXGXXXXSPXXHGXXXXXXXXXWXXXXXXPXXXXXXXXXXLXTRXNXXXXXXXXGL

SEQ ID NO: 2272 - protein, 42 aa, Artificial sequence
  protein pattern
  Variant (2)..(3): Xaa in position 2 to 3 is any amino acid
  Variant (4)..(4): Xaa in position 4 is any or no amino acid
  Variant (6)..(7): Xaa in position 6 to 7 is any amino acid
  Variant (8)..(8): Xaa in position 8 is Ile, Leu or Val
  Variant (9)..(9): Xaa in position 9 is Ala, Ile or Val
  Variant (10)..(10): Xaa in position 10 is any amino acid
  Variant (11)..(11): Xaa in position 11 is Ala or Gly
  Variant (12)..(12): Xaa in position 12 is Leu or Met
  Variant (14)..(14): Xaa in position 14 is Asp or Glu
  Variant (15)..(15): Xaa in position 15 is Glu, Asn or Ser
  Variant (16)..(16): Xaa in position 16 is Ala or Thr
  Variant (20)..(20): Xaa in position 20 is Ala or Gly
  Variant (24)..(24): Xaa in position 24 is Ala or Thr
  Variant (25)..(25): Xaa in position 25 is Ala, Glu or Ser
  Variant (26)..(26): Xaa in position 26 is Ala, Gly, Gln, Ser or Thr
  Variant (27)..(28): Xaa in position 27 to 28 is any amino acid
  Variant (29)..(29): Xaa in position 29 is Phe or Ile
  Variant (30)..(30): Xaa in position 30 is any amino acid
  Variant (32)..(32): Xaa in position 32 is any amino acid
  Variant (33)..(33): Xaa in position 33 is Asp or Asn
  Variant (34)..(34): Xaa in position 34 is Ile, Met or Val
  Variant (37)..(38): Xaa in position 37 to 38 is any or no amino acid
  Variant (40)..(40): Xaa in position 40 is Gly or Asn
  Variant (42)..(42): Xaa in position 42 is Ala, Ser, Thr or Val
PXXXKXXXXXXXNXXXVLGXVRAXXXXXXXAXXXIGXXIXGX

SEQ ID NO: 2273 - protein, 34 aa, Artificial sequence
  protein pattern
  Variant (2)..(2): Xaa in position 2 is any amino acid
  Variant (4)..(4): Xaa in position 4 is Ile, Leu or Met
  Variant (5)..(5): Xaa in position 5 is any amino acid
  Variant (6)..(6): Xaa in position 6 is Ala, Asp, Glu, Gly, Asn, Ser or Thr
  Variant (9)..(9): Xaa in position 9 is any amino acid
  Variant (10)..(10): Xaa in position 10 is Leu, Met or Val
  Variant (11)..(11): Xaa in position 11 is any amino acid
  Variant (12)..(12): Xaa in position 12 is Ile or Met
  Variant (13)..(13): Xaa in position 13 is Ala or Ser
  Variant (15)..(16): Xaa in position 15 to 16 is any amino acid
  Variant (19)..(21): Xaa in position 19 to 21 is any amino acid
  Variant (23)..(23): Xaa in position 23 is Asp, Glu, Gly, Gln or Ser
  Variant (24)..(24): Xaa in position 24 is Ala, Glu or Gly
  Variant (25)..(25): Xaa in position 25 is Ile or Leu
  Variant (26)..(27): Xaa in position 26 to 27 is any amino acid
  Variant (29)..(31): Xaa in position 29 to 31 is any amino acid
GXPXXXVPXXXXXAXXIGXXXGXXXXXEXXXRGW

SEQ ID NO: 2274 - protein, 39 aa, Artificial sequence
  protein pattern
  Variant (2)..(2): Xaa in position 2 is Phe or Leu
  Variant (3)..(3): Xaa in position 3 is any amino acid
  Variant (5)..(6): Xaa in position 5 to 6 is any amino acid
  Variant (7)..(7): Xaa in position 7 is Ala or Pro
  Variant (11)..(11): Xaa in position 11 is any amino acid
  Variant (13)..(13): Xaa in position 13 is Ser or Thr
  Variant (14)..(14): Xaa in position 14 is Ile, Leu or Val
  Variant (15)..(15): Xaa in position 15 is Ala, Ile or Leu
  Variant (16)..(16): Xaa in position 16 is Ile, Leu, Pro or Val
  Variant (17)..(17): Xaa in position 17 is Asn or Ser
  Variant (18)..(18): Xaa in position 18 is Pro or Ser
  Variant (19)..(20): Xaa in position 19 to 20 is any amino acid
  Variant (23)..(24): Xaa in position 23 to 24 is any amino acid
  Variant (25)..(25): Xaa in position 25 is Ser or Thr
  Variant (26)..(28): Xaa in position 26 to 28 is any amino acid
  Variant (29)..(29): Xaa in position 29 is Leu or Met
  Variant (30)..(31): Xaa in position 30 to 31 is any amino acid
  Variant (33)..(33): Xaa in position 33 is Ile or Val
  Variant (34)..(35): Xaa in position 34 to 35 is any amino acid
  Variant (36)..(36): Xaa in position 36 is Asp, Gly or Asn
  Variant (37)..(38): Xaa in position 37 to 38 is any amino acid
EXXKXXXTGFXGXXXXXXXXHGXXXXXXXXXWXXXXXXP

SEQ ID NO: 2275 - protein, 56 aa, Artificial sequence
  protein pattern
  Variant (2)..(5): Xaa in position 2 to 5 is any amino acid
  Variant (6)..(10): Xaa in position 6 to 10 is any or no amino acid
  Variant (12)..(12): Xaa in position 12 is Asp or Pro
  Variant (15)..(15): Xaa in position 15 is His, Lys or Arg
  Variant (16)..(16): Xaa in position 16 is any amino acid
  Variant (18)..(18): Xaa in position 18 is Thr or Val
  Variant (19)..(19): Xaa in position 19 is Ala, Asp, Glu, Gly, Ser or Thr
  Variant (21)..(21): Xaa in position 21 is Ala or Ser
  Variant (22)..(23): Xaa in position 22 to 23 is any amino acid
  Variant (26)..(27): Xaa in position 26 to 27 is any amino acid
  Variant (28)..(28): Xaa in position 28 is Ala, Asn or Ser
  Variant (31)..(34): Xaa in position 31 to 34 is any amino acid
  Variant (35)..(35): Xaa in position 35 is Ile or Val
  Variant (36)..(37): Xaa in position 36 to 37 is any amino acid
  Variant (38)..(38): Xaa in position 38 is Ala, Ser or Val
  Variant (40)..(40): Xaa in position 40 is Glu, Gln or Thr
  Variant (41)..(42): Xaa in position 41 to 42 is any amino acid
  Variant (43)..(43): Xaa in position 43 is Ala, Asn or Thr
  Variant (45)..(45): Xaa in position 45 is any amino acid
  Variant (46)..(46): Xaa in position 46 is Glu or Pro
  Variant (47)..(47): Xaa in position 47 is Ala, Gly or Asn
  Variant (48)..(48): Xaa in position 48 is Ala or Gly
  Variant (49)..(49): Xaa in position 49 is Phe or Leu
  Variant (50)..(50): Xaa in position 50 is Asp, Asn or Ser
  Variant (53)..(53): Xaa in position 53 is Ala, Asp or Asn
  Variant (54)..(55): Xaa in position 54 to 55 is any amino acid
  Variant (56)..(56): Xaa in position 56 is Phe or Leu
VXXXXXXXXXLXTAXXRXXGXXXALXXXGFXXXXXXXXPXXXXDXXXXXXAAXXXX

SEQ ID NO: 2276 - protein, 21 aa, Artificial sequence
  protein pattern
  Variant (2)..(2): Xaa in position 2 is Ile or Leu
  Variant (5)..(5): Xaa in position 5 is Ile, Leu or Val
  Variant (9)..(9): Xaa in position 9 is Ala or Pro
  Variant (10)..(11): Xaa in position 10 to 11 is Asp or Glu
  Variant (16)..(16): Xaa in position 16 is Ala, Asp or Thr
  Variant (19)..(20): Xaa in position 19 to 20 is any amino acid
KXGFXVKQXXXPWFQXEWXXA

SEQ ID NO: 2277 - DNA, 549 bp, Escherichia coli K12
  CDS (1)..(549): transl_table=11
atgcaatttaatatccctacgttgcttacactgttccgtgtcatccttatcccattctttgtattggtcttttatctgcctgtcacctggtcgccgtttgccgccgcgctcattttctgcgtcgcggcggtgactgactggttcgatggttttctggcacgccgctggaaccagagtacccggtttggtgctttccttgaccctgtggcagataaagttctcgtggctatcgccatggtgctggtaaccgagcattatcacagctggtgggtgacattaccggcggcaacgatgatcgcccgtgaaattattatttctgcgctacgcgaatggatggcggagttgggtaaacgcagtagcgtggccgtctcctggattgggaaagtgaaaaccactgcccagatggtggcgttggcatggctgctgtggcgtccgaacatttgggttgagtacgccggtattgcacttttctttgtggctgcggtactgactctgtggtcaatgttgcaatatttgagcgctgcgcgtgcagatttgcttgatcagtga

SEQ ID NO: 2278 - protein, 182 aa, Escherichia coli K12
MQFNIPTLLTLFRVILIPFFVLVFYLPVTWSPFAAALIFCVAAVTDWFDGFLARRWNQSTRFGAFLDPVADKVLVAIAMVLVTEHYHSWWVTLPAATMIAREIIISALREWMAELGKRSSVAVSWIGKVKTTAQMVALAWLLWRPNIWVEYAGIALFFVAAVLTLWSMLQYLSAARADLLDQ

SEQ ID NO: 2279 - DNA, 1229 bp, Glycine max
  CDS (98)..(760)
acggctgcgagaagacgacagaagaggaaatcacaagggtttggtgttgggggccaacaatacgacctgcgtctgtgtaattgtaggtgccaaacatatggttgccgagatgaatgtccgtgaattttccatctctaagaatgaccgtacttcaaattccaattccaaatttcttaccttgcccaccattttgactcttggccgtgtcgccgctgtacctcttcttgttgccaccttctacatggatggttggcgaggaacagttgttactacaagtatcctcactgctgcagcagttacagattggcttgatggttatattgctcgtaagatgaaaatgaaatctacatttggtgcctttttagatccagtagctgacaagcttatggtttctgccacattggtcttattatgtactagaccgttggaagttgctgtgtttcgacaagtaccatggctattgattataccttcaatcaccataattggcagagagataaccatgtcggtactcggggaatgggctgcttcccagggtagcaagcttctggaggttgttgcagttaataatttggggaaatggaaaacagcatcacagatggtggcgttaatcatcctccttgctacccgggactgcagtcgtggaggacctgctattttggtgggatctggggttgtcttgctttacatttccgcagggcttgccttatggtcatttgtagtatatatgagagaaatatgcaaggtgttgcggaggtagcatgtttgattgctctctgccttcacatatatccgcttgtttggtgggttttattcttttgatcatttcttacgtaaacagtttagttagtgattccatggaagggaatgtagtccttgtgagttgtgaccaatatatataatgtttgctctccacaatgtctaactctgcaaagcaccattcctcctattcttgaaaattgtattgtttttcccccttagttacccctggtaaaggaaagatggaaaaaaagaaagaaagatgacatgtggattgaattggaagaattcaggttactagtcacgcgaatcgaattcctatctacagtttggagcctattaaagtttgctacctgagaaatttcgccagaggaatcaatgtatggttctagttgactcttaaattgatttttgtcctggtcatattatttgccaatacttaaatacaacagttatttttcagtgtctgt

SEQ ID NO: 2280 - protein, 220 aa, Glycine max
MVAEMNVREFSISKNDRTSNSNSKFLTLPTILTLGRVAAVPLLVATFYMDGWRGTVVTTSILTAAAVTDWLDGYIARKMKMKSTFGAFLDPVADKLMVSATLVLLCTRPLEVAVFRQVPWLLIIPSITIIGREITMSVLGEWAASQGSKLLEVVAVNNLGKWKTASQMVALIILLATRDCSRGGPAILVGSGVVLLYISAGLALWSFVVYMREICKVLRR

SEQ ID NO: 2281 - DNA, 1418 bp, Zea mays subsp. mays
  CDS (321)..(1040)
  misc_feature (26)..(26): y is t or c
  misc_feature (143)..(143): s is g or c
gcacgagaccattacctagaacatcytaatcgaaaaacaagagtagggagtggtgcgagaaatcaatccgccccatgcccacatccgtcgccacccacgcaaccctcctcatcaaagccgcagccgccaagcccttcttctcsccccgcccggcggcccggatccccgccccttctcctcaccctcctcccccgcccgccggccgccgcctgccgaacacggcggccgctctcgccgccgcagcccgtcggttccggtggccgtcggcggccgcgtcggcgcgggggctgtgcgcgccgccgcattccggcggcgaggggatgggatctgatgcgggggcgggggccaggaagaggcgggacccggccgtgaacgggctcgccaaggacgtgccgccagtgaacgggatgatgatgcccaaggaggagccggcgaccgcgccgcccaggttgctcacgctgcccaccgtgctcaccattggccgcgtcgctgctgtgccgcttctgatcagcactttctacatggagggtccatgggcagctacggccacaacaggcatctttcttgctgctgcagtcactgattggctagatggttatatcgctagaaagatgcagctaggaacaccttttggtgcatttcttgatcctgtggctgacaagcttatggtagccgcaacattagttttactatgcaccaaacctttggaaacatcactgctcaatgatgggccatggcttctaacagtcccttccattgctatcattgggagagagattacaatgtcagctgtgagagaatgggccgcatctcagaatagtgaagctcttgaggctgttgcagttaacaacttagggaagtggaagacagcaacgcagatgacagcattgactctgcttctcgccagcagagacccaagtgtacctgcgcaaggtgctctagttgcccccggtgttgctctactttacatttccgctggactcgccatatggtccctagtggtgtacatgagaaagatatggcggatacttctaaaatagtattagcacaatatatatagtgtagtagaagaaacagaagcaaggcgaggttctattcgtgatcgtacgatttttggaaggctgcttagttgattggtggactgggacctagagctgcttgtgatcctcattcctcagtaacttgtgcgtcatctatttttgccgccaaatttgctgaagtatgccaggattctagacatgatgtgaccctgcgtgcttaaggagacataagtctgcaatgcagaagattgtaacccaatacaaacacaaaacccggaggtttgtgcatgtggagttctatcattgtaatctgcacataatatcatatgccaggagcatgcaattattcttttcagtggggacgatatccctgtctcc

SEQ ID NO: 2282 - protein, 239 aa, Zea mays subsp. mays
MGSDAGAGARKRRDPAVNGLAKDVPPVNGMMMPKEEPATAPPRLLTLPTVLTIGRVAAVPLLISTFYMEGPWAATATTGIFLAAAVTDWLDGYIARKMQLGTPFGAFLDPVADKLMVAATLVLLCTKPLETSLLNDGPWLLTVPSIAIIGREITMSAVREWAASQNSEALEAVAVNNLGKWKTATQMTALTLLLASRDPSVPAQGALVAPGVALLYISAGLAIWSLVVYMRKIWRILLK

SEQ ID NO: 2283 - DNA, 633 bp, Zea mays subsp. mays
  CDS (1)..(633)
atgatgatgcccaaggaggagccggcgaccgcgccgcccaggttgctcacgctgcccaccgtgctcaccattggccgcgtcgctgctgtgccgcttctgatcagcactttctacatggagggtccatgggcagctacggccacaacaggcatctttcttgctgctgcagtcactgattggctagatggttatatcgctagaaagatgcagctaggaacaccttttggtgcatttcttgatcctgtggctgacaagcttatggtagccgcaacattagttttactatgcaccaaacctttggaaacatcactgctcaatgatgggccatggcttctaacagtcccttccattgctatcattgggagagagattacaatgtcagctgtgagagaatgggccgcatctcagaatagtgaagctcttgaggctgttgcagttaacaacttagggaagtggaagacagcaacgcagatgacagcattgactctgcttctcgccagcagagacccaagtgtacctgcgcaaggtgctctagttgcccccggtgttgctctactttacatttccgctggactcgccatatggtccctagtggtgtacatgagaaagatatggcggatacttctaaaatag

SEQ ID NO: 2284 - protein, 210 aa, Zea mays subsp. mays
MMMPKEEPATAPPRLLTLPTVLTIGRVAAVPLLISTFYMEGPWAATATTGIFLAAAVTDWLDGYIARKMQLGTPFGAFLDPVADKLMVAATLVLLCTKPLETSLLNDGPWLLTVPSIAIIGREITMSAVREWAASQNSEALEAVAVNNLGKWKTATQMTALTLLLASRDPSVPAQGALVAPGVALLYISAGLAIWSLVVYMRKIWRILLK

SEQ ID NO: 2285 - DNA, 1335 bp, Glycine max
  CDS (33)..(914)
gaatttgctctagacaagtttggtgattgacgatgtcgggcttgaagcttggcacgactgcttccatctacgttcgaacagcgaaaaccaaaagcaaacccctcttatcatggagaagcccaccccaacacccccgcagccgcaggtacatgctttccccttccaaaaatcaaatcctagggttcacacctagaaacaaattcccatgctattctttgggaagggctggtcttgtcacagattttggttcgtcagtgccccaacctcaacctcaacctcagccaaagccagagccagaaccagaacctgaaccttccaaattgcttacgttgccaacaattttgactctaggccgtgtcgccgctgtcccacttcttgttgctactttctacatggacggttggcgtggaactgctgctactaccagcattttcgtcgctgcatcaatcactgattggcttgatggctatcttgctcgcaagatgaagttaaaatcttcattcggtgcattcttagatccagttgctgacaagcttatggttgctgctacactggtcttattatgtactagacctttggatggtggtgtgtttggacaagcgccgtggctactcactatacctgcaattgccataattggtagagagataaccatgtctgcagtcagggagtgggctgcttcccaggatagcaagcttttagaggctgttgctgtaaataacttggggaagtggaaaacagccacacagatgacagcattaaccatccttcttgcgacccgggactggagccatggaggaggagctgccattgtagtaggctctggtgttgctttgctttatacttcagcagggcttgccttatggtcgttggttgtatatatgaagaaaatatggagggtgttgttgaggtagcttgcgaacatttaccaatgtcacgaaagggggctgcaattttagtggcatgcaaatgtttttttttttcctgcgcaatctctaaccccatgcagtgtcatttctcctactcgtgtattttctgcgcatttttttggtcctctaaaaaagataagggccactagccatgcttaagcgttacagcagtgattgtgttgggaaaacgttgtgttgtaagttgtaacccacgttttccccaaatccatgaaggcacttgcttctccgtttgatgctttggaaagtgtgaacacacgcattttgttttaggccctaactcaatttagagtcattgaaagtttgagaattgcgaccagagaaaattcacaacaggtcaggaattattgtataatggttgatttgttctgatatagttcaacgatgc

SEQ ID NO: 2286 - protein, 293 aa, Glycine max
MSGLKLGTTASIYVRTAKTKSKPLLSWRSPPQHPRSRRYMLSPSKNQILGFTPRNKFPCYSLGRAGLVTDFGSSVPQPQPQPQPKPEPEPEPEPSKLLTLPTILTLGRVAAVPLLVATFYMDGWRGTAATTSIFVAASITDWLDGYLARKMKLKSSFGAFLDPVADKLMVAATLVLLCTRPLDGGVFGQAPWLLTIPAIAIIGREITMSAVREWAASQDSKLLEAVAVNNLGKWKTATQMTALTILLATRDWSHGGGAAIVVGSGVALLYTSAGLALWSLVVYMKKIWRVLLR

SEQ ID NO: 2287 - DNA, 1335 bp, Glycine max; identical to SEQ ID NO: 2285
  CDS (150)..(914)

SEQ ID NO: 2288 - protein, 254 aa, Glycine max
MLSPSKNQILGFTPRNKFPCYSLGRAGLVTDFGSSVPQPQPQPQPKPEPEPEPEPSKLLTLPTILTLGRVAAVPLLVATFYMDGWRGTAATTSIFVAASITDWLDGYLARKMKLKSSFGAFLDPVADKLMVAATLVLLCTRPLDGGVFGQAPWLLTIPAIAIIGREITMSAVREWAASQDSKLLEAVAVNNLGKWKTATQMTALTILLATRDWSHGGGAAIVVGSGVALLYTSAGLALWSLVVYMKKIWRVLLR

SEQ ID NO: 2289 - DNA, 1109 bp, Zea mays
  CDS (73)..(699)
  misc_feature (20)..(20): n is a, g, c or t
ggcacgaggggcaggaagangcgggtgccagcggtgaacgggctcgccaaggacgcgcctgcggtgaacgggatgcgcaaggaggagcccgtggccgcgcctcccaggttgctcaggctgcccactgtgctcaccattgggcgcgtcgctgctgtgcctcttctgatcagcactttctacatggagggtccatgggcagctatgggcacaacaggcatcttccttgctgccgcagtcactgattggctagatggttatattgctagaaagatgcagctaggaacaccttttggtgcatttcttgatcctgtggccgacaagcttatggtagcggcaacattagttttgctatgcaccaaacctttgggatcatcactgctcaatgatgggccatgggttctaacagtcccttccattgccatcattgggagagagattacaatgtcagctgtgagagagtgggctgcatctcagaataacaaagttcttgaggctgttgcagttaacaatttaaggaagtggaagacagcgacgcagatgacagcattgactctgcttctcgcaagcagagacccaagtctacctgcgcaaggcgctctagttgcccccggtgttgctctactttacgtccccacgggactcgccgtatggtccctagtggtgtacatgagaaagatatggcggatactgctcaaatagtattagcacaatatatatatagtgtaatagaagaaacaagcaaggcgagcatccgttcgtgatcgtacaacttttggaaggctgttgggtggcctgagccctagagctggttgggatcctcattcatctgtaacttgtgcgtcagtttttggtggatttgccgctaaatttgctgaggcatgccaggatcctattagatttttagaaacaagacatggtgtgaccctccgtgcgtaatgagaattcttagaaacaagaagacatggtgtggccctgcgtgcgtaatgagatactagtctgcgatgcagaagattgtaaccttatacaaatacaatctggaggtttctgcgtgtggagttctaccgttgtactctacacataatatcataataaaaaaaaaaaaaaaaaaa

SEQ ID NO: 2290 - protein, 208 aa, Zea mays
MRKEEPVAAPPRLLRLPTVLTIGRVAAVPLLISTFYMEGPWAAMGTTGIFLAAAVTDWLDGYIARKMQLGTPFGAFLDPVADKLMVAATLVLLCTKPLGSSLLNDGPWVLTVPSIAIIGREITMSAVREWAASQNNKVLEAVAVNNLRKWKTATQMTALTLLLASRDPSLPAQGALVAPGVALLYVPTGLAVWSLVVYMRKIWRILLK

SEQ ID NO: 2291 - DNA, 1109 bp, Zea mays; identical to SEQ ID NO: 2289
  CDS (73)..(699)
  misc_feature (20)..(20): n is a, g, c or t

SEQ ID NO: 2292 - protein, 208 aa, Zea mays; identical to SEQ ID NO: 2290

SEQ ID NO: 2293 - DNA, 597 bp, Mesorhizobium loti MAFF303099
  CDS (1)..(597): transl_table=11
atggcccagcgcgcgttcaacctgcccaacatgctgacctacgcccgcatcatcgcggtgccgctggtggtgctgtgcttttttctcgaaggtcatctgaaatcgagcgacttcgcccgctggtcggcgctggtcattttcctgctggcgtccgtcaccgattatttcgacggctattttgcgcgcgcctggcagcaaacctccaacatcggcaagatgctcgacccgatcgccgacaagctactggtcgcgacctgccttttgctgctggcggccgacaccgatcgccatgccggcattgccggctggtcgctgtgggcggccatcatcatcctgtgccgcgagatcctggtttctggcctgcgcgaatatctggcggcgctcaaggtctcggtgccggtgacgcagcttgccaagtggaagaccactatccagatggtcgccatcgccttcctgctggcgggaccggccggcgacaagatcttcccgctgacgacgcagaccggcctcgttttgctgtggatagccgcactcgtcacgctctacaccggctacgactatttccgcgccggcctcaagcacatcatggacgagtga

SEQ ID NO: 2294 - protein, 198 aa, Mesorhizobium loti MAFF303099
MAQRAFNLPNMLTYARIIAVPLVVLCFFLEGHLKSSDFARWSALVIFLLASVTDYFDGYFARAWQQTSNIGKMLDPIADKLLVATCLLLLAADTDRHAGIAGWSLWAAIIILCREILVSGLREYLAALKVSVPVTQLAKWKTTIQMVAIAFLLAGPAGDKIFPLTTQTGLVLLWIAALVTLYTGYDYFRAGLKHIMDE

SEQ ID NO: 2295 - DNA, 891 bp, Arabidopsis thaliana
  CDS (1)..(891)
atgctcagatccggtctggcttcgttaatcgtcgatgtcaatttgcggcgcacgttacgtccatccccaaccttttcttttccggcgcatcttagccgttgcattatcacttcccgttactcctcccgtacatctctaaggtttccgattcaaatatctcgccaccaacaccgtctatcctacttttcttcatcctcttcgtcggagcaaagcagaccaacttcctcttcccgaaacagtttcagtggtcacggtcagcttgatagtgatgataattcttcaccgcctccgtcgcaatcatcttccaaagttcttacattgcctaccgtattaacacttggtcgtgtcgccgccgtcccgcttctcgtcgcaaccttttacgttgatagttggtggggaacaactgctacaacaagcattttcattgcagcagccattacagactggcttgacggctatcttgcccgcaagatgaggttaggttctgcgtttggtgcctttttggatccagttgctgataagcttatggttgcagctacattgattttactgtgtacaaaacctatccaagttgctgaattaggaccacttccatggttattgaccgtaccttctattgcaatcattggtagggagattactatgtccgcagtaagagaatgggctgcatctcaaaatggaaagcttttagaggcagttgctgtaaataacttgggcaagtggaaaaccgccacgcagatgacagcactaaccatacttcttgcaagccgagatagcaatgttggatggctcgtagcttcaggtgctggcttgctttatgtatcagcaggactatctgtttggtctttagccgtttatatgaggaagatatggaaagtactaatgaagtag

SEQ ID NO: 2296 - protein, 296 aa, Arabidopsis thaliana
MLRSGLASLIVDVNLRRTLRPSPTFSFPAHLSRCIITSRYSSRTSLRFPIQISRHQHRLSYFSSSSSSEQSRPTSSSRNSFSGHGQLDSDDNSSPPPSQSSSKVLTLPTVLTLGRVAAVPLLVATFYVDSWWGTTATTSIFIAAAITDWLDGYLARKMRLGSAFGAFLDPVADKLMVAATLILLCTKPIQVAELGPLPWLLTVPSIAIIGREITMSAVREWAASQNGKLLEAVAVNNLGKWKTATQMTALTILLASRDSNVGWLVASGAGLLYVSAGLSVWSLAVYMRKIWKVLMK

SEQ ID NO: 2297 - DNA, 702 bp, Arabidopsis thaliana
  CDS (1)..(702)
atgggtgaagaagacaccgcgacggtggatcagaacagtttcggtggtggcaaagattcattgcttcgtaatcgtcattcgtcgccattgccttcaccgacacagctttcttctaaagtgattacattgcctaccgtattaacccttggccgtgtagctgccgttccgattctcgtcgccaccttttacgttgattgctggtggggaagaactgctacgacaagtattttcattgcagcagccattacagattggcttgatggatatattgcacggaagatgagattgggttctgaatttggtgcatttttggatccagtggcagataagcttatggtagcagctacattgatattgttgtgcactaaaccaatggtcgccgttgtcttaggaccagttccatggttagtgacagtaccttcaatcgccatcattggtagagagattactatgtctgcagtaagagaatgggctgcatctcaaaacggcaagctttcagaggctgttgctgtaaatagcttgggaaagtggaaaactgcaacgcagatgatagcgctaaccatacttcttgcaagccgggatagcagttttgagagactattaccgtcgggtattgggttgctctatgtatctgcagggctctctatatggtctttagttgtttatatgaggaagatatggagagtactgctaaagaagtag

SEQ ID NO: 2298 - protein, 233 aa, Arabidopsis thaliana
MGEEDTATVDQNSFGGGKDSLLRNRHSSPLPSPTQLSSKVITLPTVLTLGRVAAVPILVATFYVDCWWGRTATTSIFIAAAITDWLDGYIARKMRLGSEFGAFLDPVADKLMVAATLILLCTKPMVAVVLGPVPWLVTVPSIAIIGREITMSAVREWAASQNGKLSEAVAVNSLGKWKTATQMIALTILLASRDSSFERLLPSGIGLLYVSAGLSIWSLVVYMRKIWRVLLKK

SEQ ID NO: 2299 - DNA, 558 bp, Vibrio cholerae O1 biovar eltor str. N16961
  CDS (1)..(558): transl_table=11
atgcgtttcaacattcctaaccttctctccttgctcagattatttctgatccccgtgtttgtggtgaccttttatctcccttttgaatgggctccctttgtcgccgctatggtgttttgggtggctggattcactgattggttagatggaatgttggcgcgaaaattaggccaaacctcgcgttttggtgcatttattgacccagtagcggataaagtactggttgccacggcgctgattttgatcaccgaacattaccacagtatctggatcaccattcctgcggtgaccatgatcgctcgcgaaatcatcatttcagcactgcgtgagtggatggcagaaattggcaaacgagccagtgtcgcagtgtcatgggttggcaaagtaaaaactctgactcaaatgtttgcgctgtgggtactgatctggcgttatgacgactggatgatttggcttggctacatttctatctatgtggcgactgtgctgacctattggtcaatggtgcaatatttggcggcggccaaagacgacttactgaatgaagaacatcactag

SEQ ID NO: 2300 - protein, 185 aa, Vibrio cholerae O1 biovar eltor str. N16961
MRFNIPNLLSLLRLFLIPVFVVTFYLPFEWAPFVAAMVFWVAGFTDWLDGMLARKLGQTSRFGAFIDPVADKVLVATALILITEHYHSIWITIPAVTMIAREIIISALREWMAEIGKRASVAVSWVGKVKTLTQMFALWVLIWRYDDWMIWLGYISIYVATVLTYWSMVQYLAAAKDDLLNEEHH

SEQ ID NO: 2301 - DNA, 579 bp, Bacillus halodurans C-125
  CDS (1)..(579): transl_table=11
gtgaacgtaccaaataagatcacgttatcacgaataggcttaatcccgttatttatgctgtttttgctcgcccccattccgttaggtacagcggtgctgttcggtgtggaaatccctgtttcgcatttagtcgccctgtttctgtttgtattagcggctgctactgattggcttgacggttattatgcgaggaaatggaagcttgtaactaattttgggaagttccttgatccgctggctgacaaactgctcgtgacggcggcattagtggggcttgtagaaattggaacaattccagcatggatggccatcatcatcattagccgtgagtttgctgtcacagggattcgtcttgtggccgcctctgacggagcagtgatcgcagcaagtaagctcggaaaatggaaaacggtctcgcaaatcgtggcgattattgcctgcttgctttataacgttccttttgctgcagtaggttttccttttatgataatcgcgttatgggttgctaccattttaacgattgtttcaggcgtcgattatttcctgaaaaacaaagagtttttgttgaaatctaagtag

SEQ ID NO: 2302 - protein, 192 aa, Bacillus halodurans C-125
MNVPNKITLSRIGLIPLFMLFLLAPIPLGTAVLFGVEIPVSHLVALFLFVLAAATDWLDGYYARKWKLVTNFGKFLDPLADKLLVTAALVGLVEIGTIPAWMAIIIISREFAVTGIRLVAASDGAVIAASKLGKWKTVSQIVAIIACLLYNVPFAAVGFPFMIIALWVATILTIVSGVDYFLKNKEFLLKSK

SEQ ID NO: 2303 - DNA, 558 bp, Pasteurella multocida subsp. multocida str. Pm70
  CDS (1)..(558): transl_table=11
atgaaaccaaatattcctatattccttacgcttttccgtgtcattttaattcctttttttgtcattgcattttatttgcctttctcgtggtcgccttttttaactgtattgattttttttattgctggcgtcacagattggtttgatggttatcttgcacgaaaatggaaacaaacgacacgttttggcgcatttttagatcctgttgcggataaagtgatggtaacagtcgccctcgctttggttgttgaatatcaccattctttttggattactttgccagcagtgatcatgatttctagagaaatcatcatttccgcattaagagaatggatggctgaaattggcgacaggaataaagtggcggtatcttggctcggaaaagtgaaaaccacagcacaaatgttagcgttaggtggattgttgtggcgctataatgtggtgatggaaattgctgcgattgttttactgtatgttgcggcgattttaaccgtttggtcgatgttacaatatttaaaagcggctaaaggcagcttactttcggatattacactttaa

SEQ ID NO: 2304 - protein, 185 aa, Pasteurella multocida subsp. multocida str. Pm70
MKPNIPIFLTLFRVILIPFFVIAFYLPFSWSPFLTVLIFFIAGVTDWFDGYLARKWKQTTRFGAFLDPVADKVMVTVALALVVEYHHSFWITLPAVIMISREIIISALREWMAEIGDRNKVAVSWLGKVKTTAQMLALGGLLWRYNVVMEIAAIVLLYVAAILTVWSMLQYLKAAKGSLLSDITL

SEQ ID NO: 2305 - DNA, 561 bp, Pseudomonas aeruginosa PAO1
  CDS (1)..(561): transl_table=11
atgaatatccccaatctgctcacgttactgcgcgtcctgctcattccgatcttcattctgctgttctatctgccgacgtcctggagctacctgaccgccagtgccgtgttcgccctggccgccgccaccgactggctggacggctacctcgcccggcgcctcggccagagcacgccgttcggcgccttcctcgacccggtcgcggacaagctgatggtggcggttgcgctggtcttgctggtggaagagcacgccaacctgtggctgaccctgccggcggtgatcatcatcggccgcgagatcgtggtttccgccttgcgtgagtggatggccgaactgggggcgagggcgcaggtcgcggtgtccaacctgggcaagtggaagaccgcggcgcagatgctggcgctggtcattctcctggcgaatccgccgctgatgaccttctgggtgattctcggctacgtgctgctgatcatctccgcggcgctgaccctgtggtccatggtgcactacctgctggccgcgtggccgcatctgtcgaccaccccgaaagagaaataa

SEQ ID NO: 2306 - protein, 186 aa, Pseudomonas aeruginosa PAO1
MNIPNLLTLLRVLLIPIFILLFYLPTSWSYLTASAVFALAAATDWLDGYLARRLGQSTPFGAFLDPVADKLMVAVALVLLVEEHANLWLTLPAVIIIGREIVVSALREWMAELGARAQVAVSNLGKWKTAAQMLALVILLANPPLMTFWVILGYVLLIISAALTLWSMVHYLLAAWPHLSTTPKEK

SEQ ID NO: 2307 - DNA, 573 bp, Lactococcus lactis subsp. lactis Il1403
  CDS (1)..(573): transl_table=11
atgaaagagaaaatacccaatcaattgacaatggcaaggatttttatgattccaatctttgtgattttattttatttaccagaaggtgcacattttaacggttttgtttcacaagaccatagttcagtgatgtgggttatcgcagcaattgtatttgccgtagcctcatttactgactggcttgatggatatctcgcccgtaaatggcacgttgtcagcaattttggtaaatttgctgacccattggccgataaaatgctcaatatggttgcctttgttgttctagttggacttcatgttgttccaatgtgggctgttgccattattatttgccgtgagcttgcggttacaggattgcgcctcttattggttgaacaaggtggagttgttatggcggctgcaatgcctggtaaaatcaaaactgccacacaaatgttgagtgttattttccttttcattggaaatcccttgtatataggaacaatcctcttttatgtttgtgtcctctttaccatttatagtggctatgactattttgctaaaaatatgcaagtttttagaaatgctgattaa

SEQ ID NO: 2308 - protein, 190 aa, Lactococcus lactis subsp. lactis Il1403
MKEKIPNQLTMARIFMIPIFVILFYLPEGAHFNGFVSQDHSSVMWVIAAIVFAVASFTDWLDGYLARKWHVVSNFGKFADPLADKMLNMVAFVVLVGLHVVPMWAVAIIICRELAVTGLRLLLVEQGGVVMAAAMPGKIKTATQMLSVIFLFIGNPLYIGTILFYVCVLFTIYSGYDYFAKNMQVFRNAD

SEQ ID NO: 2309 - DNA, 564 bp, Neisseria meningitidis MC58
  CDS (1)..(564): transl_table=11
atgccttggaatctccccatcttcctcacatggttgagggtcttgctcattcctgtcctgacagcccttttttacctgccttttccgtggttcgcggaggaaacgattaatctcaccgccgccgtcatttttgccgttgccgccttgaccgactggtttgacggatttttggcaaggttgtggaaacagacctcggatttcggcgccttcctcgatcccgttgccgacaagctgatggtcgccgtctctttgcttttactggtcaaactcgaccggacctatgttttgtttgccatgatcatcatcggcagggaaattaccatttccgcattgcgcgaatggatggcgcaaatgggcaaaaggaacagcgttgccgtcgccaccgtcggtaagtttaaaaccgccgcgcaaatgctggcaatcttcctgctgctgctgaattttcccgatttttatggatttaacctcgcattcatcggcaatgtattgatgtttatcgcatctttgctgacagtctggtcgatgctgtattatctgaaaatggcgtggaaagaaatcgcctga

SEQ ID NO: 2310 - protein, 187 aa, Neisseria meningitidis MC58
MPWNLPIFLTWLRVLLIPVLTALFYLPFPWFAEETINLTAAVIFAVAALTDWFDGFLARLWKQTSDFGAFLDPVADKLMVAVSLLLLVKLDRTYVLFAMIIIGREITISALREWMAQMGKRNSVAVATVGKFKTAAQMLAIFLLLLNFPDFYGFNLAFIGNVLMFIASLLTVWSMLYYLKMAWKEIA

SEQ ID NO: 2311 - DNA, 564 bp, Neisseria meningitidis Z2491
  CDS (1)..(564): transl_table=11
atgccttggaatctccctatcttcctcacatggttgagggtcttgctcattcctgtcatgacagcccttttttacctgccttttccgtggttcgcggaggaaacgattaatctcaccgccgccgtcatttttgccgttgccgccttaaccgactggtttgacggatttttggcaagactgtggaaacagacttccgatttcggcgccttcctcgatcccgtcgccgacaagctgatggttgccgtatcgctacttttactggtcaaactcgaccggacctatgttttgtttgccatgatcattatcggcagggaaattaccatttccgcattgcgcgaatggatggcgcaaatgggcaaaaggaacagcgttgccgtcgccaccgtcggtaagttcaaaaccgccgcgcaaatgctggcaattttcctgctgctgctgaatattcccgatttttacggatttaatcttgttgttatcggcaatgtattgatgtttatcgcatctttgctgacagtctggtcgatgctgtattatctgaaaatggcgtggaaagaaatcgcctga

SEQ ID NO: 2312 - protein, 187 aa, Neisseria meningitidis Z2491
MPWNLPIFLTWLRVLLIPVMTALFYLPFPWFAEETINLTAAVIFAVAALTDWFDGFLARLWKQTSDFGAFLDPVADKLMVAVSLLLLVKLDRTYVLFAMIIIGREITISALREWMAQMGKRNSVAVATVGKFKTAAQMLAIFLLLLNIPDFYGFNLVVIGNVLMFIASLLTVWSMLYYLKMAWKEIA

SEQ ID NO: 2313 - DNA, 636 bp, Xylella fastidiosa 9a5c
  CDS (1)..(636): transl_table=11
atgaaattgaccgtccccacttggttaacgctgctacggatcgtgatgatccctgtgctcattgtggtgttctatctaccttatcaatggagcaatattgtcgccacgggagtgtttgcgatcgctgcgattaccgactggcttgatggatggatcgcacgtcgttacgcgcaacattcgttattgggtgcgtttttagacccagttgcggacaaattgatggtggccatcgcattatttctcattgtgcaaggtcacccgacaccgtcgatggcattttgggcggcagtgatcgtcagtcgtgaaattgcagtgtcagcattgcgtgagtggatggccgaaattggtcatcgtgccaaggtgcgtgtagctgtccttggcaaagtgaagactacggctcaaatgattgcggtactgtgtctgctctattcggtgacacccgagaagaaggcgatccatcaaatatggtttggccacttgatcttccaagtcggttattggacattgttgatttccgcgttactgacactgtggtctggtttccagtatttgcatgctgcctggcctagtctacgtaccggaaaacctgtggtgattaaaacgcacatcagcaagaaccgaaaaattaatagttga

SEQ ID NO: 2314 - protein, 211 aa, Xylella fastidiosa 9a5c
MKLTVPTWLTLLRIVMIPVLIVVFYLPYQWSNIVATGVFAIAAITDWLDGWIARRYAQHSLLGAFLDPVADKLMVAIALFLIVQGHPTPSMAFWAAVIVSREIAVSALREWMAEIGHRAKVRVAVLGKVKTTAQMIAVLCLLYSVTPEKKAIHQIWFGHLIFQVGYWTLLISALLTLWSGFQYLHAAWPSLRTGKPVVIKTHISKNRKINS

SEQ ID NO: 2315 - DNA, 549 bp, Salmonella typhimurium LT2
  CDS (1)..(549): transl_table=11
atgcaatttaatatccctacgttgctcacgctgtttcgcgtcatcctgattccattctttgtcgtggtgttttatttgccgttcgcctgggcgccgatggtcagcgcgctgattttctgtattgccgctattaccgactggtttgacggctttctggcgcgacgctggaaccagagtacgcgtttcggcgctttcctcgaccccgtcgccgacaaggtgctggtggcgatcgccatggtgctggtcaccgagcattatcatagctggtgggtgacgttacctgcggcgacgatgatagcccgcgaaattattatctctgctctgcgtgaatggatggcggagctgggcaaacgcagtagtgtagcggtctcctggatcggtaaagtcaaaactaccgcgcagatggtggcgctggcgtggctcttgtggcgtccgaatatctgggtagagtatgccgggatcgcgcttttctttgtcgcagcggtgctaacattgtggtccatgttgcaatatttgagcgctgcacgcggagatttgcttgatcagtga

SEQ ID NO: 2316 - protein, 182 aa, Salmonella typhimurium LT2
MQFNIPTLLTLFRVILIPFFVVVFYLPFAWAPMVSALIFCIAAITDWFDGFLARRWNQSTRFGAFLDPVADKVLVAIAMVLVTEHYHSWWVTLPAATMIAREIIISALREWMAELGKRSSVAVSWIGKVKTTAQMVALAWLLWRPNIWVEYAGIALFFVAAVLTLWSMLQYLSAARGDLLDQ

SEQ ID NO: 2317 - DNA, 579 bp, Listeria monocytogenes EGD-e
  CDS (1)..(579): transl_table=11
atgaatttacctaataaattgacggttatccgaatttttatgataccaatttttgttattctttgtgtagtaccatttgactggggaagcgttacttggcttgattcaactatcccagtgacaagtttagttgcaaccattattttcatcgtagcggcccttacagattggtttgatggacatttagcacgtaaatataatttaataactaacttcggtaaatttgccgatccgatggctgataaactacttgtagcagctgcatttattattcttgtagaaatgcatatcgcgccatcttgggtagttattcttattattagtcgtgaactagctgttactggtctacgcttacttttagttgaaggcggagaagtgcttgcagctggtcaacttggtaaaattaaaacattcacacaaatgattgctattccgcttatgttattaaataactttccatttgcttggacgggtattcgtgtagatttagtgttcttgtatgtatgtgcattctttgcagtatggtcaggaatcgattatttctacaaaaatcgtggtgttttcaaaggatctatgtaa

SEQ ID NO: 2318 - protein, 192 aa, Listeria monocytogenes EGD-e
MNLPNKLTVIRIFMIPIFVILCVVPFDWGSVTWLDSTIPVTSLVATIIFIVAALTDWFDGHLARKYNLITNFGKFADPMADKLLVAAAFIILVEMHIAPSWVVILIISRELAVTGLRLLLVEGGEVLAAGQLGKIKTFTQMIAIPLMLLNNFPFAWTGIRVDLVFLYVCAFFAVWSGIDYFYKNRGVFKGSM

SEQ ID NO: 2319 - DNA, 576 bp, Ralstonia solanacearum GMI1000
  CDS (1)..(576): transl_table=11
atgcctttcaacttcccgatcctcctgacctggctgcgggtcgccatgatcccgctggtggtgggcgtgttctacgtgccggatgcctggatggcgccgcccgtcaagaacctgaccgccgcggcgttcttcatcgttgcgagcctgaccgactggttcgacggattcctggcgcgccgctggaaccagacttcggcgttcggcgccttcctggacccggtcgccgacaagctgatggtggccgctgcgttgctggtgctgctggcgcttggccgtgtgtcggacgtcatcgcgctcgtcatcatcggccgcgagatcaccatctcggcgctgcgcgagtggatggcgcagatcggtgcctcacgcagcgttgcggtcaacttcctcggcaagctgaagacgaccttccagatggtcgcgattccgctgctgctgttcgagggccgcctgttcgatgtggtcgatgcgcgggtgtggggggcgtggctgatctatgtggctgcggtgctgacgctgtggtcgatggcgtactacatgaagctggcctggccgcagatccgggagcgctcgaaatga

SEQ ID NO: 2320 - protein, 191 aa, Ralstonia solanacearum GMI1000
MPFNFPILLTWLRVAMIPLVVGVFYVPDAWMAPPVKNLTAAAFFIVASLTDWFDGFLARRWNQTSAFGAFLDPVADKLMVAAALLVLLALGRVSDVIALVIIGREITISALREWMAQIGASRSVAVNFLGKLKTTFQMVAIPLLLFEGRLFDVVDARVWGAWLIYVAAVLTLWSMAYYMKLAWPQIRERSK

SEQ ID NO: 2321 - DNA, 588 bp, Agrobacterium tumefaciens str. C58
  CDS (1)..(588): transl_table=11
atggcttcgcgcgcatacaacattcccaacctcctcacctatgcccgcatccttgcggttcctgtcatcgttttgtgtttctttatcgaaggaaagctggaaagctcggacttcgcgcgctggacggcactctggctgttcatcgtcgcttcgctgaccgattttctcgacggttatctcgcccgcatctggaaccagacgtcgaatatcggccgcatgctggacccgatagccgacaagctgctggtcgcctccgtgctgctgttgatggcggcggatggcaccattgccggctggtcgctctgggctgcgattaccattctctgccgtgaaattctggtttccggcctgcgcgaatatctagctgcgctgaaggtcagcgttcccgtcacccagatcgccaaatggaagacaaccatccagatggttgccatcgcctttcttctcgcaggtcctgcgggcgacaaggtgctgccctatacgaccgagatggggattacgcttctgtggctcgccgcggcgctgaccatgtataccggttatgattacttcaaggcgggtctcaagcacattgtggacgaagaatga

SEQ ID NO: 2322 - protein, 195 aa, Agrobacterium tumefaciens str. C58
MASRAYNIPNLLTYARILAVPVIVLCFFIEGKLESSDFARWTALWLFIVASLTDFLDGYLARIWNQTSNIGRMLDPIADKLLVASVLLLMAADGTIAGWSLWAAITILCREILVSGLREYLAALKVSVPVTQIAKWKTTIQMVAIAFLLAGPAGDKVLPYTTEMGITLLWLAAALTMYTGYDYFKAGLKHIVDEE

SEQ ID NO: 2323 - DNA, 543 bp, Streptococcus pyogenes MGAS8232
  CDS (1)..(543): transl_table=11
atgataaaaaaagaaaatattcctaatctattaactcttgttcgaatcgcaatgattcctttctttctttttattacttcctcatctaataaggtggggtggcatatttttgcagctgtgatttttgcaattgccagttttaccgattatctagatgggtatcttgcgcgtaagtggcatgtagtcagtaattttggaaagtttgccgatcctctagcagataagatgcttgtcatgagtgcctttatcatgttagttggacttggcttagttcctgcgtgggtatcagctgttattatttgccgagaattggcagtaactggtcttcgattactacttgttgaaaccggaggaaaggtccttgcagctgctatgctgggaaaaatcaaaacagcgacacaaatgttgtctattattttattactttgccattggatattcctaggaaacgtcttactctgtattgctctttttttcactatttattctggatatgattattttaaaggagcaagctttctttttaaggatacgtttaaataa

SEQ ID NO: 2324 - protein, 180 aa, Streptococcus pyogenes MGAS8232
MIKKENIPNLLTLVRIAMIPFFLFITSSSNKVGWHIFAAVIFAIASFTDYLDGYLARKWHVVSNFGKFADPLADKMLVMSAFIMLVGLGLVPAWVSAVIICRELAVTGLRLLLVETGGKVLAAAMLGKIKTATQMLSIILLLCHWIFLGNVLLCIALFFTIYSGYDYFKGASFLFKDTFK

SEQ ID NO: 2325 - DNA, 633 bp, Xanthomonas campestris pv. campestris str. ATCC 33913
  CDS (1)..(633): transl_table=11
atgaagttgaccatccccacgtggctgacactgctgaggatcgtgatgatcccggtgttggtcgtggtgttctacctgccgtacaagtggaccaatttcgcctcggccggtgtgtttgccctggccgcgatcaccgactggctggatggctgggtcgcgcggcgttatcaccagtattcggcgtttggcgcatttctggacccggtggccgacaagctgatggtcgccgtggcgttgttcctcatcgtgcaagggcatcccacgccgtggatggcgttctgggcggcggtcatcgtgggtcgcgaaatcgcggtgtctgcattgcgcgagtggatggccgagatcggccagcgtgccaaggtgcgcgtggcaatgatcggcaaggtcaagaccaccgcacagatggttgcgttgctctgtttgctgtattcggtcacgccggggcagatgcccacgcatgaaatctggctgggcaacctgatcttccaggcggggtactggaccctggcaatcgccgcattgctgacgttgtggtcgggtttccagtatctgcaggccgcatggccaagtttgcgtgccgatgaaaaggccgcgattaccaacaaaccgaaaaaagtcgaaagcaacagttga

SEQ ID NO: 2326 - protein, 210 aa, Xanthomonas campestris pv. campestris str. ATCC 33913
MKLTIPTWLTLLRIVMIPVLVVVFYLPYKWTNFASAGVFALAAITDWLDGWVARRYHQYSAFGAFLDPVADKLMVAVALFLIVQGHPTPWMAFWAAVIVGREIAVSALREWMAEIGQRAKVRVAMIGKVKTTAQMVALLCLLYSVTPGQMPTHEIWLGNLIFQAGYWTLAIAALLTLWSGFQYLQAAWPSLRADEKAAITNKPKKVESNS

SEQ ID NO: 2327 - DNA, 633 bp, Xanthomonas axonopodis pv. citri str. 306
  CDS (1)..(633): transl_table=11
atgaagttgaccatccccacgtggctgacactgctgaggatcgtgatgatcccggtgttggtcgtggtgttctacctgccctacacgtggacgaacttcgcgtccgccggcgtgtttgcgctggccgccatcaccgactggctggatggctgggtcgcgcggcgttatcaccaatattccgcattcggcgcatttctggacccggtcgccgacaagttgatggtcgcggtggcgctgttcctgattgtgcagggccatcccacgccgtggatggcgttctgggcggcagtcatcgtcggacgcgagattgccgtctctgcactccgcgaatggatggccgagatcggccagcgcgccaaggtgcgcgtggcggccatcggcaagatcaaaaccaccgcacaaatggtggcgttgctgtgcctgttgtattcggtcaccccagggcagatgcctacgcatgaaatctggctgggcaacctgatttttcgtgcgggctactggacgctggccattgcggccttgctgacgctgtggtcagggtttcagtatctgcaggccgcgtggccaagcctgcgcgccgacgagaaagcagcgatcagcaacaagccgaaaaaaatcgaaagcaacagttga

SEQ ID NO: 2328 - protein, 210 aa, Xanthomonas axonopodis pv. citri str. 306
MKLTIPTWLTLLRIVMIPVLVVVFYLPYTWTNFASAGVFALAAITDWLDGWVARRYHQYSAFGAFLDPVADKLMVAVALFLIVQGHPTPWMAFWAAVIVGREIAVSALREWMAEIGQRAKVRVAAIGKIKTTAQMVALLCLLYSVTPGQMPTHEIWLGNLIFRAGYWTLAIAALLTLWSGFQYLQAAWPSLRADEKAAISNKPKKIESNS

SEQ ID NO: 2329 - DNA, 549 bp, Shewanella oneidensis MR-1
  CDS (1)..(549): transl_table=11
atgccgtttaacttacccatagcattaactctttttaggctttttttactgcccattttcgtggtgttgttttatttaccttatagctggacgccttttgttgccgcatttgtgttttggctagcggcgttaacggatgcattagacggttatgcggcgcgtaaactcaagcaactgacccgttttggcgccttcctcgatcccgtcgccgataaactgatggtgatcaccgcgctcgtattattagttgaccaatacgctgatatttggctcacactgccagcactgtttatgattggccgtgaaattgtgatttcagctctgcgggagtggatggccgaattaggtaaacgcggaacggttgctgtctcttggattggtaaatataaaaccgctgctcaaatggtggcgattattggcctgatttggcaatacaacccattaatgatccaagcggcatttgtgctgttatatatcgctgccgtattaacgttctggtcaaagatgagctacattttagccgcctggaaagatttaacggctgaatag

SEQ ID NO: 2330 - protein, 182 aa, Shewanella oneidensis MR-1
MPFNLPIALTLFRLFLLPIFVVLFYLPYSWTPFVAAFVFWLAALTDALDGYAARKLKQLTRFGAFLDPVADKLMVITALVLLVDQYADIWLTLPALFMIGREIVISALREWMAELGKRGTVAVSWIGKYKTAAQMVAIIGLIWQYNPLMIQAAFVLLYIAAVLTFWSKMSYILAAWKDLTAE

SEQ ID NO: 2331 - DNA, 561 bp, Pseudomonas putida KT2440
  CDS (1)..(561): transl_table=11
atgaatattccaaacctgctcaccgttctacgcgtcctgctcattccgtgcttcattctgctgttctacatgccctatcagtggagttacatggccgccagcagcgtattcgccgtagccgccgccaccgattggctggacggctacctggcccgtcgactgcagcagagcacgccgttcggcgccttcctcgacccggtggccgacaagctgatggtggcagtggccctggtgctgctggtgcagacccacgccaacttctggctgaccctgccggcggcggtcatcatcggccgcgagatcgtggtgtctgcgctgcgcgagtggatggccgagctaggcgcgcgggcgcatgtggcggtgtccaacctcggtaagtggaagactgcggcgcagatgctggcgctggtgatcctgctgggcaacccgccggtggtgaccttctgggtgatcctgggctacgggctgctgctggtggcagcggggctgacgctgtggtcgatggtgcactacctgctggccgcctggccgcacctgcgcgaaggctcggaaaaaaaataa

SEQ ID NO: 2332 - protein, 186 aa, Pseudomonas putida KT2440
MNIPNLLTVLRVLLIPCFILLFYMPYQWSYMAASSVFAVAAATDWLDGYLARRLQQSTPFGAFLDPVADKLMVAVALVLLVQTHANFWLTLPAAVIIGREIVVSALREWMAELGARAHVAVSNLGKWKTAAQMLALVILLGNPPVVTFWVILGYGLLLVAAGLTLWSMVHYLLAAWPHLREGSEKK

SEQ ID NO: 2333 - DNA, 525 bp, Vibrio vulnificus CMCP6
  CDS (1)..(525): transl_table=11
atgagattatttctcatcccagtgtttgtcgttgcgttttatcttccctattcatgggctccttttgctgcggcaatggtgttttgggttgccggttttaccgattggctcgatgggatgttagcaagaaaactgggtcaaacgtctcgtttcggtgcgtttatcgatccagtggcggataaagtactagtggcaaccgccttgattttgattacagaacattaccattccatttgggtaacgattccagccgtgaccatgatcgcaagggaaatcattatttcagcactgcgtgagtggatggcagagatcggcaaacgagcgagcgttgctgtctcttgggtcggtaaagtaaaaaccatgactcaaatgtttgcgctatgggtattaatttggcgttatgacgattggatggtttggttaggtttcggcgcattgtacattgccacattccttacttactggtcgatggtgcagtacttgatggctgcgaaagatgacttgttgaatgaagaacatcactaa

SEQ ID NO: 2334 - protein, 174 aa, Vibrio vulnificus CMCP6
MRLFLIPVFVVAFYLPYSWAPFAAAMVFWVAGFTDWLDGMLARKLGQTSRFGAFIDPVADKVLVATALILITEHYHSIWVTIPAVTMIAREIIISALREWMAEIGKRASVAVSWVGKVKTMTQMFALWVLIWRYDDWMVWLGFGALYIATFLTYWSMVQYLMAAKDDLLNEEHH

SEQ ID NO: 2335 - DNA, 630 bp, Xylella fastidiosa Temecula1
  CDS (1)..(630): transl_table=11
atgaaattgaccgtccccacttggttaacgctgctacggatcgtgatgatccctgtgctcattgtggtgttctatctaccttatcaatggagcaatattgtcgctacgggagtgtttgcgatcgctgcaattaccgactggcttgatggatggatcgcacgtcgttacgcgcaacattcgttattgggtgcgtttttagacccagttgcggacaaattgatggtggccatcgcattatttctcattgtgcaaggtcacccgacaccgtcgatggcattttgggcagcagtgatcgttagtcgtgaaattgcagtgtcagcattgcgtgagtggatggccgaaattggtcatcgtgccaaggtgcgtgtagctgtccttggcaaagtgaagacgacggctcaaatgattgcggtactgtgtctgctctattcggtgacacccgagaagaaggcgatccatcaaatatggtttggccacttgatcttccaagtcggttattggacattgctgatttccgcgttactgacactgtggtctggtttccagtatttgcacgctgcctggcctagtttacgtaccggaaaacctgtagtgattaaaacgcacatcagcaagaaccgacaaaattaa

SEQ ID NO: 2336 - protein, 209 aa, Xylella fastidiosa Temecula1
MKLTVPTWLTLLRIVMIPVLIVVFYLPYQWSNIVATGVFAIAAITDWLDGWIARRYAQHSLLGAFLDPVADKLMVAIALFLIVQGHPTPSMAFWAAVIVSREIAVSALREWMAEIGHRAKVRVAVLGKVKTTAQMIAVLCLLYSVTPEKKAIHQIWFGHLIFQVGYWTLLISALLTLWSGFQYLHAAWPSLRTGKPVVIKTHISKNRQN

SEQ ID NO: 2337 - DNA, 567 bp, Pseudomonas syringae pv. tomato str. DC3000
  CDS (1)..(567): transl_table=11
gtgccgatgaatatccctaatctgatcaccgtactacgcgttttactgattccgatcttcattttgctgttctatatgccttatcactggagctacatggcagccagtgcagtctttgcgttcgctgcggcgaccgactggctcgacgggtatttggctcgccgtcttgagcaaagcacgccattcggtgcgtttcttgatccggtagcagacaaactgatggtggccgtggccctggtgctgctggttcaggcgcacgccaacctgtggctgaccctgccggcagcggtgatcatcggccgtgaaatcgtgatttccgcgctccgcgaatggatggcggaaataggcgcgcgtgcacaagtcgccgtttccaacatgggcaaatggaaaaccgccgcgcaaatgctggcgctggtcattctgctcggcaacccgccggcagtcaccttctgggtgattttcggttacgcattgctgctcgtcgcagcggggctgaccctgtggtcgatggtgcaatacctcagagccgcatggccgcatctcaagaccacagcagaaaaaaaataa

SEQ ID NO: 2338 - protein, 188 aa, Pseudomonas syringae pv. tomato str. DC3000
MPMNIPNLITVLRVLLIPIFILLFYMPYHWSYMAASAVFAFAAATDWLDGYLARRLEQSTPFGAFLDPVADKLMVAVALVLLVQAHANLWLTLPAAVIIGREIVISALREWMAEIGARAQVAVSNMGKWKTAAQMLALVILLGNPPAVTFWVIFGYALLLVAAGLTLWSMVQYLRAAWPHLKTTAEKK

SEQ ID NO: 2339 - DNA, 558 bp, Vibrio parahaemolyticus RIMD 2210633
  CDS (1)..(558): transl_table=11
atgcgtttgaatatcccgaacattctgtcccttcttagactgttcttaatccctgtattcgtggttgtcttctatctgccttattcttgggctccctttgcggcagcaatggtgttctgggttgcaggttttaccgactggttagatggcatgctagcacgtaaacttggccaaacttcaaggtttggtgcgtttatcgatccagtcgctgataaagtactggttgcgacagcgttgattttgattacagagcactaccacaccatttgggtaactatccctgctgtaaccatgattgcgcgagagattatcatctctgcattgcgtgaatggatggctgaaatcggtaaacgcgcaagtgtcgctgtatcctgggttggtaaagtaaaaacagtttctcagatgtttgcattatgggttctgatttggcgctatgacgaatggatggtttggctaggctttgccgctctgtacgtcgctacattcctaacatattggtcgatggttcagtatcttgcagcagcaaaagatgatttgctgaacgaagaacatcactaa

SEQ ID NO: 2340 - protein, 185 aa, Vibrio parahaemolyticus RIMD 2210633
MRLNIPNILSLLRLFLIPVFVVVFYLPYSWAPFAAAMVFWVAGFTDWLDGMLARKLGQTSRFGAFIDPVADKVLVATALILITEHYHTIWVTIPAVTMIAREIIISALREWMAEIGKRASVAVSWVGKVKTVSQMFALWVLIWRYDEWMVWLGFAALYVATFLTYWSMVQYLAAAKDDLLNEEHH

SEQ ID NO: 2341 - DNA, 561 bp, Coxiella burnetii RSA 493
  CDS (1)..(561): transl_table=11
atgaatatcgcgacttttctgacatttgtgcgtttatcggctatcccgatttttggaattttttattttttaccttttcggtgggcgcatccggtagccgctcttatttttatcgttgcaggaattacggattggttagacggttatttggcgcgcagtctttcgcagacgaccgattttggcgctttcctcgaccccgtggccgataaactattggtgagtgctgccttggttttggtggttggtgagaattatgtggcttatttagccgttcccgccgcagttatcatctgccgggagatccttatttcagctttacgcgaatggatggctgaattgggtaaacgcacaagtttagcagtcactctcttatcaaaagtcaaaacgctgttgcaaatgctagctttaatattattgatagggtatgcgccgggctttccagcggaactgctgtggggcggcgttattttactttggatagccgccgtcttaaccgtctggaccatgatcatctatctaaagattgcctggccagacttgacaatgccccgtgaacagtaa

SEQ ID NO: 2342 - protein, 186 aa, Coxiella burnetii RSA 493
MNIATFLTFVRLSAIPIFGIFYFLPFRWAHPVAALIFIVAGITDWLDGYLARSLSQTTDFGAFLDPVADKLLVSAALVLVVGENYVAYLAVPAAVIICREILISALREWMAELGKRTSLAVTLLSKVKTLLQMLALILLIGYAPGFPAELLWGGVILLWIAAVLTVWTMIIYLKIAWPDLTMPREQ

SEQ ID NO: 2343 - DNA, 579 bp, Nitrosomonas europaea ATCC 19718
  CDS (1)..(579): transl_table=11
atgctgatgaatcttcccaattttctgacgtggctgcgtatcatggcaattcccctgtttgtcggtattttttatctgccgacggactggatgtctccggccacgcagaatctggttgccaccatcgtatttgccggcgccgcgttgaccgactggctggatggctacctggcgcgggtgctcaaccagacttccgcatttggtgcctttcttgatccggtagcagacaaactgatggtagccgccgccctgatcgtactggtgtatctggaccggttggatgccccggttgctttgatcatcattggtcgtgaaattacaatttccgcactgcgtgaatggatggcgcaaattggcaaatccaagagtgtggcagtgtcttttctggggaagatcaaaacggctgcacaaatggtggcaattcccctgctgctctaccacgacagaatcaatgatgcgttcgattcacagacggctggcacctggctgatttacattgcagccattctgacattgtggtcgatgatctactacctgagagcagccattccacatgtgattcatcacagccagcattga

SEQ ID NO: 2344 - protein, 192 aa, Nitrosomonas europaea ATCC 19718
MLMNLPNFLTWLRIMAIPLFVGIFYLPTDWMSPATQNLVATIVFAGAALTDWLDGYLARVLNQTSAFGAFLDPVADKLMVAAALIVLVYLDRLDAPVALIIIGREITISALREWMAQIGKSKSVAVSFLGKIKTAAQMVAIPLLLYHDRINDAFDSQTAGTWLIYIAAILTLWSMIYYLRAAIPHVIHHSQH

SEQ ID NO: 2345 - DNA, 555 bp, Haemophilus ducreyi 35000HP
  CDS (1)..(555): transl_table=11
atgatgaaactaaatttcccgacttatcttactttattcagagttgtgttaatcccattatttattgcagcattttatttgcctgagggatggtatgcacctgaaatttcaactttaatttttttcattgcatctattacagacgcatttgatggctatttagcgcgtaaatggaatcaaacaacccgtttaggcgcatttcttgatcctgtggcagataaaattttggttacagtagcatttgtctgtattgtggagtattaccatagttggtggattactattcctgttagcattatgattgcccgcgaaattttgatttctgctttacgagaatggatggctgaaattggcgaacgcgcgagtgttgcggtgtcaatttggggtaaagtaaaaaccgcctgtcaaatgttagcgctaggcggaatgttatggcgacaaagtacttttatggaaatccttgcctttattttgctctacatatcggcgattttaacgatttggtcgatgttacaatatttaaaagcttctaagaagagtttgatgaaatcttaa

SEQ ID NO: 2346 - protein, 184 aa, Haemophilus ducreyi 35000HP
MMKLNFPTYLTLFRVVLIPLFIAAFYLPEGWYAPEISTLIFFIASITDAFDGYLARKWNQTTRLGAFLDPVADKILVTVAFVCIVEYYHSWWITIPVSIMIAREILISALREWMAEIGERASVAVSIWGKVKTACQMLALGGMLWRQSTFMEILAFILLYISAILTIWSMLQYLKASKKSLMKS

SEQ ID NO: 2347 - DNA, 573 bp, Bordetella bronchiseptica RB50
  CDS (1)..(573): transl_table=11
atgccgataaacgtacccattttcctgacctggctgcggatcgccatgattccgctggtggtcggcctgttctacctgcccgagagctggatgtccgtgcccatgcgcgacaccttcgcggcctgggcgttcattatcgcggccttgaccgactggttcgacggatggctggcgcggcgctggaaccagacctcggccttcggcgcgttcctggacccggtggccgacaagctgatggtctgcgcggcgctgatcgtgctgctggacctgagccgcgtcgatgccttcatttcgctgatcatcatcggccgggaaatcaccatttcggcgttgcgcgaatggatggccaagatcggcgccagcgcgagcgtggcggtgcaccggctgggcaagttcaagacggcggcgcagatggtggcgataccgtgcctgctgtacgaccagccgctgttcggcctgagcagccgcctgatcggcgacgtgctgatcgtggtggcggcggtgctgaccgtctggtcgatgctgtattacctgcagcgggcctggcccgccatccgcgaaaagtcgcagtga

SEQ ID NO: 2348 - protein, 190 aa, Bordetella bronchiseptica RB50
MPINVPIFLTWLRIAMIPLVVGLFYLPESWMSVPMRDTFAAWAFIIAALTDWFDGWLARRWNQTSAFGAFLDPVADKLMVCAALIVLLDLSRVDAFISLIIIGREITISALREWMAKIGASASVAVHRLGKFKTAAQMVAIPCLLYDQPLFGLSSRLIGDVLIVVAAVLTVWSMLYYLQRAWPAIREKSQ

SEQ ID NO: 2349 - DNA, 582 bp, Chromobacterium violaceum ATCC 12472
  CDS (1)..(582): transl_table=11
atgcccttcaatttgccgatattactgacctggctcagggtcgccctgatcccgatctgcgtggcggtattcttcctgccggactccattctgctgctgcatagccgcaacgctgtgggggccggcattttcgcattggcggccgccaccgactggctggacggctacctggcgcgcaagctggggcagacctcggccttcggcgcctttctcgacccggtggcggacaagctgatcgtggccgcggcgctgatcctgctggtgcaattgggccgcaccgagggttggatggcgatgatcatcatcggccgcgagatcaccatttcggcgctgcgcgaatggatggcgggcatgggcagccgcagcagcgtcgccgtcgcctatatcggcaagttgaagaccgctgcccagatgttggcgatcacgctgctgctgtacgacggcgcgcttgtcccgggcctggatgcgcgcgggttgggaaatttttcgatgtacgttgctgtcatattgactttgtggtcaatgatttattacctgcaaatggcggccaaggagttcgcgggtaaaaaaatagacgtttga

SEQ ID NO: 2350 - protein, 193 aa, Chromobacterium violaceum ATCC 12472
MPFNLPILLTWLRVALIPICVAVFFLPDSILLLHSRNAVGAGIFALAAATDWLDGYLARKLGQTSAFGAFLDPVADKLIVAAALILLVQLGRTEGWMAMIIIGREITISALREWMAGMGSRSSVAVAYIGKLKTAAQMLAITLLLYDGALVPGLDARGLGNFSMYVAVILTLWSMIYYLQMAAKEFAGKKIDV

SEQ ID NO: 2351 - DNA, 558 bp, Vibrio vulnificus YJ016
  CDS (1)..(558): transl_table=11
atgcgtttgaacatccccaacatattgtcactaatgagattatttctcatcccagtgtttgtcgttgcgttttatcttccctattcatgggctccttttgctgcggcaatggtgttttgggttgccggttttaccgattggctcgatgggatgctagcaagaaaactgggtcaaacgtctcgttttggtgcgtttattgatccagtggcggataaagtactagtggcaaccgctttgattttgattacagaacattaccattccatttgggtaacgattccagccgtgaccatgatcgcaagggaaatcattatttcagcactgcgtgagtggatggcagagatcggcaaacgagcgagcgttgctgtctcttgggtcggtaaagtaaaaaccatgactcaaatgtttgcgctatgggtattaatttggcgttatgacgattggatggtttggttaggtttcggcgcattgtacattgccacattccttacttactggtcgatggtgcagtacttgatggctgcgaaagatgacttgttgaatgaagaacatcactaa

SEQ ID NO: 2352 - protein, 185 aa, Vibrio vulnificus YJ016
MRLNIPNILSLMRLFLIPVFVVAFYLPYSWAPFAAAMVFWVAGFTDWLDGMLARKLGQTSRFGAFIDPVADKVLVATALILITEHYHSIWVTIPAVTMIAREIIISALREWMAEIGKRASVAVSWVGKVKTMTQMFALWVLIWRYDDWMVWLGFGALYIATFLTYWSMVQYLMAAKDDLLNEEHH

SEQ ID NO: 2353 - DNA, 990 bp, Oryza sativa (japonica cultivar-group)
  CDS (1)..(990)
atgcccccatccgtcgccacccacgcatccctcctcctcaaagccgccgccgcagccgcgcacctccaccccaagcccttcttctccccacgcgcggcgccgccgcggatcccgtctgcccccgcgccgccggccgcaggaggcagccgctaccgtccgacgacgacgacgacggcggcggcgacggcgaccagcgccaccgccgcgtgccgctggttccggtggcccccgcccgcgcaggcgcccgtgaggggtctgtgctccttgccgcattctggcggtggcggtggtggtggtgagggtatgggatctgaaggggtcgggaggaggaggcgggtggtggcgcctgcggtgaacggggtggcgaaggacggggcgccacagccgcctccgcccaagctgctcacgctgcccaccgtgctcaccattggccgcgtcgccgccgtgccgctcctgataagcactttctacatggaggggccttgggcagcaactgcgacaactggcatcttccttgctgctgcagtcactgattggctagatggttatattgcgagaaagatgcagttaggaacaccttttggtgcatttcttgatcctgtggctgacaagcttatggtagctgcaacattagtgttgctgtgcaccaaacctttggaaatttcactgctcagagatgggccatggcttctaacggttcctgccattgctattattgggagagagatcacaatgtcagctgtgagagaatgggctgcgtctcagaataccaaagttcttgaggctgtggcagttaacaatttggggaagtggaagaccgcaacgcagatgacagcattgactatcctccttgcgagcagagacaaaagtcttcctgcacaagatgctctggttacttccggcatcgcattgctttatgtatcagctggacttgccatatggtccctagtggtgtacatgagaaagatatggcggatacttctaaaatag

SEQ ID NO: 2354 - protein, 329 aa, Oryza sativa (japonica cultivar-group)
MPPSVATHASLLLKAAAAAAHLHPKPFFSPRAAPPRIPSAPAPPAAGGSRYRPTTTTTAAATATSATAACRWFRWPPPAQAPVRGLCSLPHSGGGGGGGEGMGSEGVGRRRRVVAPAVNGVAKDGAPQPPPPKLLTLPTVLTIGRVAAVPLLISTFYMEGPWAATATTGIFLAAAVTDWLDGYIARKMQLGTPFGAFLDPVADKLMVAATLVLLCTKPLEISLLRDGPWLLTVPAIAIIGREITMSAVREWAASQNTKVLEAVAVNNLGKWKTATQMTALTILLASRDKSLPAQDALVTSGIALLYVSAGLAIWSLVVYMRKIWRILLK

SEQ ID NO: 2355 - DNA, 582 bp, Bartonella henselae str. Houston-1
  CDS (1)..(582): transl_table=11
atgaaaaatcatactttttcttttccaaatattttaacttatgcacgaattgttgctgtgccaatggttgttgcatgcttttttttagaaggacgactgcaatcaagtgatattgcacgttgggctgctgtttctatttttgtagttgcatctattactgactttcttgatggttaccttgcccgtatttgggaacaaacatctaatattgggcgcatgttagatccaattgcagataaacttctcgtctcggcctgtttactcttgctcgcagcagacagtactattgcggggtggacattatgggcagctattattattctttgtcgggaaattcttgtatccggattgcgtgaatatttagctgaattgaaagttagtgtccctgtctctcgcctcgcaaaatggaaaacttttgtacaaatgatagctattatctttcttttagcgggaccagctggcaataaaattatcccttatacattggaatttggcatcactatgctgtggatttctgcccttcttacattgtggacaggatgggattattttcgtgcaggtttaaaacatgttatcatataa

SEQ ID NO: 2356 - protein, 193 aa, Bartonella henselae str. Houston-1
MKNHTFSFPNILTYARIVAVPMVVACFFLEGRLQSSDIARWAAVSIFVVASITDFLDGYLARIWEQTSNIGRMLDPIADKLLVSACLLLLAADSTIAGWTLWAAIIILCREILVSGLREYLAELKVSVPVSRLAKWKTFVQMIAIIFLLAGPAGNKIIPYTLEFGITMLWISALLTLWTGWDYFRAGLKHVII

SEQ ID NO: 2357 - DNA, 594 bp, Acinetobacter sp. ADP1
  CDS (1)..(594): transl_table=11
gtgtctatgacaacaggtcgaatcctgaatatcccaaatattttaacacttgcacgaatcgcccttattcctgtttttcttatagtggcatattggccacctgcaatcggggtaaacttccatgaaggaagctttctgcggcatctcgtgctgacagccatttttattttggctgcggttacagactggtttgatggttatttggcgcgagctttaaaccagacatcggcttttggccgttttttagatcctgtggcagataaattaatggtggcttcggcactgattgtattggtgcagtggcaaccgacgatctccatggcatttgctgcaattgtgattatctcacgagagattacagtttctgcattacgcgagtggatggcagaactgggtgcaagaaccaatgttgcagtttcgaccgtaggtaaatataaaacagctttccagatgattgcgattagcgtcttcttattaaactggcagcccctggatctgctggcgtatgccttgctttacacggctgtgattttgactttatggtcgatgtttatttatctgaaagcagcttggccttatctcaaacagccttaa

SEQ ID NO: 2358 - protein, 197 aa, Acinetobacter sp. ADP1
MSMTTGRILNIPNILTLARIALIPVFLIVAYWPPAIGVNFHEGSFLRHLVLTAIFILAAVTDWFDGYLARALNQTSAFGRFLDPVADKLMVASALIVLVQWQPTISMAFAAIVIISREITVSALREWMAELGARTNVAVSTVGKYKTAFQMIAISVFLLNWQPLDLLAYALLYTAVILTLWSMFIYLKAAWPYLKQP

SEQ ID NO: 2359 - DNA, 549 bp, Erwinia carotovora subsp. atroseptica SCRI1043
  CDS (1)..(549): transl_table=11
atgcaatttaatataccgacgttgcttaccctgtttcgtgttgctcttattccgtttttcgtgctggcgttttatcttccattcgtctgggcaccgctgctttgcgcgttgatcttcgtgtttgctgccgtaacggattggtttgatggtttccttgcccgccgctggaaacaaaccacgcgctttggtgccttcctcgatcctgttgcggataaagtgatggtggctgtcgcgctggtgttggttgcggaatattatcattcttggtggattacgttgcctgctgcaacgatgatcgcgcgagaaatcattatttcagcattgcgcgagtggatggctgaaattggcaagagaagcagcgttgctgtgtcgtggatagggaaggtcaaaaccacggctcagatgatggcgctttttgctttgctatggcgcccagaacgcattgttgaaggtattggcgttgcggcgttgtacatagcagcagtgctgactttttggtccatgtttcaatatttgaatgctgcgcgccacgatttgcttgaaccttga

SEQ ID NO: 2360 - protein, 182 aa, Erwinia carotovora subsp. atroseptica SCRI1043
MQFNIPTLLTLFRVALIPFFVLAFYLPFVWAPLLCALIFVFAAVTDWFDGFLARRWKQTTRFGAFLDPVADKVMVAVALVLVAEYYHSWWITLPAATMIAREIIISALREWMAEIGKRSSVAVSWIGKVKTTAQMMALFALLWRPERIVEGIGVAALYIAAVLTFWSMFQYLNAARHDLLEP

SEQ ID NO: 2361 - DNA, 564 bp, Mannheimia succiniciproducens MBEL55E
  CDS (1)..(564): transl_table=11
ttgactatgaaattaaattttccgacatttcttacattatttagggtggcgctcatcccgttcctgattattgctttttatttgccttttggctggtctgcgtttttatctaccgcaatcttcttcgttgcttctattaccgactggtttgacggctatttggcaagaaagtggaaacaaaccaccagattcggtgcatttttggatcccgttgccgataaagtcatcgttgcgacggcgctggtattaattgtggaatattatcatgttttctggattactattccggcaatcgtcatgatttcccgtgagatcattatctccgcattgcgtgaatggatggcggaaatcggtagtcgtacgaccgttgccgtatcctggatcggtaaagtgaaaacaacagcgcaaatgtttgccttgggttgccttttatggcgttatcaatattggatggaagcattaggcattattttactttatatcgccgcaattcttacggtttggtctatgattcaatatttaaaagcggcaaaagattatttattagaagaaattaattcttaa

SEQ ID NO: 2362 - protein, 187 aa, Mannheimia succiniciproducens MBEL55E
MTMKLNFPTFLTLFRVALIPFLIIAFYLPFGWSAFLSTAIFFVASITDWFDGYLARKWKQTTRFGAFLDPVADKVIVATALVLIVEYYHVFWITIPAIVMISREIIISALREWMAEIGSRTTVAVSWIGKVKTTAQMFALGCLLWRYQYWMEALGIILLYIAAILTVWSMIQYLKAAKDYLLEEINS

SEQ ID NO: 2363 - DNA, 564 bp, Legionella pneumophila subsp. pneumophila str. Philadelphia 1
  CDS (1)..(564): transl_table=11
gtgagtacgttaaccagtttgcctaatatattaaccttaatgcggatttcgatcattccagtatttattatggtattttattttcctttcaaatgggctcatcctaccgctgcggttctttttgctattgcaagcattactgattggttagacggttatttggcgcgcaaacttgaaatgatgtctcattttggagcttttcttgatcccgtcgccgataaattattggtatcgacaagcttgttattgttagttggagcgaaagatatagattatatcactatacctgcaatcgtaatcgttggacgagaaatcgtgatttcagctttgcgcgagtggatggctgaagttggacgtcgtgctagtgttgccgttgggtatatagggaaagttaaaacttctttgcaaatgatcgctttggtattattgctggcatttaatccccttgtttcttggtgggggagcttagggtttgttcttctttatgtgtctgctattttgacgatttggtccatggtgatttatttggctattgcttggccagagttaatgaaaaaaagttaa

SEQ ID NO: 2364 - protein, 187 aa, Legionella pneumophila subsp. pneumophila str. Philadelphia 1
MSTLTSLPNILTLMRISIIPVFIMVFYFPFKWAHPTAAVLFAIASITDWLDGYLARKLEMMSHFGAFLDPVADKLLVSTSLLLLVGAKDIDYITIPAIVIVGREIVISALREWMAEVGRRASVAVGYIGKVKTSLQMIALVLLLAFNPLVSWWGSLGFVLLYVSAILTIWSMVIYLAIAWPELMKKS

SEQ ID NO: 2365 - DNA, 594 bp, Burkholderia mallei ATCC 23344
  CDS (1)..(594): transl_table=11
atgccgttcaatttcccgattttcctgacgtgggtgcgaatcgtgctgattccgctcgtcgtcggtgtgttttatctgccggacacgatgctgagcgccgaccatcgcaatctggcggcggccgtgattttcattctcgccgcgctgaccgactggttcgacggttatctcgcgcggaagtggaaccagacgtcggcgttcggcgcgtttctcgacccggtcgccgacaagctgatggtgacggccgcgctgctgatgctcgtgcagctcgcgcgcatcgacgcggcgatcgcgctcgtgatcgtcggccgcgaaatcgcgatctcggcgctgcgcgaatggatggcgcagatcggcgcatcgaagagcgtcgcggtgaattcgctgggcaagttcaagaccgcgtgccagatggtcgcgattccgatgctgctcttctacggccggctgccgttcggcggcggcgtcgcgatcgacacgcgcggatggggcgaatggctgatctatctcgcggccgtgttgaccatctggtcgatgctttactacatgaagctcgcgtggccgcagattcgcgagcgcggcggcgcggcctga

SEQ ID NO: 2366 - protein, 197 aa, Burkholderia mallei ATCC 23344
MPFNFPIFLTWVRIVLIPLVVGVFYLPDTMLSADHRNLAAAVIFILAALTDWFDGYLARKWNQTSAFGAFLDPVADKLMVTAALLMLVQLARIDAAIALVIVGREIAISALREWMAQIGASKSVAVNSLGKFKTACQMVAIPMLLFYGRLPFGGGVAIDTRGWGEWLIYLAAVLTIWSMLYYMKLAWPQIRERGGAA

SEQ ID NO: 2367 - DNA, 570 bp, Methylococcus capsulatus str. Bath
  CDS (1)..(570): transl_table=11
atgcacttcaacctgcccacttatctgacgctgctgaggatcgtcctcatcccggtcctcacggtggcgttctatctgccctggagcggcgcccacgtcgtcagcggcgtcattttcgcaatcgccgcgatcaccgactggttggatggttacctcgcgcggcgaatgggtctggccacccgcttcggagcattcctcgaccccgtggccgacaagctgatggtcgcggtcgcgctggtcctcatcgtacaggccgaaccccggccgctgatcgcactagcctccgccatcatcatcggcagggaaatcaccatcgcgtcgctgcgcgaatggatggcagaaatcgggcagcggaaacgggtcgaggtatcggccctgggcaaatggaaaaccaccttccagatgctggcgatcaccctcctgctgctcggtctggacataccgcacggcggggtcaagacgacgggcgaattgttgctagtggtttccgcgaccctcacgctgtggtcaatgatcgtgtacctccaggccgccatgcccgtgttcaaggcaggtgccgaggccgaatga

SEQ ID NO: 2368 - protein, 189 aa, Methylococcus capsulatus str. Bath
MHFNLPTYLTLLRIVLIPVLTVAFYLPWSGAHVVSGVIFAIAAITDWLDGYLARRMGLATRFGAFLDPVADKLMVAVALVLIVQAEPRPLIALASAIIIGREITIASLREWMAEIGQRKRVEVSALGKWKTTFQMLAITLLLLGLDIPHGGVKTTGELLLVVSATLTLWSMIVYLQAAMPVFKAGAEAE

SEQ ID NO: 2369 - DNA, 594 bp, Azoarcus sp. EbN1
  CDS (1)..(594): transl_table=11
atgttattcaacgttccaaattcgctgacctgggcgcgcattgcgctgatcccgctgttcgtcggcgtgttttatcttcccgacagctggctcgacgccgaagagaaaaatttcgccgcaacgatcattttcatcatcgcagccgccaccgactggttcgacggttatcttgcccgcgcactcaaccagacttcggctttcggcgcgtttctcgacccggtcgcggacaagctgatggttgcagcagcgctgatcctgctcgtgcagctcgcgcgcgtcgattccatcatcgctgtcgtcatcatcggccgggagatcacgatttcggcactccgcgaatggatggcgcgggtcggccagtcggccggtgttgcggtcgcttttgtcgggaagttgaaaaccgcggcgcagatgacggccattcccctgctgctctataatgccccgctactgtcgctggacctgcgcgtgatcggcaacgtcctgatttacatcgccgcagccctgacgttgtggtcgatgggctattaccttcaccgggcgatgccacagcttgcccgctacgaccgggatattcgaaacaaaagcggttga

SEQ ID NO: 2370 - protein, 197 aa, Azoarcus sp. EbN1
MLFNVPNSLTWARIALIPLFVGVFYLPDSWLDAEEKNFAATIIFIIAAATDWFDGYLARALNQTSAFGAFLDPVADKLMVAAALILLVQLARVDSIIAVVIIGREITISALREWMARVGQSAGVAVAFVGKLKTAAQMTAIPLLLYNAPLLSLDLRVIGNVLIYIAAALTLWSMGYYLHRAMPQLARYDRDIRNKSG

SEQ ID NO: 2371 - DNA, 564 bp, Neisseria gonorrhoeae FA 1090
  CDS (1)..(564): transl_table=11
atgccttggaacatccccatcttcctcacatggttgagggtcttgctcattcccgtactgattgtccttttctacctgccgttctcatggttttcagaagaagcagtcaatgttgccgccgccgtcatttttgccgttgccgccttgaccgactggtttgacggatttttggcaaggttgtggaaacagacttccgatttcggcgcattcctcgaccccgtcgccgacaagctgatggttgccgtatcgctgctgctgctggtcaaactcgaccggacctatgttttgttcgcgatgattatcatcggcagggaaattaccatttccgcattgcgcgaatggatggcgcaaatgggaaaaaggagcagcgttgccgtcgccaccgtcggcaagttcaaaaccgccgcgcaaatgctggcgattttctttttgctgctgaattttcccgatttttacggatttaatcttgttgttatcggcaacatattgatgtttatcgcatctttgctgacagtctggtcgatgctgtattatctgaaaatggcgtggaaagaaattgcctga

SEQ ID NO: 2372 - protein, 187 aa, Neisseria gonorrhoeae FA 1090
MPWNIPIFLTWLRVLLIPVLIVLFYLPFSWFSEEAVNVAAAVIFAVAALTDWFDGFLARLWKQTSDFGAFLDPVADKLMVAVSLLLLVKLDRTYVLFAMIIIGREITISALREWMAQMGKRSSVAVATVGKFKTAAQMLAIFFLLLNFPDFYGFNLVVIGNILMFIASLLTVWSMLYYLKMAWKEIA

SEQ ID NO: 2373 - DNA, 561 bp, Pseudomonas syringae pv. syringae B728a
  CDS (1)..(561): transl_table=11
atgaatatccctaatctgatcaccgtactacgcgttttactgattccgatcttcattttgttgttctacatgccttatcactggagctacatggcggccagtgcagtctttgcgttcgctgcggcgaccgactggctcgacgggtatctggcccgccgtcttgaacaaagcacgccctttggcgcctttctcgatccggtagccgacaagctgatggtggccgtggcattggtgctgctggttcaggcgcatgccaatctatggctgacgctgcccgcagcggtgatcatcggccgtgaaatcgtaatctctgcactccgcgaatggatggcggaaatcggcgcgcgtgcgcaggttgccgtttccaacatgggtaaatggaagacggcggcgcagatgctcgcgctggtcattctgctcggcaacccgccggccatcaccctgtgggtgattctcggctatgcgctgctgctcattgctgcggggctgaccctgtggtccatggtgcaatacctgagagccgcgtggccgcacctcaggaccacttcagaaaaaaaataa

SEQ ID NO: 2374 - protein, 186 aa, Pseudomonas syringae pv. syringae B728a
MNIPNLITVLRVLLIPIFILLFYMPYHWSYMAASAVFAFAAATDWLDGYLARRLEQSTPFGAFLDPVADKLMVAVALVLLVQAHANLWLTLPAAVIIGREIVISALREWMAEIGARAQVAVSNMGKWKTAAQMLALVILLGNPPAITLWVILGYALLLIAAGLTLWSMVQYLRAAWPHLRTTSEKK

SEQ ID NO: 2375 - DNA, 558 bp, Haemophilus influenzae 86-028NP
  CDS (1)..(558): transl_table=11
atgaaattcaatatcccaattttcctaacgatctttcgagtcattttgattccttttttcgtgattgcattttatttacccattgaatcatctcctttcatcacaacactgattttttttattgcaggtgtcactgactggctagatggctatctagctcgtaaatggaaacagaccacgcgctttggtgcatttcttgatcctgttgctgataaagtaatggtagtggctgcactagttttaattgtcgaacatcaacatacattttggataaccattcctgccattattatgatttctcgtgaaattatcatctccgcattacgtgaatggatggcagagcttggggaacgtagcaaagtcgcagtctcttggtggggaaaatggaaaaccacagcgcaaatgttagcactaggcggattattatggcgttataacaactatatggaaatagcagcaattatcttactttatatcgccgctattttaactatatggtcaatgatccaatatttacaagtagcaaaaggaagcttgctagataatattcaattataa

SEQ ID NO: 2376 - protein, 185 aa, Haemophilus influenzae 86-028NP
MKFNIPIFLTIFRVILIPFFVIAFYLPIESSPFITTLIFFIAGVTDWLDGYLARKWKQTTRFGAFLDPVADKVMVVAALVLIVEHQHTFWITIPAIIMISREIIISALREWMAELGERSKVAVSWWGKWKTTAQMLALGGLLWRYNNYMEIAAIILLYIAAILTIWSMIQYLQVAKGSLLDNIQL

SEQ ID NO: 2377 - DNA, 567 bp, Pseudomonas fluorescens Pf-5
  CDS (1)..(567): transl_table=11
gtgccgatgaatatccctaatctgatcaccgttctacgcgtcctgctcatcccgattttcattttgctgttctatttgccctatagctggagctacatggccgccagttcagtgtttgccttcgcggccgccaccgactggctggacggctacctggcgcggcgcctgcagcagagcacgccgttcggtgcgttcctcgacccggtggccgacaagctgatggtggcggtggccctggtgctgctggtgcaggagcatcacaacctgtggctgaccttgcccgccgcggtgatcatcggtcgtgaaatcgtcatctcggcgctgcgcgagtggatggccgagctcggcgcgcgcgcgcaggtggcggtgtcgaacatgggcaagtggaaaacggcggcgcaaatgctggcgctggtgattttgctggccaatccctcggacttcagtttctgggtgctggtaggttacgccttgctgttggcggcagcgggcctgaccctgtggtccatgctgcagtatctgcgagccgcctggccgcacctgaaaactgataacgagaaaaaataa

SEQ ID NO: 2378 - protein, 188 aa, Pseudomonas fluorescens Pf-5
MPMNIPNLITVLRVLLIPIFILLFYLPYSWSYMAASSVFAFAAATDWLDGYLARRLQQSTPFGAFLDPVADKLMVAVALVLLVQEHHNLWLTLPAAVIIGREIVISALREWMAELGARAQVAVSNMGKWKTAAQMLALVILLANPSDFSFWVLVGYALLLAAAGLTLWSMLQYLRAAWPHLKTDNEKK

SEQ ID NO: 2379 - DNA, 681 bp, Psychrobacter arcticus 273-4
  CDS (1)..(681): transl_table=11
atgactgagagcacgcatttgcctccgcaggagacgtcaagtacgcagagtaacaagagtatttttaatttgcccaacaacctgacgattgcgcgtattttgatgattccgctattcgtggcaattgcctattggccgcctgccatggggattggcatgcccgcaatctcagataacgtgattgctaaggttggtatgagtgagtttagcgatagcttattacgtcacttattattaacgggtgtttttatcctagcggcgattaccgattggcttgatggctattttgcgcgtaagctcaatgtggtatctgcgtttggacgctttttggaccctgttgctgataagctcatggtcgcagccgcgctgattatcttagtacaatggcatcccaatattatcatggcgatagccgcaattgtgattatctcgcgtgaaatcgccgtatcggcattgcgtgaatggatggcagagctgggtaaaagcaccagtgtggcggtgtcttatgtaggtaaactgaaaactacttttcagatgatagcgattacggtgcttttgttaaattgggaatcgcttgaaaccatcggctatgttttgatggtagcagcagtgattttaacattatggtcgatgatgatttatctcaaagcagcttggccatatcttaagcaaagcggttaa

SEQ ID NO: 2380 - protein, 226 aa, Psychrobacter arcticus 273-4
MTESTHLPPQETSSTQSNKSIFNLPNNLTIARILMIPLFVAIAYWPPAMGIGMPAISDNVIAKVGMSEFSDSLLRHLLLTGVFILAAITDWLDGYFARKLNVVSAFGRFLDPVADKLMVAAALIILVQWHPNIIMAIAAIVIISREIAVSALREWMAELGKSTSVAVSYVGKLKTTFQMIAITVLLLNWESLETIGYVLMVAAVILTLWSMMIYLKAAWPYLKQSG

SEQ ID NO: 2381 - DNA, 582 bp, Colwellia psychrerythraea 34H
  CDS (1)..(582): transl_table=11
atgtggacaatacctaatcaaataaccttatttcggatcgtcttgatccctattttcttgataattttctatttacccctttcgtggagtaattttggtgcatttgcagttttctggttagcggctgttagtgacatcttagatggttaccttgctagaaaactcaatcagtcatcagcttttggcgcgtttatagacccagtagccgataaactcatggttgttgttgcgctggtaatgattgcacaagactatagttcttggttggtctccattgccgctatcatcatgatagcgcgagaagtgtttatcagtgctttacgtgaatttatgtcttctataggaaagcgtgacattattgcggtttctaatatggggaaatataaaaccgctgcacaaatgctcggtattatgggactgatttggcagcctagttatgatattccattaattctgttttacttgccacatgaagtgattaattatctttcttatgccttttattctattgcgacggtcttaaccgtgactacttgggttagttatttcaaagcggcatggccagagctgaaagggcagtaa

SEQ ID NO: 2382 - protein, 193 aa, Colwellia psychrerythraea 34H
MWTIPNQITLFRIVLIPIFLIIFYLPLSWSNFGAFAVFWLAAVSDILDGYLARKLNQSSAFGAFIDPVADKLMVVVALVMIAQDYSSWLVSIAAIIMIAREVFISALREFMSSIGKRDIIAVSNMGKYKTAAQMLGIMGLIWQPSYDIPLILFYLPHEVINYLSYAFYSIATVLTVTTWVSYFKAAWPELKGQ

SEQ ID NO: 2383 - DNA, 561 bp, Pseudomonas syringae pv. phaseolicola 1448A
  CDS (1)..(561): transl_table=11
atgaatatccctaatctgatcaccgtactacgcgttttattgattccgatcttcattttgctgttctacatgccttatcactggagctacatggccgccagtgcagtctttgcgttcgctgcggcgaccgactggctcgacgggtatctggcccgccgtcttgaacaaagtacgccttttggcgcctttctcgacccggtagcagacaaactgatggtggccgtggcattggtgctgctggttcaggcgcatgccaatctgtggctgacgctgcccgcagcggtgatcatcggtcgcgaaatcgtgatttctgcactccgcgagtggatggcggaaatcggcgcgcgtgcgcaggttgccgtttccaatatgggcaaatggaaaacggcggcgcaaatgctcgcgctggttattctgctgggcaacccgcctgcgatcacgatctgggtgattctcggctacgcattgctgctcgttgcagcggggttgaccctgtggtcgatggtgcaatacctcagagccgcgtggccgcacctcaagactacggcagaaaaaaaataa

SEQ ID NO: 2384 - protein, 186 aa, Pseudomonas syringae pv. phaseolicola 1448A
MNIPNLITVLRVLLIPIFILLFYMPYHWSYMAASAVFAFAAATDWLDGYLARRLEQSTPFGAFLDPVADKLMVAVALVLLVQAHANLWLTLPAAVIIGREIVISALREWMAEIGARAQVAVSNMGKWKTAAQMLALVILLGNPPAITIWVILGYALLLVAAGLTLWSMVQYLRAAWPHLKTTAEKK

SEQ ID NO: 2385 - DNA, 579 bp, Dechloromonas aromatica RCB
  CDS (1)..(579): transl_table=11
atgcctttcaaccttcccatcctcctgacgtggctccgcatcgtagcgattccgctgctgatcgccatttattacctgccaacaggctgggcgactctgcatgaacgtgatgtcgccgcgacactgatcttcatggctgccgcactgactgactgggccgacggctatttggcgcgcaagctgaaccagacttcggcctttggcgcttttctcgaccccgtcgccgacaaactgatggttgccgcagccttgatcgttcttgtccagctgggaagaaccgacgcgatcattgccaccatcatcattggtcgggaaatcaccatttcagcgctgcgcgaatggatggcaaagattggcgccgcaaaaagcgtcgctgtgtcgatgctgggcaaagtcaagacagccgcccagatgctcgccctgcccatgcttctctactatgccccattgtcaggtatcgacatgaaatcgctgggcaactggcttatctggatcgcagccttgttgaccttgtggtcaatgggctactacctgcgtatggcatggccggaaatcctcaaacggagtgcagaaaagtag

SEQ ID NO: 2386 - protein, 192 aa, Dechloromonas aromatica RCB
MPFNLPILLTWLRIVAIPLLIAIYYLPTGWATLHERDVAATLIFMAAALTDWADGYLARKLNQTSAFGAFLDPVADKLMVAAALIVLVQLGRTDAIIATIIIGREITISALREWMAKIGAAKSVAVSMLGKVKTAAQMLALPMLLYYAPLSGIDMKSLGNWLIWIAALLTLWSMGYYLRMAWPEILKRSAEK

SEQ ID NO: 2387 - DNA, 600 bp, Ralstonia eutropha JMP134
  CDS (1)..(600): transl_table=11
atgcccttcaatatcccgatcctgctgacctggttgcgcgttgccatgattcccctcgtggtgggcgtgtactacctgccggaagcatggctgccgatgcacacgaagaacatcactgcggcgtcgtttttcatcatcgcagcggtcaccgactggctggacggattcctcgcgcggcgctggaaccagacctcggcgttcggtgcgttcctggatccggttgcggacaagctgatggtcacggctgcgctgctatcgctgctggccctgggccgcgtggcggatctggtggcgctggtcatcattggccgcgagatcacgatctcggcgttgcgcgagtggatggcgcagatcggcgcttccaagagcgtcgcggtcaacttcctcggcaagctgaagacgacggtgcagatgatcgcgatccccttgttgctctacacggaccgcctgttcggcgtcgacgcgcaggtgctgggtacgtggatgatctacctggcggcagtgctgacgctgtggtcgatgttctattacatgaagctggcgtggccgcagatccgcgagcgcagcggcgtgctcaacgaagcgcgcgcgccaaaatga

SEQ ID NO: 2388 - protein, 199 aa, Ralstonia eutropha JMP134
MPFNIPILLTWLRVAMIPLVVGVYYLPEAWLPMHTKNITAASFFIIAAVTDWLDGFLARRWNQTSAFGAFLDPVADKLMVTAALLSLLALGRVADLVALVIIGREITISALREWMAQIGASKSVAVNFLGKLKTTVQMIAIPLLLYTDRLFGVDAQVLGTWMIYLAAVLTLWSMFYYMKLAWPQIRERSGVLNEARAPK

SEQ ID NO: 2389 - DNA, 567 bp, Thiobacillus denitrificans ATCC 25259
  CDS (1)..(567): transl_table=11
atgccgctcaatctcccgaacctgctgacctggctgcgcatcctgttcattccgctcatggcgggggtgttctatcttcccgacggctgggtcacgccgccccaggcgaacctgctcgccgcgctctttttcggcgtcgccgcgctgaccgactggctcgacgggtaccttgcgcgcgcgctcggccagacctccgcgttcggcgcgtttctcgatccggtcgccgacaagctcatggtcgccgcggcgctgatcgtgctgatcgatctcgaccgcgtcgcgccgctgatcggcctcatcatcatcggccgtgagatcacgatctcggcgttgcgcgaatggatggccaaggcgggcaagtcggcgagcgtcgcggtctccttcgtcggcaagctgaagaccgcagggcagatggtcgccatcgtcctgctgctctacttcgcgccgctggccggcctgcccacggcccggatcgggaccctgctgatctggctggccgccgtcctcacgttgatttcgatggcctactacctaatgatggcggcgcgggcgctgcaaaaaacttga

SEQ ID NO: 2390 - protein, 188 aa, Thiobacillus denitrificans ATCC 25259
MPLNLPNLLTWLRILFIPLMAGVFYLPDGWVTPPQANLLAALFFGVAALTDWLDGYLARALGQTSAFGAFLDPVADKLMVAAALIVLIDLDRVAPLIGLIIIGREITISALREWMAKAGKSASVAVSFVGKLKTAGQMVAIVLLLYFAPLAGLPTARIGTLLIWLAAVLTLISMAYYLMMAARALQKT

SEQ ID NO: 2391 - DNA, 561 bp, Pseudomonas fluorescens PfO-1
  CDS (1)..(561): transl_table=11
atgaatatccctaatctgattaccgttctccgcgtcctgctcatcccgatcttcattctgttgttctatctgccttaccaatggagctatctggcctcaagttcggtattcgcctttgcggcggcaacggactggcttgacggctatcttgcgcgacgtctggagcaaagcacgccgtttggtgcgtttctggatcccgtcgctgacaaactgatggtggctgttgccctggtgttgctggtgcaagaacatggcaacctttggctcacactgccggccgctgtcatcatcggtcgcgagattgttgtctcggcgctgcgtgagtggatggccgaactcggtgcacgggcccatgtggccgtgtcgaatctgggcaagtggaaaactgctgcgcaaatgcttgcactggtgatcctcctggccaatcccaaggttttcagtttctgggttgtcatcggttacgcgttactgatggtgtctgcaggcctgaccttgtggtcgatggttcaataccttcgggctgcctggccacatctgaagactgatgttgaaaagaaataa

SEQ ID NO: 2392 - protein, 186 aa, Pseudomonas fluorescens PfO-1
MNIPNLITVLRVLLIPIFILLFYLPYQWSYLASSSVFAFAAATDWLDGYLARRLEQSTPFGAFLDPVADKLMVAVALVLLVQEHGNLWLTLPAAVIIGREIVVSALREWMAELGARAHVAVSNLGKWKTAAQMLALVILLANPKVFSFWVVIGYALLMVSAGLTLWSMVQYLRAAWPHLKTDVEKK

SEQ ID NO: 2393 - DNA, 588 bp, Burkholderia sp. 383
  CDS (1)..(588): transl_table=11
atgccgttcaatttcccgattttcctgacgtgggtacggatcgtgctgattccgctcgtcgtcggcgtgttctatctgccggacacggtgatgggcggcgcgcaccgcaatctcgcggcggcggcgatcttcatactcgcggcgctgaccgactggttcgacggctatctggcacgcaagtggaaccagacgtcgtcattcggcgcatttctcgacccggtggcggacaagctgatggtgacggccgcgctgctgatcctcgtgcagatttcgcgggtcgatgcggcgatcgcgctcgtgatcgtcggccgcgagatcgcgatttcggcgctgcgtgagtggatggcgcagatcggcgcgtcgaagagcgtcgcggtgaaccagctcggcaagttcaagaccgcatgccagatggttgcgattccgatgctgctgttctacgggccgctgccgctcggtgtcgcgacgatcgacacgcgcgtgtggggcgaatggctgatgtatctcgcggcggtgctgacgatctggtcgatgctgtactacatgaagctcgcatggccgcagattcgcgagcgcggcggcgcgtga

SEQ ID NO: 2394 - protein, 195 aa, Burkholderia sp. 383
MPFNFPIFLTWVRIVLIPLVVGVFYLPDTVMGGAHRNLAAAAIFILAALTDWFDGYLARKWNQTSSFGAFLDPVADKLMVTAALLILVQISRVDAAIALVIVGREIAISALREWMAQIGASKSVAVNQLGKFKTACQMVAIPMLLFYGPLPLGVATIDTRVWGEWLMYLAAVLTIWSMLYYMKLAWPQIRERGGA

SEQ ID NO: 2395 - DNA, 594 bp, Geobacter metallireducens GS-15
  CDS (1)..(594): transl_table=11
atgcctgacactaacgccaagaccatctggaatatcccgaacattctcactctcctgcgaatcgctctgatacccgttttggcggtgcttcttctgtcaccgtcccgggaagcgggattctgggccgctgccgtgttcgccgtcgcctcaaccaccgactggcttgacggctatctagcccgcaggatgggtatcgttactgtcttcggcaagttccttgaccccattgcagacaagctcatggtgatggcggcactcatcatgatcctcccctacaatcgggttcctgcctggatggttcttgtaatcctcggccgcgagatcatcattacggggctgcgggggatcgcctccagcgaggggattgtcatatccgccagcgatctgggaaagttcaagaccatcttccagatggtggctatcatcgggctgcttctccactatgactaccactggtttttcggggtcgacaacccctatctcatcgtcaacatgcacaatgcagggatgttctatctctggatcgccacaattatgactgtctggtccggagccgactaccttgccaagttcatgagggtaatagcccgctga

SEQ ID NO: 2396 - protein, 197 aa, Geobacter metallireducens GS-15
MPDTNAKTIWNIPNILTLLRIALIPVLAVLLLSPSREAGFWAAAVFAVASTTDWLDGYLARRMGIVTVFGKFLDPIADKLMVMAALIMILPYNRVPAWMVLVILGREIIITGLRGIASSEGIVISASDLGKFKTIFQMVAIIGLLLHYDYHWFFGVDNPYLIVNMHNAGMFYLWIATIMTVWSGADYLAKFMRVIAR

SEQ ID NO: 2397 - DNA, 624 bp, Burkholderia thailandensis E264
  CDS (1)..(624): transl_table=11
atggcaaatccttcaaccgtgtcgcgtgccatgccgttcaatttcccgattttcctgacgtgggtgcgaatcgtgctgattccgctcgtcgtcggcgtgttttacctgccggacacgatgctgagcgccgaccatcgcaatttggcggcggccgtgatcttcattcttgccgcgctgaccgattggttcgacggctatctcgcgcggaaatggaaccagacgtcggcgttcggcgcgtttctcgatccggtcgccgacaagctgatggtgacggcggcgctgctgatgctcgtgcagctcgcgcgtatcgacgcggcgatcgcgctcgtgatcgtcggccgcgaaatcgcgatctcggcgctgcgcgaatggatggcgcagatcggcgcgtcgaagagcgtcgcggtgaattcgctgggcaagttcaagaccgcgtgccagatggtcgcgattccgatgctgctcttctatggtcgtctgccgttcggcggcggcgtcgcgatcgacacgcgcgtgtggggcgagtggctgatctatctcgcggccgtgctgacgatctggtcgatgctttactacatgaagctcgcgtggccgcagattcgcgagcgtggcggcgcggcgtga

SEQ ID NO: 2398 - protein, 207 aa, Burkholderia thailandensis E264
MANPSTVSRAMPFNFPIFLTWVRIVLIPLVVGVFYLPDTMLSADHRNLAAAVIFILAALTDWFDGYLARKWNQTSAFGAFLDPVADKLMVTAALLMLVQLARIDAAIALVIVGREIAISALREWMAQIGASKSVAVNSLGKFKTACQMVAIPMLLFYGRLPFGGGVAIDTRVWGEWLIYLAAVLTIWSMLYYMKLAWPQIRERGGAA

SEQ ID NO: 2399 - DNA, 549 bp, Neorickettsia sennetsu str. Miyayama
  CDS (1)..(549): transl_table=11
atgaaggaccttcctaacttacttaccgctttaaggatagccattatcccagtattctgcttaagtttttatattcaatccagattttcttgggtgataaccgtaggaattttctcaatcgcaagtctgacagacttttttgacgggtacctcgctaggacgctaaaggctcaatcaaagcttggaaaacttcttgacccgatagccgataaaatgattgtctctacagctattgttatgttggtacatatgcagtacataacgggagtccaactgattcccgcaatcatgatcatttgtagagagctgtttattgctggactaagggaatatcttgctcgtgacagtgtggcatttcctgtaaatagatttggtaaactaaagacaatatcccagatggttgctatacttctttatctcctaaacaaggaatggatcccagatattcttccgacatttttcatctggatagctggtctaacgagcatggcatcggcatatttatatcttcatgaaaacaaggaagaactactaaaatcccttagctaa

SEQ ID NO: 2400 - protein, 182 aa, Neorickettsia sennetsu str. Miyayama
MKDLPNLLTALRIAIIPVFCLSFYIQSRFSWVITVGIFSIASLTDFFDGYLARTLKAQSKLGKLLDPIADKMIVSTAIVMLVHMQYITGVQLIPAIMIICRELFIAGLREYLARDSVAFPVNRFGKLKTISQMVAILLYLLNKEWIPDILPTFFIWIAGLTSMASAYLYLHENKEELLKSLS

SEQ ID NO: 2401 - DNA, 558 bp, Saccharophagus degradans 2-40
  CDS (1)..(558): transl_table=11
atgttcaacatagctaaccaacttaccctaggccgaatactgtttatccctctcttagtggttgtgtattactcaccgctagaatggaaatactggtatagcgcagccttatttgggcttgccggcataacagactggctagatggctacatagcacgtaaatacggtatggataccccctttggcgccttcttagacccagtagccgacaagctaatggttgccgttgcgctggccgtgctaatagaggcgcacgccgatgtttggtttacattgcctgccacagttattattggtcgtgagatagttatatctgcactaagagagtggatggccgaattgggcgctagagctaaagttggtgtgtctatgataggaaaggtaaaaacaacgctacaaattattgctattgtgctgcttttagcgtttaatcccgcctcctatccgttgttcaataaagttggttatataacgctctatgtggcggcaatacttactctttggtcaatgatagtgtacctgcgggcggcatggccgagcctaaagggtgcaaaataa

SEQ ID NO: 2402 - protein, 185 aa, Saccharophagus degradans 2-40
MFNIANQLTLGRILFIPLLVVVYYSPLEWKYWYSAALFGLAGITDWLDGYIARKYGMDTPFGAFLDPVADKLMVAVALAVLIEAHADVWFTLPATVIIGREIVISALREWMAELGARAKVGVSMIGKVKTTLQIIAIVLLLAFNPASYPLFNKVGYITLYVAAILTLWSMIVYLRAAWPSLKGAK

SEQ ID NO: 2403 - DNA, 567 bp, Methylobacillus flagellatus KT
  CDS (1)..(567): transl_table=11
atggtctggaatgtccccaatagcctgacggtgatgcgtatcctgagcatcccggttttcatcgggatattctatctcccggaaacgaccttgcccatgcatgataaaaacgtgctggcgacgtttatttttgcctttgccgccattaccgactggttcgatggctaccttgcacgcgcactcaaccagacttccgcgttcggcgcctttcttgatccggtcgcggacaagctgatggtcgcggcagctttgatactgctgatagagctcgatcgcgtgggggcggtggtggcattgatcatcattgggcgtgaaatcgcgatcagcgccctgcgggaatggatggccggcctgggcgagcgcggcagtgttgctgtggcgttcatcggcaaggtcaagaccgcggtgcagatggccgccatcctgttgctgctgtattacgatcccctgggaccattgcatgtcagtttttatggtgaggtactgatttacattgctgcatttttgacattggtgtcaatggcttattatctgaaggccgcgtggccgcgcatgaaggccggctga

SEQ ID NO: 2404 - protein, 188 aa, Methylobacillus flagellatus KT
MVWNVPNSLTVMRILSIPVFIGIFYLPETTLPMHDKNVLATFIFAFAAITDWFDGYLARALNQTSAFGAFLDPVADKLMVAAALILLIELDRVGAVVALIIIGREIAISALREWMAGLGERGSVAVAFIGKVKTAVQMAAILLLLYYDPLGPLHVSFYGEVLIYIAAFLTLVSMAYYLKAAWPRMKAG

SEQ ID NO: 2405 - DNA, 627 bp, Burkholderia xenovorans LB400
  CDS (1)..(627): transl_table=11
ttgcatctcactcgtcagacgctgcgcctgcccatgccgtttaatttcccgattttcctgacctggctgcggatcgtcctgattccgctcgtcgtcggcgtgttctatctgcccgacatgatgatgagccccgcgcaccgcaatctggcggccgcgacgatcttcattctcgcggcgttgaccgactggttcgacggttttctggcgcgcaagtggaatcagacctcggcgttcggcgcgttcctcgatccggtcgccgacaaactgatggtgaccgccgcattgctggtgctcgtgcagctcgcgcgaatcgattcggcgattgcgctcgtgatcgtcgggcgcgaaatcgcgatttcagcgctgcgcgagtggatggcgcagatcggcgcgtcgaagagcgtcgcggtcaattctctcggcaagttcaagaccgtttgtcagatggtcgcgattcccatgctgctgttttatggtccgctgcggtttggcggcggcgtggtggtcgatacgcgcgtgtggggcttgtggctcatctatctggccgcgttcctgacgatctggtcgatgctctactacatgaagctcgcatggccgcagattcgcgaacgcagcggtgtggcctga

SEQ ID NO: 2406 - protein, 208 aa, Burkholderia xenovorans LB400
MHLTRQTLRLPMPFNFPIFLTWLRIVLIPLVVGVFYLPDMMMSPAHRNLAAATIFILAALTDWFDGFLARKWNQTSAFGAFLDPVADKLMVTAALLVLVQLARIDSAIALVIVGREIAISALREWMAQIGASKSVAVNSLGKFKTVCQMVAIPMLLFYGPLRFGGGVVVDTRVWGLWLIYLAAFLTIWSMLYYMKLAWPQIRERSGVA

SEQ ID NO: 2407 - DNA, 600 bp, Ralstonia metallidurans CH34
  CDS (1)..(600): transl_table=11
atgccacttaacattcccattctgctgacctggcttcgcgtggccatgatcccgctggtcgtcggggtttattacctgcccgaggcctggctgccgatgcacaccaagaacgtcaccgcggcatcgttcttcgtcatcgcggcagtgacggattggctcgatggctttctggcgcggcgctggaatcagacctcggccttcggtgccttcctcgatccggtggccgacaagcttatggtgacagccgcattgctgtcgttgctggcgctggggcgggtggccgacctgatcgcgctgatcatcatcgggcgtgagatcacgatttcggcactgcgcgaatggatggcccagatcggcgcttcgaagagcgtagcggtaaatttccttggtaagctgaagaccaccgtgcagatgatcgcgatcccgttgctgctgttcaacgacgcgctgttcggtgtggacgcatcgctgcttggtggctggatgatctacctggcggccgtgctcacgttgtggtcgatgttctattacatgaagctcgcctggccgcagattcgcgagcgcagcgaggtcatcagcggggctcggacacaaaagtga

SEQ ID NO: 2408 - protein, 199 aa, Ralstonia metallidurans CH34
MPLNIPILLTWLRVAMIPLVVGVYYLPEAWLPMHTKNVTAASFFVIAAVTDWLDGFLARRWNQTSAFGAFLDPVADKLMVTAALLSLLALGRVADLIALIIIGREITISALREWMAQIGASKSVAVNFLGKLKTTVQMIAIPLLLFNDALFGVDASLLGGWMIYLAAVLTLWSMFYYMKLAWPQIRERSEVISGARTQK

SEQ ID NO: 2409 - DNA, 567 bp, Haemophilus somnus 129PT
  CDS (1)..(567)
atgaaattcaatattcctacaatcttaactttatttcgagtcggattaatcccgttctttatcgtaacattttatttgccttttcattgggcaccttttctcacaactattatttttttcattgcttcaataacagactggctggacggttaccttgctcgcagatggaatcaaagtacgccttttggtgcgtttttagatcctgtcgccgataaagtcatggtcattgcggcacttacgctcgttgttgaatatcaacatgttttttgggtaacgatacctgcaattattatgatctttcgtgaaattgtgatttcagcattacgagaatggatggcagaaatcggtagccgtggcatcgttgcggtttcttggctggggaaaattaaaacagcctcacaaatgcttgcacttggcggtcttttatggcactacaatacattaatggaaattacagcgattgtctttttgtatatcgccgccatattaacagtctggtcaatgtttcaatatttagccgccgcaaaaaaatatcttttagctgatgacaaacaaaaaagtgaataa

SEQ ID NO: 2410 - protein, 188 aa, Haemophilus somnus 129PT
MKFNIPTILTLFRVGLIPFFIVTFYLPFHWAPFLTTIIFFIASITDWLDGYLARRWNQSTPFGAFLDPVADKVMVIAALTLVVEYQHVFWVTIPAIIMIFREIVISALREWMAEIGSRGIVAVSWLGKIKTASQMLALGGLLWHYNTLMEITAIVFLYIAAILTVWSMFQYLAAAKKYLLADDKQKSE

SEQ ID NO: 2411 - DNA, 567 bp, Haemophilus somnus 2336
  CDS (1)..(567)
atgaaattcaatattcctacaatcttaactttatttcgagtcggattaatcccgttctttatcgtaacattttatttgccttttcattgggcaccttttctcacaactattatttttttcattgcctcaataacagactggctggacggttaccttgctcgccgatggaatcaaagtacgccttttggtgcgtttttagatcctgtcgccgataaagtcatggtcattgcggcacttacgctcgttgttgaatatcaacatgttttttgggtaacgatacctgcaattattatgatctttcgtgaaattgtgatttcagcattacgagaatggatggcagaaatcggtagccgtggcatcgttgcggtttcttggctggggaaaattaaaacagcctcacaaatgcttgcacttggcggtcttttatggcactacaatacattaatggaaattacagcaattgtctttttgtatatcgccgccatgttgacagtttggtcaatgtttcaatatttagccgccgccaaaaaatatcttttagctgataacaaacaaaaaagtgaataa

SEQ ID NO: 2412 - protein, 188 aa, Haemophilus somnus 2336
MKFNIPTILTLFRVGLIPFFIVTFYLPFHWAPFLTTIIFFIASITDWLDGYLARRWNQSTPFGAFLDPVADKVMVIAALTLVVEYQHVFWVTIPAIIMIFREIVISALREWMAEIGSRGIVAVSWLGKIKTASQMLALGGLLWHYNTLMEITAIVFLYIAAMLTVWSMFQYLAAAKKYLLADNKQKSE

SEQ ID NO: 2413 - DNA, 522 bp, Actinobacillus pleuropneumoniae serovar 1 str. 4074
  CDS (1)..(522)
atgtttcggttcgtgttaattcctctgttcgtcattgctttttatttgcctgccggttggtatgccgctgaaatttcaacgctgattttttttattgcgtccattaccgatgcttttgacggttatttggcaagaaagtggaatcaaactactcaattaggtgcgtttttagatccggttgcagataaagtattggttgcggtggcattagtatgtgtagtggaatattaccatacgtggtggatttctattccggcggcaattatgattgcgagagaaattattatttcggcattgagagaatggatggcggaattaggcgaacgcgccagtgtagcagtttctatgtggggaaaatttaaaaccaccgcacaaatgttggcgcttggcggaatgttgtggcggtttaattttgcgatggaagtgcttgcttggattttactgtatattgccgccggtttaacgctctggtcaatgatgcaatatttaaatgcggcaaaaggcagtttattaaaatcgtaa

SEQ ID NO: 2414 - protein, 173 aa, Actinobacillus pleuropneumoniae serovar 1 str. 4074
MFRFVLIPLFVIAFYLPAGWYAAEISTLIFFIASITDAFDGYLARKWNQTTQLGAFLDPVADKVLVAVALVCVVEYYHTWWISIPAAIMIAREIIISALREWMAELGERASVAVSMWGKFKTTAQMLALGGMLWRFNFAMEVLAWILLYIAAGLTLWSMMQYLNAAKGSLLKS

SEQ ID NO: 2415 - DNA, 558 bp, Haemophilus influenzae R2846
  CDS (1)..(558)
atgaaattcaatatcccaattttcctaacgatctttcgagtcattttgattccttttttcgtgattgcattttatttacccattgaatcatctcctttcatcacaacgctcattttttttattgcaggtgtcactgactggctagatggctatctagctcgtaaatggaaacagaccacgcgctttggtgcatttcttgatcctgttgctgataaagtaatggtagtggttgcactagttttaattgtcgaacatcaacatacattttggataaccattcctgccattattatgatttctcgtgaaattatcatctccgcattacgtgaatggatggcagagcttggggaacgtagcaaagtcgcagtctcttggtggggaaaatggaaaaccacagcgcaaatgttagcactaggcggattattatggcgttataacaactatatggaaatagcagcaattatcttactttatatcgccgctattttaactatatggtcaatgatccaatatttacaagtagcaaaaggaagcttgctagataatattcaattataa

SEQ ID NO: 2416 - protein, 185 aa, Haemophilus influenzae R2846
MKFNIPIFLTIFRVILIPFFVIAFYLPIESSPFITTLIFFIAGVTDWLDGYLARKWKQTTRFGAFLDPVADKVMVVVALVLIVEHQHTFWITIPAIIMISREIIISALREWMAELGERSKVAVSWWGKWKTTAQMLALGGLLWRYNNYMEIAAIILLYIAAILTIWSMIQYLQVAKGSLLDNIQL

SEQ ID NO: 2417 - DNA, 567 bp, Rubrivivax gelatinosus PM1
  CDS (1)..(567)
atgttcttcacgctgccgactctcctgacctgggcgcgcatcgtcgcgattccgctgatcgtcggcgtgttctacctccaggtggcgccatcgatgcagaacctgatcgcgacggtgctgttcgtcgtggtggcgctcaccgactgggctgacggctacctggcccgcaagctgaatcagacttcatcgttcggcgccttcctcgacccggtggccgacaagttcctggtctgcgccgcgttgctgatcctggtgcagctcgaccgcgtcaacgcgctggtcgcgctggtgatcatcgggcgcgagatcgcgatctcggccctgcgtgagtggatggcgcagatcggcgcgtcgcgcagcgtcgcggtgcacatgctgggcaagctcaagaccaccgtgcagatgatcgcgatccccttcctactctttgacggccatctgttcagcgtgatcgacacccacctgtggggcaccgtcctgatcatcgtcgcggcggcgctgaccatctggtcgatggtctattacctgcagaaggccttgcccgagatccgggccaaggtgcggtga

SEQ ID NO: 2418 - protein, 188 aa, Rubrivivax gelatinosus PM1
MFFTLPTLLTWARIVAIPLIVGVFYLQVAPSMQNLIATVLFVVVALTDWADGYLARKLNQTSSFGAFLDPVADKFLVCAALLILVQLDRVNALVALVIIGREIAISALREWMAQIGASRSVAVHMLGKLKTTVQMIAIPFLLFDGHLFSVIDTHLWGTVLIIVAAALTIWSMVYYLQKALPEIRAKVR

SEQ ID NO: 2419 - DNA, 588 bp, Burkholderia vietnamiensis G4
  CDS (1)..(588): transl_table=11
atgccgttcaacttcccgattttcctgacgtgggtccggatcgtgctgattccgctcgtcgtcggcgtgttctatctgccggacacggtgatgggcggcgcgcaccgcaacctcgcggcggcggcgatattcatcctggcggcgctgaccgactggttcgacggctttctcgcgcgcaagtggaaccagacgtcgtcgttcggcgcgttcctcgacccggtcgcggacaagctgatggtcaccgccgcgctgctgatcctcgtgcagatcgcgcgggtcgacgcggcgatcgcgctggtgatcgtcggccgcgagatcgcgatctcggcgctgcgcgagtggatggcgcagatcggcgcgtcgaagagcgtcgcggtgaaccagctcggcaagttcaagaccgcatgccagatggtcgcgatcccgatgctgctgtactacgggccgctgccgctcggcgtcgcgacgatcgacacgcgcgtgtggggcgaatggctgatgtatctggcggcggtgctgacgatctggtcgatgctgtactacatgaagctcgcgtggccgcagattcgcgagcgcggcggcgcgtaa

SEQ ID NO: 2420 - protein, 195 aa, Burkholderia vietnamiensis G4
MPFNFPIFLTWVRIVLIPLVVGVFYLPDTVMGGAHRNLAAAAIFILAALTDWFDGFLARKWNQTSSFGAFLDPVADKLMVTAALLILVQIARVDAAIALVIVGREIAISALREWMAQIGASKSVAVNQLGKFKTACQMVAIPMLLYYGPLPLGVATIDTRVWGEWLMYLAAVLTIWSMLYYMKLAWPQIRERGGA

SEQ ID NO: 2421 - DNA, 636 bp, Xylella fastidiosa Dixon
  CDS (1)..(636): transl_table=11
atgaaattgaccgtccccacttggttaacgctgctacggatcgtgatgatccctgtgctcattgtggtgttctatctaccttatcaatggagcaatattgtcgccacgggagtgtttgcgatcgctgcaattaccgactggcttgatggatggatcgcacgtcgttacgcgcaacattcgttattgggtgcgtttttagacccagttgcggacaaattgatggtggccatcgcattatttctcattgtgcaaggtcacccgacaccgtcgatggcattttgggcagcagtgatcgtcagtcgtgaaattgcagtgtcagcattgcgtgagtggatggccgaaattggtcatcgtgccaaggtgcgtgtagctgtccttggcaaagtgaagactacggctcaaatgattgcggtactgtgtctgctctattcggtaacacccgagaagaaggctatccatcaaatatggtttggccacttgatcttccaagtcggttattggacattgctgatttccgcgttactgacactgtggtctggtttccagtatttgcgcgctgcctggcctagtttacgtaccggaaaacctgtggtgattaaaacgcacatcagcaagaaccgaaaaattaatagttga

SEQ ID NO: 2422 - protein, 211 aa, Xylella fastidiosa Dixon
MKLTVPTWLTLLRIVMIPVLIVVFYLPYQWSNIVATGVFAIAAITDWLDGWIARRYAQHSLLGAFLDPVADKLMVAIALFLIVQGHPTPSMAFWAAVIVSREIAVSALREWMAEIGHRAKVRVAVLGKVKTTAQMIAVLCLLYSVTPEKKAIHQIWFGHLIFQVGYWTLLISALLTLWSGFQYLRAAWPSLRTGKPVVIKTHISKNRKINS

SEQ ID NO: 2423 - DNA, 552 bp, Alkalilimnicola ehrlichei MLHE-1
  CDS (1)..(552): transl_table=11
atgcagttgaactggcccaacgccctgaccctgttccggattgcgctgatcccggtgctggggctgtgcttcttgctcccggcaccctggatgaacgtgctggcggtgatcgtgttcagcgcggcggccgtcaccgactggctggacggctacctggcgcgccggctgcagcagacctccgccttcggggcgttcctggacccagtggccgacaagctaatggtcgcggtcgccctggtggcgctggtcgcggtgcatccggggccctggctcgccgtgccggccagcatcatcatcggccgtgagattgccgtgtccgccctgcgtgagtggatggcgaacctcggggcccgggccagcgtggcggtgagcatggccggcaaggtcaagacgaccgcccagatggcggccatcatcatgctgttatacggtcaatcgctgggcccgatcccgctctttgagctgggcgtggtgctcctttacgtggcggcggtgctgaccgtatactccatggcgctgtatctgagggcggcctgggagcagctcgcgtag

SEQ ID NO: 2424 - protein, 183 aa, Alkalilimnicola ehrlichei MLHE-1
MQLNWPNALTLFRIALIPVLGLCFLLPAPWMNVLAVIVFSAAAVTDWLDGYLARRLQQTSAFGAFLDPVADKLMVAVALVALVAVHPGPWLAVPASIIIGREIAVSALREWMANLGARASVAVSMAGKVKTTAQMAAIIMLLYGQSLGPIPLFELGVVLLYVAAVLTVYSMALYLRAAWEQLA

SEQ ID NO: 2425 - DNA, 549 bp, Shewanella sp. MR-4
  CDS (1)..(549): transl_table=11
atgccgtttaacttacctatagcattaacccttttcaggctttttttactgcccatcttcgtggtgctcttttatctgccgtacagttggactcccttcgttgctgcttttgtgttttggctcgccgctattaccgatgccttggatggctatgccgcccgtaagctcaagcaactcacgcgttttggtgcctttcttgatccggttgccgataaactgatggtgatcaccgcgctcgtgttattagttgatcaatatgccgatatttggttaacgttgccggcactgtttatgattggtcgtgaaattgtaatttcagcgctgcgtgaatggatggctgaattaggtaagcgcgggacggttgcggtttcttggatcggcaaatataaaacggcggcgcagatggtggcgattattggcctgatctggcaatacaacccactaatgatccaagccgcatttgtgctgttatatatcgctgccgtgttaaccttctggtcaatgatgagctacattttagccgcctggaaagatttaacggccgaatag

SEQ ID NO: 2426 - protein, 182 aa, Shewanella sp. MR-4
MPFNLPIALTLFRLFLLPIFVVLFYLPYSWTPFVAAFVFWLAAITDALDGYAARKLKQLTRFGAFLDPVADKLMVITALVLLVDQYADIWLTLPALFMIGREIVISALREWMAELGKRGTVAVSWIGKYKTAAQMVAIIGLIWQYNPLMIQAAFVLLYIAAVLTFWSMMSYILAAWKDLTAE

SEQ ID NO: 2427 - DNA, 663 bp, Oceanicola batsensis HTCC2597
  CDS (1)..(663): transl_table=11
atgaagatgaccctgccgaacctgctcacccttttccgcctgctggccgcccccggcgtcgtgctggtgttcctgctggtgccgcgtcccgtcgcggactggctggcctgcgcgctcttcgtgggggcggcggcgacggattatgtcgacggctacctggcgcggcgcatggggcaggtcagccgcatcggcacgatgctcgatccgatcgcggacaaggccatggtggcgctggcgctgctggcgctggccgtctggtcgccgctgtcgcatgcgatcgtcctgccgggcgcggtgatcctgttccgcgaggtcttcgtttcgggactgcgcgagtttctgggtgacgtggccgggcggctgcaggtcacgaagctggccaagtggaagacggcggtgcagatggtggcgatcgcgctgctgctggcacagggcggggtgaacgcgcgtctgggcatggcggtcttcgggatggacgggacgatggtgtcggccatcctggcgggcgaggaggcggacccgctggggatacgcgggatgctgatccgtgcggaatggggcggatatatcgggatcgcgctgatctggctggcggcgctgctgacggccatcaccggctgggactatttccgcaaggcgcgggcgcatctgggagaggactga

SEQ ID NO: 2428 - protein, 220 aa, Oceanicola batsensis HTCC2597
MKMTLPNLLTLFRLLAAPGVVLVFLLVPRPVADWLACALFVGAAATDYVDGYLARRMGQVSRIGTMLDPIADKAMVALALLALAVWSPLSHAIVLPGAVILFREVFVSGLREFLGDVAGRLQVTKLAKWKTAVQMVAIALLLAQGGVNARLGMAVFGMDGTMVSAILAGEEADPLGIRGMLIRAEWGGYIGIALIWLAALLTAITGWDYFRKARAHLGED

SEQ ID NO: 2429 - DNA, 495 bp, Pseudoalteromonas tunicata D2
  CDS (1)..(495): transl_table=11
atggtgattttctatatcccaggtgaatgggcttattttggcgcagcgtttgttttctggcttgcatcaattacagatatcctcgatggctacttagcccgtaaacttcaacaatcaaccccttttggagcctttttagatccagtcgcagataaggtgatggtatgtgtcgctttggtgattttagttgagcattatcaaagcctttatgtcaccgtccctgcaatgattatcattagtcgggaaattgtgatttctgctttacgtgaatggatggcagagcaaggtaagcgtggcaatgtcgctgtatcacaattagggaaaattaaaactgctgcgcaaatgttggcgatcattggcttaatttggcaatttgaaccatggatgacacagttaagtttcggcttattctatatcgcaaccttcttaaccttctggtcaatggtgcaatatttaacagcagcctggtctgaattgcagaaaagttcatcataa

SEQ ID NO: 2430 - protein, 164 aa, Pseudoalteromonas tunicata D2
MVIFYIPGEWAYFGAAFVFWLASITDILDGYLARKLQQSTPFGAFLDPVADKVMVCVALVILVEHYQSLYVTVPAMIIISREIVISALREWMAEQGKRGNVAVSQLGKIKTAAQMLAIIGLIWQFEPWMTQLSFGLFYIATFLTFWSMVQYLTAAWSELQKSSS

SEQ ID NO: 2431 - DNA, 558 bp, Photobacterium sp. SKA34
  CDS (1)..(558): transl_table=11
atgcgtttatcaatacctaacatcttaagtttcgtccggctcattcttatcccattttttgttattgccttttatgtgccgtacgagtggtctgcttttgcaacagcgttcattttttgggtcgcgggtgtcaccgattggttcgatggctaccttgctcgtaaattaaatcaaacaactcggtttggtgcttttatcgatcctgttgctgataaactcatggtagcaacggccttagtactcgtggttgagcattatcattcagtatgggttacgatccctgctgtcactatgattggtcgtgaaattattatttcagcactacgtgaatggatggctgaaattggtaaacgtgcaagcgtagctgtttcttgggtagggaaagtgaagactgcctctcagatgtttgctctattattgttgttatggcatccgcatgaatacgttgtatggttaggttatgtatctttgtatgttgcaatggtattaacgtactggtcaatggtgcaatatttaaaggcagccaaaggtgatttgcttaacgcagaaaatcactag

SEQ ID NO: 2432 - protein, 185 aa, Photobacterium sp. SKA34
MRLSIPNILSFVRLILIPFFVIAFYVPYEWSAFATAFIFWVAGVTDWFDGYLARKLNQTTRFGAFIDPVADKLMVATALVLVVEHYHSVWVTIPAVTMIGREIIISALREWMAEIGKRASVAVSWVGKVKTASQMFALLLLLWHPHEYVVWLGYVSLYVAMVLTYWSMVQYLKAAKGDLLNAENH

SEQ ID NO: 2433 - DNA, 549 bp, Oceanospirillum sp. MED92
  CDS (1)..(549): transl_table=11
atgaagctacctaatatactaaccagtctgcgtatcctgctgatacctgtatttgttcttgttttttacctgccttatgactgggctccattggccacaggctgtgtctttgctattgcaggcttcaccgattggctggatggattcgtcgctcgtaagttaaaccagacatcgccgtttggcgcttttcttgatcccgtcgcagataaattgatggtagctatttcacttgcgctactggttgagtcctataacaatatctggattactattcctgctatcgtcatcatcggcagagagatcgttatctctgcactacgtgagtggatggcagagatagggcagagggcaagtgttgccgtatcctatattggtaagcttaaaactgctctgcagatgttggcgatcatgttgatggttgtaactgagccctataccaatatctcctgggcaggaattgttgcgctctatcttgcagccattcttactttatggtctatgtatcagtaccttagagctgcttggccagtcttatctgaagagatgtaa

SEQ ID NO: 2434 - protein, 182 aa, Oceanospirillum sp. MED92
MKLPNILTSLRILLIPVFVLVFYLPYDWAPLATGCVFAIAGFTDWLDGFVARKLNQTSPFGAFLDPVADKLMVAISLALLVESYNNIWITIPAIVIIGREIVISALREWMAEIGQRASVAVSYIGKLKTALQMLAIMLMVVTEPYTNISWAGIVALYLAAILTLWSMYQYLRAAWPVLSEEM

SEQ ID NO: 2435 - DNA, 564 bp, marine gamma proteobacterium HTCC2207
  CDS (1)..(564): transl_table=11
atgtggaatttgcccaatatcctaaccctgctgcgcattggcttaataccggtgttcatcgccatatactacacctcatgggagtggcataacctgattgccgccgccgtgtttggtctggccgcagcgactgattgggtagacggttatatggctcgtaagtacgaccaggtaacgccctttggtgctttcttggatcccgttgccgacaaactgattgtggttgcggctatggtgatgctgctcgaagtgcattccagccccttattttcaattgcatcgattatcattatcggccgtgaaatcgttatttccgcactgcgggagtggatggccgagatgggctacagcggtactgttgccgtcgctatgattggcaaagtgaagacctgggtgcagatggttgccatcgcggtattgctcgccgccaaaccagaaaatgaactgctcaccaacctcgggtttatcgcaatttatatcgctgccgcgctaactctctggtcaatggtccactatctgcgcgctgcctggccgcaattgagtggctcaactccaagtaagtga

SEQ ID NO: 2436 - protein, 187 aa, marine gamma proteobacterium HTCC2207
MWNLPNILTLLRIGLIPVFIAIYYTSWEWHNLIAAAVFGLAAATDWVDGYMARKYDQVTPFGAFLDPVADKLIVVAAMVMLLEVHSSPLFSIASIIIIGREIVISALREWMAEMGYSGTVAVAMIGKVKTWVQMVAIAVLLAAKPENELLTNLGFIAIYIAAALTLWSMVHYLRAAWPQLSGSTPSK

SEQ ID NO: 2437 - DNA, 549 bp, Rickettsiella grylli
  CDS (1)..(549)
atgagtattcccaatatattaacttttttgcgcattcttttaattcccttttttattttattattttacttaccttttcgaggaagtcatatcgttgctgcacttatttttatttttgcagccatgaccgattggctcgatgggtatttagcgcggagttgggatcaagtttctaaattaggcagttttcttgatccggtggcggataaattaatggtgattacggcactaatattattagtgagcgatcgggccttaccttacttagcgattcctgcgattgttattagttgtcgtgaaattatggtttcagcgttgcgtgaatggatggctgaaattggtaaacgtaaacagatggctgtcacgatgttagggaaaataaaaacaacgttgcagatgttagccatcattttattattactttacaaacccggcgcttggatgggatttgcttttgcaggttacctattactttatcttgctgtttttttaacattgtggagtatgtgtttatatttaaaagcagcctggcatgatttatcttcttga

SEQ ID NO: 2438 - protein, 182 aa, Rickettsiella grylli
MSIPNILTFLRILLIPFFILLFYLPFRGSHIVAALIFIFAAMTDWLDGYLARSWDQVSKLGSFLDPVADKLMVITALILLVSDRALPYLAIPAIVISCREIMVSALREWMAEIGKRKQMAVTMLGKIKTTLQMLAIILLLLYKPGAWMGFAFAGYLLLYLAVFLTLWSMCLYLKAAWHDLSS

SEQ ID NO: 2439 - DNA, 573 bp, Oceanobacter sp. RED65
  CDS (1)..(573): transl_table=11
atgcctgtaaaccttcctaatattttaactgccatccgtgtcgtgttgataccactgatggttgttgtgttttatctgcctgtatattgggccagttttgcagcggcggttgtattttgggtcgcgtgcatcaccgattattgggatggctatttggctcgtaaaatgaatttgaccactgcttttggtgcgtttttagaccccgtagcagataaattgattgttgttgtctctctaatgctggttgtggatcgtgataatacgctctggcttactgtgccggccttaataattgttggtagggaagtctttgtatcagccttgagagagtggatggcgggcgttggaaaaagcgcggatgtagcggttagctttgtcggtaaagcaaagacgcttgtgcagatgacggccattacagggcttctcggtattgagcctggtggccatgacgcactcattgcttcggatggttggtatgcagcggcaattgtattgttggtttttgcagcagtgttaacgatttggtccatgattcaataccttaaggcagcttggcctgtattaaaaagctaa

SEQ ID NO: 2440 - protein, 190 aa, Oceanobacter sp. RED65
MPVNLPNILTAIRVVLIPLMVVVFYLPVYWASFAAAVVFWVACITDYWDGYLARKMNLTTAFGAFLDPVADKLIVVVSLMLVVDRDNTLWLTVPALIIVGREVFVSALREWMAGVGKSADVAVSFVGKAKTLVQMTAITGLLGIEPGGHDALIASDGWYAAAIVLLVFAAVLTIWSMIQYLKAAWPVLKS

SEQ ID NO: 2441 - DNA, 891 bp, Arabidopsis thaliana
  CDS (1)..(891)
atgctcagatccggtctggcttcgttaatcgtcgatgtcaatttgcggcgcacgttacgtccatccccaaccttttcttttccggcgcatcttagccgttgcattatcacttcccgttactcctcccgtacatctctaaggtttccgattcaaatatctcgccaccaacaccgtctatcctacttttcttcatcctcttcgtcggagcaaagcagaccaacttcctcttcccgaaacagtttcagtggtcacggtcagcttgatagtgatgataattcttcaccgcctccgtcgcaatcatcttccaaagttcttacattgcctaccgtattaacacttggtcgtgtcgccgccgtcccgcttctcgtcgcaaccttttacgttgatagttggtggggaacaactgctacaacaagcattttcattgcagcagccattacagactggcttgacggctatcttgcccgcaagatgaggttaggttctgcgtttggtgcctttttggatccagttgctgataagcttatggttgcagctacattgattttactgtgtacaaaacctatccaagttgctgaattaggaccacttccatggttattgaccgtaccttctattgcaatcattggtagggagattactatgtccgcagtaagagaatgggctgcatctcaaaatggaaagcttttagaggcagttgctgtaaataacttgggcaagtggaaaaccgccacgcagatgacagcactaaccatacttcttgcaagccgagatagcaatgttggatggctcgtagcttcaggtgctggcttgctttatgtatcagtaggactatctgtttggtctttagccgtttatatgaggaagatatggaaagtactaatgaagtag

SEQ ID NO: 2442 - protein, 296 aa, Arabidopsis thaliana
MLRSGLASLIVDVNLRRTLRPSPTFSFPAHLSRCIITSRYSSRTSLRFPIQISRHQHRLSYFSSSSSSEQSRPTSSSRNSFSGHGQLDSDDNSSPPPSQSSSKVLTLPTVLTLGRVAAVPLLVATFYVDSWWGTTATTSIFIAAAITDWLDGYLARKMRLGSAFGAFLDPVADKLMVAATLILLCTKPIQVAELGPLPWLLTVPSIAIIGREITMSAVREWAASQNGKLLEAVAVNNLGKWKTATQMTALTILLASRDSNVGWLVASGAGLLYVSVGLSVWSLAVYMRKIWKVLMK

SEQ ID NO: 2443 - DNA, 555 bp, Pseudomonas stutzeri
  CDS (1)..(555): transl_table=11
atgaatattccaaacctgctcacccgtgtgcgcgtgctgctgatccctatcttcattctgctgttctacctgccatttcactggagctatctggccgccagcgcggtgttcaccattgctgcggtgaccgattggctcgacggctacctggctcggcgtctggagcagagcactccgttcggtgccttcctcgatccggtggcggacaagctgatggtggcggttgcgctggtgctgctggtcggcgagcacgccaacctgtggctgacgctgccggcagccatcatcatcgggcgtgaaatcgtcgtctcggcgctgcgtgagtggatggccgaactgggagcgcgagcccaggtggccgtctccaatctgggtaaatggaaaactgcagcacagatggtggcgctggtgatcctgctggccaatccgccggctctgacgatctgggtcggcctgggctacacgttgctcatcatcgccgccggattgacgctgtggtcgatgatcaactacctgaacgcggcctggcctcatctgagcgctgaaaagaaataa

SEQ ID NO: 2444 - protein, 184 aa, Pseudomonas stutzeri
MNIPNLLTRVRVLLIPIFILLFYLPFHWSYLAASAVFTIAAVTDWLDGYLARRLEQSTPFGAFLDPVADKLMVAVALVLLVGEHANLWLTLPAAIIIGREIVVSALREWMAELGARAQVAVSNLGKWKTAAQMVALVILLANPPALTIWVGLGYTLLIIAAGLTLWSMINYLNAAWPHLSAEKK

SEQ ID NO: 2445 - DNA, 573 bp, Blochmannia floridanus
  CDS (1)..(573): transl_table=11
atgtttaagtattatggtgtttttaatataccaatgtatctcactttattccggataataatggtgccgtgctttgttgcagtgttttattggcctatttattggagtccaatgctgtgtactttaatattttttattgctgctattacggattggtttgatggttttttagcgcgtagatggaatcaaactagtagaattggtggatttcttgatccaatagcagataaaatcatgataattacggctctgatattgatatctgagcattttcatgtgtggtggatgactttacctatatctagtataattattcgagaaattcttatttcatcattgagggaatgtatagctagagttgataacaaaaataatatttctgtcatatggttaagtaaggttaaaacctttgcacaaatgttagctttaattgcattattgtgcaggttaaatgaatggactgtaataatgggagtaatttctttatatactgccatgttattgaccttatggtcaatgtgttattatgtatatagtgtatcttctatactgttacagtataaattgaaataa

SEQ ID NO: 2446 - protein, 190 aa, Blochmannia floridanus
MFKYYGVFNIPMYLTLFRIIMVPCFVAVFYWPIYWSPMLCTLIFFIAAITDWFDGFLARRWNQTSRIGGFLDPIADKIMIITALILISEHFHVWWMTLPISSIIIREILISSLRECIARVDNKNNISVIWLSKVKTFAQMLALIALLCRLNEWTVIMGVISLYTAMLLTLWSMCYYVYSVSSILLQYKLK

SEQ ID NO: 2447 - DNA, 558 bp, Haemophilus influenzae
  CDS (1)..(558): transl_table=11
atgaaattcaatatcccaattttcctaacgatctttcgagtcattttgattccttttttcgtgattgcattttatttacccattgaatcatctcctttcatcacaacgctcattttttttattgcaggtgtcactgactggctagatggctatctagctcgtaaatggaaacagaccacgcgctttggtgcatttcttgatcctgttgctgataaagtaatggtagtggctgcactagttttaattgtcgaacatcaacatacattttggataaccattcctgccattattatgatttctcgtgaaattatcatctccgcattacgtgaatggatggcagagcttggggaacgtagcaaaatcgcagtctcttggtggggaaaatggaaaaccacagcgcaaatgttagcactaggcggattattatggcgttataacaactatatggaaatagcagcaattatcttactttatatcgccgctattttaactatatggtcaatgatccaatatttacaagtagcaaaaggaagcttgctagataatattcaattataa

SEQ ID NO: 2448 - protein, 185 aa, Haemophilus influenzae
MKFNIPIFLTIFRVILIPFFVIAFYLPIESSPFITTLIFFIAGVTDWLDGYLARKWKQTTRFGAFLDPVADKVMVVAALVLIVEHQHTFWITIPAIIMISREIIISALREWMAELGERSKIAVSWWGKWKTTAQMLALGGLLWRYNNYMEIAAIILLYIAAILTIWSMIQYLQVAKGSLLDNIQL

SEQ ID NO: 2449 - DNA, 549 bp, Photorhabdus luminescens subsp
  CDS (1)..(549): transl_table=11
atgcaattaaatataccaacatggctcactctatttcgtatcgccctgatcccattttttgtcctggcattctatttgccattcacatgggcgccgatggtttgtgccataatttttattgtcgctgcggcgacagactggtttgacggttttctcgctcgcctttggaaacagacaactcgctttggcgcatttcttgatcctgtcgcggacaaaatcatggttgcggccgcattagtcttagtttccgaacactatcatacatggtggataaccctgcccgcagcaaccatgatagcgcgtgaaattatcatctcttctctcagagaatggatggctgaattaggcaaacgcagtagtgttgccgtttcctggatgggtaaggtaaaaacgacagcacagatggcagcgttaattgctttattatggcgccctaattttgaattcgaattgggtggattcatattactttatgttgctacggtgatgacattttggtcaatgtttcaatacataaatgcggcttggtctgatttgcgtgaagcttga

SEQ ID NO: 2450 - protein, 182 aa, Photorhabdus luminescens subsp
MQLNIPTWLTLFRIALIPFFVLAFYLPFTWAPMVCAIIFIVAAATDWFDGFLARLWKQTTRFGAFLDPVADKIMVAAALVLVSEHYHTWWITLPAATMIAREIIISSLREWMAELGKRSSVAVSWMGKVKTTAQMAALIALLWRPNFEFELGGFILLYVATVMTFWSMFQYINAAWSDLREA

SEQ ID NO: 2451 - DNA, 588 bp, Pseudomonas fluorescens
  CDS (1)..(588): transl_table=11
atgaatatccctaatctgatcaccgttctacgcgttctgctcatcccgatcttcattttgctgttttacctgccttacaactggagctacatggccgccagttccgtctttgcgttcgccgcggccaccgactggcttgatggctacctggcgcggcgtctggagcagagcacgccgttcggggccttcctcgatccggtggccgacaagttgatggtggcggtggccctggtgctgctggtgcaagagcacggcaacctgtggctgaccctgccggcagcggtgatcatcgggcgtgaaatcgtggtgtccgcccttcgcgagtggatggccgagctcgggcgcacgcgcccaggtggccggtgtccaacatgggcaaatcggaaaactgccgcgcagatgctggcgctggtgatcctgctggccaatccgccggccttcaccttctgggtgctgctgggttatgccttcctgctgatcgccggagggctgaccctgtggtcgatgttgcagtacctgcgcgctgcctggccgcacctgaagaccgatggtagaaaagaaataaaactttttgaatcaaggggttga

SEQ ID NO: 2452 - protein, 195 aa, Pseudomonas fluorescens
MNIPNLITVLRVLLIPIFILLFYLPYNWSYMAASSVFAFAAATDWLDGYLARRLEQSTPFGAFLDPVADKLMVAVALVLLVQEHGNLWLTLPAAVIIGREIVVSALREWMAELGRTRPGGRCPTWANRKTAAQMLALVILLANPPAFTFWVLLGYAFLLIAGGLTLWSMLQYLRAAWPHLKTDGRKEIKLFESRG

SEQ ID NO: 2453 - DNA, 549 bp, Wigglesworthia glossinidia brevipalpis
  CDS (1)..(549): transl_table=11
atgcgtttaaacataccaacttgtttaactttatttcgtttaattatagtaccattttttattattgttttttatcttccatttagtaatgcttctttttattctgctataatttttatattagcagctttaactgattggtttgatggttttttggctagaaaattaaaccaaacaacttgtttcggagcatttttagatccagtagctgataaaattattgtagtaattggattaattcttattattgaatattttcattctttttggattactattccttcattaataatgataattagagaaattattatttcttctttaagagaatggatggcagaaattggtaaaaataatttattatctgtttcattaataagtaaactaaaaactagcatacaaatgctagcgattttttctctcttatggaaagaaacatatataattattattattggaatattgtctttatatgtatcttctattttagcatttttatctatgttgaaatatttttatatagcttggagagatttatttagaaattaa

SEQ ID NO: 2454 - protein, 182 aa, Wigglesworthia glossinidia brevipalpis
MRLNIPTCLTLFRLIIVPFFIIVFYLPFSNASFYSAIIFILAALTDWFDGFLARKLNQTTCFGAFLDPVADKIIVVIGLILIIEYFHSFWITIPSLIMIIREIIISSLREWMAEIGKNNLLSVSLISKLKTSIQMLAIFSLLWKETYIIIIIGILSLYVSSILAFLSMLKYFYIAWRDLFRN

SEQ ID NO: 2455 - DNA, 549 bp, Yersinia pestis
  CDS (1)..(549): transl_table=11
atgcaattgaatataccgacttggcttaccttgttccgtgttgtgctcatcccattcttcgttctggcgttttatttgccgttcgtctgggctccgatggtttgcgccatcatatttgtgtttgccgcggcaaccgattggtttgatggctttttagctcgacgttggaaacagacaacccgttttggtgctttccttgatcctgtagcggataaagttatggtagccgttgcattagtattggttgctgaacattaccactcttggtggattacattaccggctgcaacgatgatcgcccgagaaattatcatttcgtctcttagagaatggatggcagaaattggtaaacgcagcagcgttgcggtgtcatgggtaggtaaggtaaagacgatggcacaaatggggtcacttgttgggttgctttggcgccctgaccacaatgttgaacttgccagtttcgttttactttatattgctgctgtactgacattctggtcaatgttccaatatttgaacgctgcctggagtgatttgctcgaaccttga

SEQ ID NO: 2456 - protein, 182 aa, Yersinia pestis
MQLNIPTWLTLFRVVLIPFFVLAFYLPFVWAPMVCAIIFVFAAATDWFDGFLARRWKQTTRFGAFLDPVADKVMVAVALVLVAEHYHSWWITLPAATMIAREIIISSLREWMAEIGKRSSVAVSWVGKVKTMAQMGSLVGLLWRPDHNVELASFVLLYIAAVLTFWSMFQYLNAAWSDLLEP

SEQ ID NO: 2457 - DNA, 912 bp, Brassica napus
  CDS (1)..(912)
atgctcagatccagcctcgcttcgttaatcgtcgatgtcaactcacggcgcacgttacctccacgcgcatccttctctcaccctgcgcatattagccgttcctcacgccgcgttcttccttccctgtactcctcccacacacctctaaggtttcggattcagacatgtaaccaccgccacctctcctcctactcgtctccctctgagaaacacggaccatcttcgtctacccgatcaagcctcgcgggtcaagatgacgcattcacggcggctcaaaacagctccaacggtcataactcttctccgccgcaaccctcttccaaagttcttacattgcccaccgtattaaccattgctcgtgtagctgccgtaccacttctcgtcgcaaccttttacgctgatagttcgtggggaacgacggcgactacaagcatcttcattgcagcagccattacagattgccttgacggctatcttgcacaaaagatgaagttaggttctgcgttgggtgcctttctggatccagttgctgataagcttatggtcgcagctacattgatcttactctgtacaaaacctgtcgaagttgctgtgttaggaccagtcccagtcccatggttactaacggtaccgtctattgcaatcattggtagagagattacaatgtccgcagtgagagaatgggctgcatctcaaaatggaaagcttctagaggccgttgcggttaacaacttgggaaagtggaaaaccgccacgcagatgacagcactaaccatacttctcgcaagccgggacctcagcgttggatggctcgtagcttccggtgctgggttgctttatgtatcagcaggactatcggtttggtctttactcgtttatatgaggatgatatggaaagtactactcaagtaa

SEQ ID NO: 2458 - protein, 303 aa, Brassica napus
MLRSSLASLIVDVNSRRTLPPRASFSHPAHISRSSRRVLPSLYSSHTPLRFRIQTCNHRHLSSYSSPSEKHGPSSSTRSSLAGQDDAFTAAQNSSNGHNSSPPQPSSKVLTLPTVLTIARVAAVPLLVATFYADSSWGTTATTSIFIAAAITDCLDGYLAQKMKLGSALGAFLDPVADKLMVAATLILLCTKPVEVAVLGPVPVPWLLTVPSIAIIGREITMSAVREWAASQNGKLLEAVAVNNLGKWKTATQMTALTILLASRDLSVGWLVASGAGLLYVSAGLSVWSLLVYMRMIWKVLLK

SEQ ID NO: 2459 - DNA, 882 bp, Glycine max
  CDS (1)..(882)
atgtcgggcttgaagcttggcacgactgcttccatctacgttcgaacagcgaaaaccaaaagcaaacccctcttatcatggagaagcccaccccaacacccccgcagccgcaggtacatgctttccccttccaaaaatcaaatcctagggttcacacctagaaacaaattcccatgctattctttgggaagggctggtcttgtcacagattttggttcgtcagtgccccaacctcaacctcaacctcagccaaagccagagccagaaccagaacctgaaccttccaaattgcttacgttgccaacaattttgactctaggccgtgtcgccgctgtcccacttcttgttgctactttctacatggacggttggcgtggaactgctgctactaccagcattttcgtcgctgcatcaatcactgattggcttgatggctatcttgctcgcaagatgaagttaaaatcttcattcggtgcattcttagatccagttgctgacaagcttatggttgctgctacactggtcttattatgtactagacctttggatggtggtgtgtttggacaagcgccgtggctactcactatacctgcaattgccataattggtagagagataaccatgtctgcagtcagggagtgggctgcttcccaggatagcaagcttttagaggctgttgctgtaaataacttggggaagtggaaaacagccacacagatgacagcattaaccatccttcttgcgacccgggactggagccatggaggaggagctgccattgtagtaggctctggtgttgctttgctttatacttcagcagggcttgccttatggtcgttggttgtatatatgaagaaaatatggagggtgttgttgaggtag

SEQ ID NO: 2460 - protein, 293 aa, Glycine max; identical to SEQ ID NO: 2286

SEQ ID NO: 2461 - DNA, 876 bp, Hordeum vulgare
  CDS (1)..(876)
atgccctcccccatcgccacccacctcctcaaagccgccgccgcaaagcccctcttctccccccgcgcggcccagatccccccgctccctcgcccgaccagcgccgcctgccgctggttccggtggccgtcgcccgcgagggggctctgctcctcgccgcattccggccctgccgccgaggggatgggatctgacgggacggggacagggaccaggaggcgggtgccggcagccaacggtgtgtccaaggaaggggcgccgcagccgctgcccgttccgcccaagctgctcacgctgcccaccgtgctcaccattggccgcgtcgccgccgtgcccttcctcatcagcactttctacatggaagggccttgggcagcaaccgccacaaccggcatcttcctggctgcagcaatcactgattggctagatggttatattgcgaggaagatgcatttgggaacaccttttggtgcatttcttgatcctgtggctgacaagcttatggtagctgcgacactagtgttgctgtgcaccaaacctttggaaacttcactgctcactaatggaccatggctgctgacagttccttccattgccatcattgggagagagatcacaatgtcagctgttagagagtgggctgcttctcagaatacccaagttcttgaggctgtggcagttaacaatttagggaagtggaagacagcgacacagatgacggcattgactatgctccttgccagcagagacccaagtctacctgtacaaggggctctagttccccctggtgttgcgttgctctatgcatctgctggacttgccatatggtccctagtggtgtacatcagaaatatatggcggatacttctaaaatag

SEQ ID NO: 2462 - protein, 291 aa, Hordeum vulgare
MPSPIATHLLKAAAAKPLFSPRAAQIPPLPRPTSAACRWFRWPSPARGLCSSPHSGPAAEGMGSDGTGTGTRRRVPAANGVSKEGAPQPLPVPPKLLTLPTVLTIGRVAAVPFLISTFYMEGPWAATATTGIFLAAAITDWLDGYIARKMHLGTPFGAFLDPVADKLMVAATLVLLCTKPLETSLLTNGPWLLTVPSIAIIGREITMSAVREWAASQNTQVLEAVAVNNLGKWKTATQMTALTMLLASRDPSLPVQGALVPPGVALLYASAGLAIWSLVVYIRNIWRILLK

SEQ ID NO: 2463 - DNA, 25 bp, Artificial sequence
  primer
atgcaatttaatatccctacgttgc

SEQ ID NO: 2464 - DNA, 25 bp, Artificial sequence
  primer
ttactgatcaagcaaatctgcacgc

SEQ ID NO: 2465 - protein, 241 aa, Artificial sequence
  consensus sequence
  Variant (2)..(3): Xaa in position 2 to 3 is any amino acid
  Variant (6)..(6): Xaa in position 6 is any amino acid
  Variant (7)..(7): Xaa in position 7 is any or no amino acid
  Variant (9)..(12): Xaa in position 9 to 12 is any amino acid
  Variant (14)..(16): Xaa in position 14 to 16 is any amino acid
  Variant (17)..(18): Xaa in position 17 to 18 is any or no amino acid
  Variant (21)..(33): Xaa in position 21 to 33 is any amino acid
  Variant (34)..(58): Xaa in position 34 to 58 is any or no amino acid
  Variant (60)..(61): Xaa in position 60 to 61 is any amino acid
  Variant (63)..(64): Xaa in position 63 to 64 is any amino acid
  Variant (68)..(68): Xaa in position 68 is any amino acid
  Variant (71)..(72): Xaa in position 71 to 72 is any amino acid
  Variant (75)..(81): Xaa in position 75 to 81 is any amino acid
  Variant (93)..(94): Xaa in position 93 to 94 is any amino acid
  Variant (96)..(98): Xaa in position 96 to 98 is any amino acid
  Variant (100)..(116): Xaa in position 100 to 116 is any amino acid
  Variant (117)..(128): Xaa in position 117 to 128 is any or no amino acid
  Variant (130)..(130): Xaa in position 130 is any amino acid
  Variant (134)..(135): Xaa in position 134 to 135 is any amino acid
  Variant (142)..(142): Xaa in position 142 is any amino acid
  Variant (144)..(148): Xaa in position 144 to 148 is any amino acid
  Variant (149)..(152): Xaa in position 149 to 152 is any or no amino acid
  Variant (156)..(158): Xaa in position 156 to 158 is any amino acid
  Variant (161)..(161): Xaa in position 161 is any amino acid
  Variant (164)..(165): Xaa in position 164 to 165 is any amino acid
  Variant (168)..(168): Xaa in position 168 is any amino acid
  Variant (170)..(172): Xaa in position 170 to 172 is any amino acid
  Variant (175)..(190): Xaa in position 175 to 190 is any amino acid
  Variant (191)..(232): Xaa in position 191 to 232 is any or no amino acid
  Variant (235)..(235): Xaa in position 235 is any amino acid
  Variant (238)..(240): Xaa in position 238 to 240 is any amino acid
PXXLTXXRXXXXPXXXXXFYXXXXXXXXXXXXXXXXXXXXXXXXXXXXXXXXXXXXXXFXXAXXTDWXDGXXARXXXXXXXFGAFLDPVADKXXVXXXLXXXXXXXXXXXXXXXXXXXXXXXXXXXXXIXREIXXSALREWXAXXXXXXXXXVAVXXXGKXKTXXQMXAXXXLLXXXXXXXXXXXXXXXXXXXXXXXXXXXXXXXXXXXXXXXXXXXXXXXXXXXXXXXXXXLTXWSXXXY

SEQ ID NO: 2466 - protein, 44 aa, Artificial sequence
  protein pattern
  Variant (2)..(2): Xaa in position 2 is any amino acid
  Variant (3)..(5): Xaa in position 3 to 5 is any or no amino acid
  Variant (9)..(9): Xaa in position 9 is any amino acid
  Variant (12)..(12): Xaa in position 12 is any amino acid
  Variant (13)..(13): Xaa in position 13 is Phe, Ile, Leu, Met or Val
  Variant (16)..(20): Xaa in position 16 to 20 is any amino acid
  Variant (21)..(21): Xaa in position 21 is Ser or Thr
  Variant (22)..(22): Xaa in position 22 is any amino acid
  Variant (23)..(23): Xaa in position 23 is Phe or Leu
  Variant (25)..(25): Xaa in position 25 is any amino acid
  Variant (27)..(27): Xaa in position 27 is Ala, Ile or Leu
  Variant (30)..(30): Xaa in position 30 is Met or Val
  Variant (34)..(34): Xaa in position 34 is Phe, Ile, Leu or Val
  Variant (35)..(35): Xaa in position 35 is Ile, Leu or Met
  Variant (37)..(41): Xaa in position 37 to 41 is any amino acid
  Variant (42)..(42): Xaa in position 42 is any or no amino acid
  Variant (44)..(44): Xaa in position 44 is Ile, Leu or Val
AXXXXTDWXDGXXARXXXXXXXXGXFXDPXADKXXVXXXXXXLX

SEQ ID NO: 2467 - protein, 19 aa, Artificial sequence
  protein pattern
  Variant (2)..(2): Xaa in position 2 is any amino acid
  Variant (3)..(3): Xaa in position 3 is any or no amino acid
  Variant (7)..(7): Xaa in position 7 is any amino acid
  Variant (8)..(8): Xaa in position 8 is Ile, Met or Val
  Variant (11)..(11): Xaa in position 11 is Leu or Val
  Variant (15)..(15): Xaa in position 15 is any amino acid
  Variant (17)..(18): Xaa in position 17 to 18 is any amino acid
  Variant (19)..(19): Xaa in position 19 is Asp, Gly or Asn
IXXREIXXSAXREWXAXXX

SEQ ID NO: 2468 - protein, 20 aa, Artificial sequence
  protein pattern
  Variant (2)..(3): Xaa in position 2 to 3 is any amino acid
  Variant (4)..(5): Xaa in position 4 to 5 is any or no amino acid
  Variant (8)..(8): Xaa in position 8 is any amino acid
  Variant (11)..(12): Xaa in position 11 to 12 is any amino acid
  Variant (15)..(15): Xaa in position 15 is any amino acid
  Variant (17)..(17): Xaa in position 17 is Ile, Leu or Val
  Variant (18)..(19): Xaa in position 18 to 19 is any amino acid
  Variant (20)..(20): Xaa in position 20 is Phe, Leu or Met
AXXXXGKXKTXXQMXAXXXX

SEQ ID NO: 2469 - protein, 15 aa, Artificial sequence
  protein pattern
  Variant (2)..(2): Xaa in position 2 is any amino acid
  Variant (3)..(3): Xaa in position 3 is any or no amino acid
  Variant (5)..(5): Xaa in position 5 is any or no amino acid
  Variant (7)..(8): Xaa in position 7 to 8 is any amino acid
  Variant (10)..(10): Xaa in position 10 is Ile or Val
  Variant (11)..(12): Xaa in position 11 to 12 is any amino acid
  Variant (13)..(13): Xaa in position 13 is Ile or Val
  Variant (15)..(15): Xaa in position 15 is Phe, Ile, Leu, Met or Val
PXXLXTXXRXXXXPX

SEQ ID NO: 2470 - DNA, 981 bp, Escherichia coli K12
  CDS (1)..(981): transl_table=11
atgagagtagaaaataataatgtttctgggcaaaaccatgacccggaacagattgatttgattgatttactagtgcagttgtggcgtggcaagatgacaatcatcatttccgtcattgtggctattgccctggctattggatatttggcagtagcgaaggagaaatggacgtcaacagcaattatcactcagcccgacgtggggcaaattgctggctataacaatgccatgaatgttatctatggtcaggctgcaccgaaagtatcggatttgcaggagacgttaattggtcgcttcagttctgccttctctgcattagcagaaacgctggataatcaggaagaacgagaaaaacttaccatcgaaccttctgttaagaaccagcaattaccattgactgtttcttatgttgggcaaactgcagagggcgcacaaatgaagttggcccaatacattcagcaagttgacgataaagtgaatcaagagctagaaaaggatctcaaagacaacattgctctgggacggaaaaacttgcaggactctttaagaacgcaggaagtagtcgcgcaggagcagaaagatctgcgtatccgtcagattcaggaagcgttgcagtatgcgaatcaggcgcaggtgacaaaaccgcagattcaacagactggcgaagatatcacacaagatacgttgttccttttggggagcgaagcgctggagtcgatgattaagcatgaggcgacccgtccgttggtgttctcgccaaactactatcagactcgtcaaaacctgctggatatcgaaagcttaaaagttgatgatcttgatattcatgcttaccgttatgtgatgaaaccgatgttacctattcgtcgtgatagcccgaaaaaggcaattaccttgattctggcggtgctgctgggtggcatggttggcgcggggattgtgctggggcgtaatgctctacgcaattacaacgcgaagtaa

SEQ ID NO: 2471 - protein, 326 aa, Escherichia coli K12
MRVENNNVSGQNHDPEQIDLIDLLVQLWRGKMTIIISVIVAIALAIGYLAVAKEKWTSTAIITQPDVGQIAGYNNAMNVIYGQAAPKVSDLQETLIGRFSSAFSALAETLDNQEEREKLTIEPSVKNQQLPLTVSYVGQTAEGAQMKLAQYIQQVDDKVNQELEKDLKDNIALGRKNLQDSLRTQEVVAQEQKDLRIRQIQEALQYANQAQVTKPQIQQTGEDITQDTLFLLGSEALESMIKHEATRPLVFSPNYYQTRQNLLDIESLKVDDLDIHAYRYVMKPMLPIRRDSPKKAITLILAVLLGGMVGAGIVLGRNALRNYNAK

SEQ ID NO: 2472 - DNA, 984 bp, Salmonella enterica subsp. enterica serovar Typhi str. CT18
  CDS (1)..(984): transl_table=11
atgacagtggatagtaatgcgtcttccgggcgtgggaacgatccggaacagattgatttgattgagttattgctacagttatggcgtgggaagatgaccattattgtagccgttattatcgccattttgctggccgtaggctacctgatgatagccaaagaaaaatggacatccacggcgattattacccaacctgatgccgcgcaggttgccacctataccaacgcgctcaacgtcttgtatggcgggaatgcccccaaaatctctgaagtgcaggcgaattttataagccgctttagttctgcgttttccgcattatcggaagcgctggataatcagaaagagcgggaaaagctcaccattgaacagtcggtaaaggggcagacgctgccgctctcggtttcttatgtgagcactaccgctgaaggggcgcagcgtcggctggcggaatatatccaacaggtggatgaagaggtcgctaaggaactggaagttgacctgaaagataacatcacgctgcaaaccaaaacgttgcaggagtcccttgagacgcaggaagttgtggcgcaggagcaaaaagatctgcgtattaagcaaatcgaagaagcgttgcgctatgcggatgaggccaaaatcacgcagccgcagattcagcaaacccaggatgttacccaggacacgatgttcctgttggggagcgatgcgctaaaatcgatgatacagaacgaagcgacgcgtccactggtcttttctccggcctattaccagacgaagcagacactgctggacattaaaaatctgaaagtgactgccgatacggtgcacgtctatcgttatgtgatgaagccgacgctgccggtccgtcgcgatagcccgaaaacagccattaccctcgtgctggctgtgttgctgggcgggatgatcggcgccgggattgtgctggggcgcaatgcgctacgtagctataagccaaaagccttgtaa

SEQ ID NO: 2473 - protein, 327 aa, Salmonella enterica subsp. enterica serovar Typhi str. CT18
MTVDSNASSGRGNDPEQIDLIELLLQLWRGKMTIIVAVIIAILLAVGYLMIAKEKWTSTAIITQPDAAQVATYTNALNVLYGGNAPKISEVQANFISRFSSAFSALSEALDNQKEREKLTIEQSVKGQTLPLSVSYVSTTAEGAQRRLAEYIQQVDEEVAKELEVDLKDNITLQTKTLQESLETQEVVAQEQKDLRIKQIEEALRYADEAKITQPQIQQTQDVTQDTMFLLGSDALKSMIQNEATRPLVFSPAYYQTKQTLLDIKNLKVTADTVHVYRYVMKPTLPVRRDSPKTAITLVLAVLLGGMIGAGIVLGRNALRSYKPKAL

SEQ ID NO: 2474 - DNA, 1035 bp, Escherichia coli
  CDS (1)..(1035): transl_table=11
atgacgattatcgctaaattatggcgacttaaaattatttcgtccgttagggtaatgatgagagtagaaaataataatgtttctgggcaaaaccatgacccggaacagattgatttgattgatttactggtgcagttgtggcgcggcaagatgacaattatcatctctgtcattgtcgctattgccctggctatagggtatctggccgttgccaaagaaaagtggacttccacagctatcgttactcaacctgatgtggggcaaatcgctggttataccaacgcgatgaatgtgatttacggtccggctgtaccgaaagtctccgacattcagacttcacttatcggacgttacagcactgcattctcagcattagcggaaacgttggataatcaggaagaacctgaaaaactgaccattgagcctactgttaaaaatcagtccttacctttagcggtgtcttatgttggtgaaacagctgaaggtgcgcagaaacagctggcgcaatatatccagcaagttgacgaccaggtaaacgaagaactggaaaaagacctgaaagacaacatcgcgctgcgtatgaaaaacttgcaggattcgctgaaaacccaggaagtagtcgcgcaggagcagaaagatctgcgtatccgtcagattcaggaagcgttgcagtatgcgaatcaggcgcaggtgacaaagccacaggttcagcagactgaagatgtgacacaagatacgttgttccttttggggagcgaagcgctggagtcgatgattaagcatgaggcgacccgtccgttggtgttctcatcaaactactatcagactcgtcaaaacctgctggatatcgacaatcttgacgttgataaacttgatattcatgcttaccgctatgtaatgaaaccgacgttacctattcgtcgcgatagcccgaaaaaggcaattaccttgattctggcggtgctgctgggcggcatggttggcgcggggattgtgctggggcgtaacgctctgcgtaattacaacgcgaagtaa

SEQ ID NO: 2475 - protein, 344 aa, Escherichia coli
MTIIAKLWRLKIISSVRVMMRVENNNVSGQNHDPEQIDLIDLLVQLWRGKMTIIISVIVAIALAIGYLAVAKEKWTSTAIVTQPDVGQIAGYTNAMNVIYGPAVPKVSDIQTSLIGRYSTAFSALAETLDNQEEPEKLTIEPTVKNQSLPLAVSYVGETAEGAQKQLAQYIQQVDDQVNEELEKDLKDNIALRMKNLQDSLKTQEVVAQEQKDLRIRQIQEALQYANQAQVTKPQVQQTEDVTQDTLFLLGSEALESMIKHEATRPLVFSSNYYQTRQNLLDIDNLDVDKLDIHAYRYVMKPTLPIRRDSPKKAITLILAVLLGGMVGAGIVLGRNALRNYNAK

SEQ ID NO: 2476 - DNA, 1035 bp, Escherichia coli
  CDS (1)..(1035): transl_table=11
atggcgattatcgctaaactatggcgacttaaaattatttcgtccgttagggtaatgatgagagtagaaaataataatgtttctgggcaaaaccatgacccggaacagattgatttgattgatttactggtgcagttgtggcgtggcaagatgacaattatcatctctgtcattgttgctattgccctggctatagggtatctggtcgttgccaaagaaaagtggacttcaacagctatcgttactcaacctgatgtggggcaaatcgctggttataccaacgcgatgaatgtgatttacggtccggctgtaccgaaagtctccgacattcagacttcacttatcggacgttacagcactgcattctcagcattagcggaaacgttggataatcaggaagaacctgaaaaactgaccattgagcctactgttaaaaatcagtccttacctttagcggtgtcttatgttggtgaaacagctgaaggtgcgcagaaacagctggcgcaatatatccagcaagttgacgaccaggtaaacgaagaactggaaaaagacctgaaagacaacatcgcgctgcgtatgaaaaacttgcaggattcgctgaaaacccaggaagtagtcgcgcaggagcagaaagatctgcgtatccgtcagattcaggaagcgttgcagtatgcgaatcaggcgcaggtgacaaagccacaggttcagcagactgaagatgtgacacaagatacgttgttccttttggggagcgaagcgctggagtcgatgattaagcatgaggcgacccgtccgttggtgttctcaccaaactactatcagactcgtcaaaacctgctggatatcgaaagcttaaaagttgatgatcttgatattcatgcttaccgttatgtaatgaaaccgacgttacctattcgtcgcgatagcccgaaaaaggcaatcaccttgattctggcagtgctgctaggcggtatggtgggcgcggggattgtgttggggcgtaacgctctgcgtaattacaacgcgaagtaa

SEQ ID NO: 2477 - protein, 344 aa, Escherichia coli
MAIIAKLWRLKIISSVRVMMRVENNNVSGQNHDPEQIDLIDLLVQLWRGKMTIIISVIVAIALAIGYLVVAKEKWTSTAIVTQPDVGQIAGYTNAMNVIYGPAVPKVSDIQTSLIGRYSTAFSALAETLDNQEEPEKLTIEPTVKNQSLPLAVSYVGETAEGAQKQLAQYIQQVDDQVNEELEKDLKDNIALRMKNLQDSLKTQEVVAQEQKDLRIRQIQEALQYANQAQVTKPQVQQTEDVTQDTLFLLGSEALESMIKHEATRPLVFSPNYYQTRQNLLDIESLKVDDLDIHAYRYVMKPTLPIRRDSPKKAITLILAVLLGGMVGAGIVLGRNALRNYNAK

SEQ ID NO: 2478 - DNA, 984 bp, Escherichia coli O111
  CDS (1)..(984): transl_table=11
atgtctataagtgataacaacatgtccggtcgcagtcacgatccggaacagattgatttgattgatttactcatgcagttatggcgtgggaaggtaacgattattatctgcattgttgtggcaatagcgttggcagtaggctatttggcggtggctaaggagaaatggacctcgatagctatcgttacacaacccgatgctggccagcttgccagctacaataatgctatggatgtactgtttggggctaacgcacccgaaatgacagatgttcaggcgggttttatcgggcgttttagttcggcattttctgcactggctgaaacgttggataaccagcaagaaccggaaaaactttcaattgatgctgctgttaaaggtcagactctgccgttaaaggtttcttataccggcaaaacctctgaagaggcacaaaaaacgctggctcagtatattcaacaagttgatgaaggtgttgctaaagagctcaatgctgacttgtcaatgagtatggaaacaagactggctgatttgcaaaaatctcttgcagcgcaggaggcagtggcgaaagagcagaaaaccctgcgtattgcgcagatgactcaagcacttaaggttgcgcaacagtctaatattaagctaccgcaggtacagcaggttgatcaagtatctcaggattctatgtttatgctgggtagtgaggctctttcctcaatggttgagaacgaagctacacgtcctttgacgttttctgaccagtactaccaaacgcgtcagaatctgttggaggtgcaggcattagaagtggcacctgacagcgtgcacgcctaccgttatgtaatgaaaccaacgttaccgattcgtcgtgacagcccgaaaaaagcgattaccctcgtgctggcagttctgatcggtgggatgattggtgccggtgtggtgcttgggcgaaatgctctgcgcggttacaaagccaaagctgagtaa

SEQ ID NO: 2479 - protein, 327 aa, Escherichia coli O111
MSISDNNMSGRSHDPEQIDLIDLLMQLWRGKVTIIICIVVAIALAVGYLAVAKEKWTSIAIVTQPDAGQLASYNNAMDVLFGANAPEMTDVQAGFIGRFSSAFSALAETLDNQQEPEKLSIDAAVKGQTLPLKVSYTGKTSEEAQKTLAQYIQQVDEGVAKELNADLSMSMETRLADLQKSLAAQEAVAKEQKTLRIAQMTQALKVAQQSNIKLPQVQQVDQVSQDSMFMLGSEALSSMVENEATRPLTFSDQYYQTRQNLLEVQALEVAPDSVHAYRYVMKPTLPIRRDSPKKAITLVLAVLIGGMIGAGVVLGRNALRGYKAKAE

SEQ ID NO: 2480 - DNA, 984 bp, Salmonella typhimurium
  CDS (1)..(984): transl_table=11
atgacagtggatagtaatacgtcttccgggcgtgggaacgatccggaacagattgatttgattgagttattgctacagttatggcgtgggaagatgaccattattgtagccgttattatcgccattttgctggctgtaggctacctgatgatagccaaagaaaaatggacatccacggcgattattacccaacctgatgccgcgcaggttgccacctataccaacgcgctcaacgtcttgtatggtgggaatgcccccaaaatctctgaagtgcaggcgaattttataagccgctttagctctgcgttttccgcattatcggaagtgctggataatcagaaagagcgggaaaagcttaccattgaacagtcggtaaaagggcaggcgctgccactctcggtttcttatgtgagtactaccgctgaaggggcgcagcgtcggctggcggaatatatccaacaggtggatgaagaggtcgctaaggaactggaagttgacctgaaagataacatcacgctgcaaaccaaaacgttgcaggagtcccttgagacgcaggaagttgtggcgcaggagcaaaaagatctgcgtattaagcaaatcgaagaagcgttgcgctatgcggatgaggccaaaatcacgcagccgcagattcagcaaacccaggatgttacccaggacacgatgttcctgttggggagcgatgcgctaaaatcgatgatacagaacgaagcgacgcgtccactggtcttttctccggcctattaccagacgaagcagacactgctggacattaaaaatctgaaagtgactgccgatacggtgcacgtctatcgttatgtgatgaagccgacgctgccggtccgtcgcgatagcccgaaaacagccattacccttgtgctggctgtattgctgggtgggatgatcggtgccgggattgtgctgggacgcaatgcgctacgtagctataagccaaaagccttgtaa

SEQ ID NO: 2481 - protein, 327 aa, Salmonella typhimurium
MTVDSNTSSGRGNDPEQIDLIELLLQLWRGKMTIIVAVIIAILLAVGYLMIAKEKWTSTAIITQPDAAQVATYTNALNVLYGGNAPKISEVQANFISRFSSAFSALSEVLDNQKEREKLTIEQSVKGQALPLSVSYVSTTAEGAQRRLAEYIQQVDEEVAKELEVDLKDNITLQTKTLQESLETQEVVAQEQKDLRIKQIEEALRYADEAKITQPQIQQTQDVTQDTMFLLGSDALKSMIQNEATRPLVFSPAYYQTKQTLLDIKNLKVTADTVHVYRYVMKPTLPVRRDSPKTAITLVLAVLLGGMIGAGIVLGRNALRSYKPKAL

SEQ ID NO: 2482 - DNA, 23 bp, Artificial sequence
  primer
atgcggacttggaaatttccgtc

SEQ ID NO: 2483 - DNA, 24 bp, Artificial sequence
  primer
ttacttcgcgttgtaattgcgtag

SEQ ID NO: 2484 - protein, 326 aa, Artificial sequence
  consensus sequence
  Variant (2)..(2): Xaa in position 2 is any amino acid
  Variant (4)..(5): Xaa in position 4 to 5 is any amino acid
  Variant (7)..(8): Xaa in position 7 to 8 is any amino acid
  Variant (11)..(13): Xaa in position 11 to 13 is any amino acid
  Variant (22)..(22): Xaa in position 22 is any amino acid
  Variant (25)..(25): Xaa in position 25 is any amino acid
  Variant (36)..(37): Xaa in position 36 to 37 is any amino acid
  Variant (40)..(40): Xaa in position 40 is any amino acid
  Variant (43)..(43): Xaa in position 43 is any amino acid
  Variant (46)..(46): Xaa in position 46 is any amino acid
  Variant (50)..(51): Xaa in position 50 to 51 is any amino acid
  Variant (62)..(62): Xaa in position 62 is any amino acid
  Variant (67)..(68): Xaa in position 67 to 68 is any amino acid
  Variant (70)..(70): Xaa in position 70 is any amino acid
  Variant (72)..(72): Xaa in position 72 is any amino acid
  Variant (74)..(74): Xaa in position 74 is any amino acid
  Variant (77)..(77): Xaa in position 77 is any amino acid
  Variant (80)..(80): Xaa in position 80 is any amino acid
  Variant (83)..(85): Xaa in position 83 to 85 is any amino acid
  Variant (88)..(88): Xaa in position 88 is any amino acid
  Variant (90)..(91): Xaa in position 90 to 91 is any amino acid
  Variant (93)..(95): Xaa in position 93 to 95 is any amino acid
  Variant (97)..(97): Xaa in position 97 is any amino acid
  Variant (99)..(99): Xaa in position 99 is any amino acid
  Variant (101)..(101): Xaa in position 101 is any amino acid
  Variant (107)..(107): Xaa in position 107 is any amino acid
  Variant (109)..(109): Xaa in position 109 is any amino acid
  Variant (114)..(114): Xaa in position 114 is any amino acid
  Variant (116)..(116): Xaa in position 116 is any amino acid
  Variant (123)..(124): Xaa in position 123 to 124 is any amino acid
  Variant (127)..(127): Xaa in position 127 is any amino acid
  Variant (129)..(129): Xaa in position 129 is any amino acid
  Variant (133)..(133): Xaa in position 133 is any amino acid
  Variant (138)..(139): Xaa in position 138 to 139 is any amino acid
  Variant (146)..(147): Xaa in position 146 to 147 is any amino acid
  Variant (150)..(150): Xaa in position 150 is any amino acid
  Variant (157)..(158): Xaa in position 157 to 158 is any amino acid
  Variant (160)..(161): Xaa in position 160 to 161 is any amino acid
  Variant (165)..(165): Xaa in position 165 is any amino acid
  Variant (172)..(172): Xaa in position 172 is any amino acid
  Variant (174)..(175): Xaa in position 174 to 175 is any amino acid
  Variant (177)..(177): Xaa in position 177 is any amino acid
  Variant (180)..(180): Xaa in position 180 is any amino acid
  Variant (183)..(183): Xaa in position 183 is any amino acid
  Variant (198)..(198): Xaa in position 198 is any amino acid
  Variant (201)..(201): Xaa in position 201 is any amino acid
  Variant (205)..(205): Xaa in position 205 is any amino acid
  Variant (208)..(209): Xaa in position 208 to 209 is any amino acid
  Variant (211)..(212): Xaa in position 211 to 212 is any amino acid
  Variant (214)..(214): Xaa in position 214 is any amino acid
  Variant (217)..(217): Xaa in position 217 is any amino acid
  Variant (221)..(221): Xaa in position 221 is any amino acid
  Variant (222)..(222): Xaa in position 222 is any or no amino acid
  Variant (229)..(229): Xaa in position 229 is any amino acid
  Variant (235)..(235): Xaa in position 235 is any amino acid
  Variant (238)..(238): Xaa in position 238 is any amino acid
  Variant (242)..(243): Xaa in position 242 to 243 is any amino acid
  Variant (253)..(254): Xaa in position 253 to 254 is any amino acid
  Variant (259)..(259): Xaa in position 259 is any amino acid
  Variant (261)..(261): Xaa in position 261 is any amino acid
  Variant (266)..(267): Xaa in position 266 to 267 is any amino acid
  Variant (269)..(269): Xaa in position 269 is any amino acid
  Variant (271)..(275): Xaa in position 271 to 275 is any amino acid
  Variant (277)..(277): Xaa in position 277 is any amino acid
  Variant (288)..(288): Xaa in position 288 is any amino acid
  Variant (295)..(295): Xaa in position 295 is any amino acid
  Variant (300)..(300): Xaa in position 300 is any amino acid
  Variant (309)..(309): Xaa in position 309 is any amino acid
  Variant (322)..(322): Xaa in position 322 is any amino acid
  Variant (324)..(325): Xaa in position 324 to 325 is any amino acid
MXVXXNXXSGXXXDPEQIDLIXLLXQLWRGKMTIIXXVIXAIXLAXGYLXXAKEKWTSTAIXTQPDXXQXAXYXNAXNVXYGXXXPKXSXXQXXXIXRXSXAFSALXEXLDNQXEXEKLTIEXXVKXQXLPLXVSYVXXTAEGAQXXLAXYIQQVDXXVXXELEXDLKDNIXLXXKXLQXSLXTQEVVAQEQKDLRIXQIXEALXYAXXAXXTXPQXQQTXXDVTQDTXFLLGSXALXSMIXXEATRPLVFSXXYYQTXQXLLDIXXLXVXXXXXHXYRYVMKPTLPXRRDSPKXAITLXLAVLLGGMXGAGIVLGRNALRXYXXK

SEQ ID NO: 2485 - protein, 60 aa, Artificial sequence
  protein pattern
  Variant (4)..(5): Xaa in position 4 to 5 is any amino acid
  Variant (15)..(15): Xaa in position 15 is Pro or Ser
  Variant (16)..(16): Xaa in position 16 is Ala or Asn
  Variant (21)..(21): Xaa in position 21 is Lys or Arg
  Variant (23)..(23): Xaa in position 23 is Asn or Thr
  Variant (28)..(28): Xaa in position 28 is Asp, Glu or Lys
  Variant (29)..(29): Xaa in position 29 is Asn or Ser
  Variant (31)..(31): Xaa in position 31 is Asp or Lys
  Variant (33)..(33): Xaa in position 33 is Asp or Thr
  Variant (34)..(35): Xaa in position 34 to 35 is any amino acid
  Variant (36)..(36): Xaa in position 36 is Asp or Thr
  Variant (37)..(37): Xaa in position 37 is Ile or Val
  Variant (39)..(39): Xaa in position 39 is Ala or Val
  Variant (47)..(47): Xaa in position 47 is any amino acid
  Variant (50)..(50): Xaa in position 50 is Ile or Val
  Variant (57)..(57): Xaa in position 57 is any amino acid
SMIXXEATRPLVFSXXYYQTXQXLLDIXXLXVXXXXXHXYRYVMKPXLPXRRDSPKXAIT

SEQ ID NO: 2486 - protein, 61 aa, Artificial sequence
  protein pattern
  Variant (2)..(2): Xaa in position 2 is Ala, Thr or Val
  Variant (4)..(4): Xaa in position 4 is any or no amino acid
  Variant (6)..(6): Xaa in position 6 is any amino acid
  Variant (7)..(7): Xaa in position 7 is any or no amino acid
  Variant (9)..(9): Xaa in position 9 is any or no amino acid
  Variant (18)..(18): Xaa in position 18 is Asp or Glu
  Variant (21)..(21): Xaa in position 21 is Leu or Val
  Variant (32)..(32): Xaa in position 32 is Ile or Val
  Variant (33)..(33): Xaa in position 33 is Ala or Ser
  Variant (36)..(36): Xaa in position 36 is Ile or Val
  Variant (39)..(39): Xaa in position 39 is Ala or Leu
  Variant (42)..(42): Xaa in position 42 is Ile or Val
  Variant (46)..(46): Xaa in position 46 is any amino acid
  Variant (47)..(47): Xaa in position 47 is Ile or Val
  Variant (58)..(58): Xaa in position 58 is Ile or Val
NXSXGXXNXDPEQIDLIXLLXQLWRGKMTIIXXVIXAIXLAXGYLXXAKEKWTSTAIXTQP

SEQ ID NO: 2487 - protein, 55 aa, Artificial sequence
  protein pattern
  Variant (6)..(6): Xaa in position 6 is Ala or Ser
  Variant (8)..(8): Xaa in position 8 is Ala, Thr or Val
  Variant (13)..(13): Xaa in position 13 is Glu or Lys
  Variant (15)..(15): Xaa in position 15 is any amino acid
  Variant (22)..(22): Xaa in position 22 is Pro or Gln
  Variant (23)..(23): Xaa in position 23 is Ser or Thr
  Variant (26)..(26): Xaa in position 26 is Gly or Asn
  Variant (28)..(28): Xaa in position 28 is Ala, Gln, Ser or Thr
  Variant (32)..(32): Xaa in position 32 is Ala, Ser or Thr
  Variant (37)..(37): Xaa in position 37 is Gly or Ser
  Variant (38)..(38): Xaa in position 38 is Glu, Gln or Thr
  Variant (45)..(46): Xaa in position 45 to 46 is any amino acid
  Variant (49)..(49): Xaa in position 49 is Glu or Gln
AFSALXEXLDNQXEXEKLTIEXXVKXQXLPLXVSYVXXTAEGAQXXLAXYIQQVD

SEQ ID NO: 2488 - protein, 42 aa, Artificial sequence
  protein pattern
  Variant (2)..(2): Xaa in position 2 is any amino acid
  Variant (5)..(5): Xaa in position 5 is Glu, Lys or Arg
  Variant (20)..(20): Xaa in position 20 is Lys or Arg
  Variant (23)..(23): Xaa in position 23 is Glu or Gln
  Variant (27)..(27): Xaa in position 27 is Gln or Arg
  Variant (30)..(30): Xaa in position 30 is Asp or Asn
  Variant (31)..(31): Xaa in position 31 is Glu or Gln
  Variant (33)..(33): Xaa in position 33 is any amino acid
  Variant (34)..(34): Xaa in position 34 is Ile or Val
  Variant (36)..(36): Xaa in position 36 is any amino acid
  Variant (39)..(39): Xaa in position 39 is Ile or Val
QXSLXTQEVVAQEQKDLRIXQIXEALXYAXXAXXTXPQXQQT

SEQ ID NO: 2489 - protein, 21 aa, Artificial sequence
  protein pattern
  Variant (4)..(4): Xaa in position 4 is Ile or Val
  Variant (17)..(17): Xaa in position 17 is Asn or Ser
  Variant (19)..(19): Xaa in position 19 is any amino acid
  Variant (20)..(20): Xaa in position 20 is Ala or Pro
GGMXGAGIVLGRNALRXYXXK

SEQ ID NO: 2490 - protein, 26 aa, Artificial sequence
  protein pattern
  Variant (2)..(2): Xaa in position 2 is any amino acid
  Variant (4)..(4): Xaa in position 4 is Asn or Thr
  Variant (7)..(7): Xaa in position 7 is Leu or Met
  Variant (10)..(10): Xaa in position 10 is Ile or Leu
  Variant (13)..(15): Xaa in position 13 to 15 is any or no amino acid
  Variant (18)..(18): Xaa in position 18 is Ile or Val
  Variant (20)..(20): Xaa in position 20 is Asp or Glu
  Variant (21)..(21): Xaa in position 21 is Ile, Leu or Val
  Variant (23)..(23): Xaa in position 23 is Ala, Glu or Thr
  Variant (24)..(24): Xaa in position 24 is Asn, Ser or Thr
  Variant (25)..(25): Xaa in position 25 is Phe or Leu
AXYXNAXNVXYGXXXPKXSXXQXXXI

SEQ ID NO: 2491 - protein, 15 aa, Artificial sequence
  protein pattern
  Variant (2)..(2): Xaa in position 2 is Ile or Val
  Variant (7)..(7): Xaa in position 7 is Leu or Met
  Variant (13)..(13): Xaa in position 13 is Asp or Glu
DXTQDTXFLLGSXAL

SEQ ID NO: 2492 - protein, 13 aa, Artificial sequence
  protein pattern
  Variant (2)..(2): Xaa in position 2 is Ala or Asn
  Variant (3)..(3): Xaa in position 3 is any amino acid
  Variant (7)..(7): Xaa in position 7 is any amino acid
VXXELEXDLKDNI

SEQ ID NO: 2493 - DNA, 882 bp, Escherichia coli K12
  CDS (1)..(882): transl_table=11
atgaaaatgcgtaaaggtattattttagcgggtggttctggtacacgtctttatcctgtgactatggctgtcagtaaacagctattacctatttatgataaaccgatgatctattacccgctctctacactgatgttggcgggtattcgcgatattttgattatcagtacacctcaggatactcctcgttttcaacaattgctgggtgacggtagccagtggggcctgaatcttcagtacaaagtgcaacctagcccagatggcctcgcgcaggcatttatcatcggtgaagagtttattggtggtgatgattgtgctttggttcttggtgataatatcttttacggtcacgatctgccgaagctaatggaggccgctgttaacaaagaaagtggtgcaacggtatttgcctatcacgttaatgatccagaacgctatggtgtcgttgagtttgataaaaacggtacggcaatcagtctggaagaaaaaccgttagaaccaaagagtaattacgccgttacaggtctgtacttttatgataacgacgtggttcagatggcgaaaaacttgaagccgtctgcacgtggtgagttagaaattacagatattaaccgtatttatcttgagcagggacgtctgtctgtcgcgatgatggggcgtggctacgcgtggctggacacggggactcatcagagtctgatagaagcaagtaattttattgcgacaattgaagagcgccagggattgaaggtttcctgtcctgaagagattgcatttcgtaaaggttttattgatgttgagcaagtaagaaaattagctgtaccactaataaagaataattatgggcagtatctttataaaatgacgaaggattcaaattaa

SEQ ID NO: 2494 - protein, 293 aa, Escherichia coli K12
MKMRKGIILAGGSGTRLYPVTMAVSKQLLPIYDKPMIYYPLSTLMLAGIRDILIISTPQDTPRFQQLLGDGSQWGLNLQYKVQPSPDGLAQAFIIGEEFIGGDDCALVLGDNIFYGHDLPKLMEAAVNKESGATVFAYHVNDPERYGVVEFDKNGTAISLEEKPLEPKSNYAVTGLYFYDNDVVQMAKNLKPSARGELEITDINRIYLEQGRLSVAMMGRGYAWLDTGTHQSLIEASNFIATIEERQGLKVSCPEEIAFRKGFIDVEQVRKLAVPLIKNNYGQYLYKMTKDSN

SEQ ID NO: 2495 - DNA, 882 bp, escherichia coli
  CDS (1)..(882)
atgaaaggtattatcctggcgggcggttccggcacccgattgcatccgattacgcgcggcgtatcgaagcaactgttgccgatttacgataagccaatgatttactatccgctgtcggtgctgatgctggccggtatccgcgaaattctcatcatcactacgccggaagataaaggttatttccagcgcctgctgggcgatggtagtgagttcggtatccagctggaatatgccgaacagcccagcccggacggtctggcgcaggcctttatcatcggtgaaaccttccttaatggtgaaccttcttgtctggtgctgggcgataacatcttcttcggtcagggcttcagtccgaagctgcgtcatgttgcggcgcgcaccgaaggggcgacggtttttggctatcaggtgatggacccggaacgctttggcgtggtggagtttgacgacaatttccgcgctatctcgctggaagaaaagccaaaacagccgaagtcaaactgggcggtgaccgggctttatttctacgacagtaaagtcgtggagtacgcaaagcaggtgaagccgtcggagcgtggtgaactggagattacctccatcaaccagatgtacctcgaggcgggcaacctgaccgttgaactgctcgggcgcggatttgcctggctggataccggcactcacgacagcctgattgaagccagcacctttgtacagacggtggaaaaacgccagggctttaagattgcctgcctggaagagattgcctggcgtaacggctggctcgatgacgagggtgtgaagcgtgctgccagttcattagcgaaaactggctacggccaatatctgctggagttacttcgtgcccgtccgcgccagtattga

SEQ ID NO: 2496 - protein, 293 aa, escherichia coli
MKGIILAGGSGTRLHPITRGVSKQLLPIYDKPMIYYPLSVLMLAGIREILIITTPEDKGYFQRLLGDGSEFGIQLEYAEQPSPDGLAQAFIIGETFLNGEPSCLVLGDNIFFGQGFSPKLRHVAARTEGATVFGYQVMDPERFGVVEFDDNFRAISLEEKPKQPKSNWAVTGLYFYDSKVVEYAKQVKPSERGELEITSINQMYLEAGNLTVELLGRGFAWLDTGTHDSLIEASTFVQTVEKRQGFKIACLEEIAWRNGWLDDEGVKRAASSLAKTGYGQYLLELLRARPRQY

SEQ ID NO: 2497 - DNA, 867 bp, Listeria monocytogenes
  CDS (1)..(867)
atgaaaggtataattttagcaggaggaagtggaactagactttatccacttacaaaagcaatttcgaaacaaatgttaccaatttatgataagccgatgatttattatccgctatcgatcctaatgttagcaggtattaaagatattttaattatttcaaccccagaagatactccacgctttgagcaattattagctgatagcgatcaactgggtattaatatttcttatgcggttcaagaaaaaccggaaggattagcacaagcgtttattattgctgaagattttattggggatgattcggtttcgcttatacttggagataatatttattacggacaaggtttatccaaaatgcttcaaagagcatctgctaaaaaagctggagctactgtatttggctaccacgtgaatgatcctgaaagatttggagttgtggagtttgatgaatcaatgaaagctatttccattgaagaaaagcctactgaaccaaaaagtaattatgcggtaactggtctttatttctacgataatcgcgtagtggaaattgcgaaaagcattaaaccatctgaacgtggtgagttagaaatcactgatgttaataagcgttaccttgaactgggagaactagatgtagaacttatgggcagaggatttgcttggttagatacaggaacacatgaatctcttcttgaagcgtctacctttattgaaacaattgaaagaagacaaaacttgaaaatcgcttgtcttgaggaaattgcttatcgaatggggtatattgatgaggctgcagttgaaaaattggcagaaccacttaagaaaaatgcgtatgggcaatatttaatgaaattaattaataaataa

SEQ ID NO: 2498 - protein, 288 aa, Listeria monocytogenes
MKGIILAGGSGTRLYPLTKAISKQMLPIYDKPMIYYPLSILMLAGIKDILIISTPEDTPRFEQLLADSDQLGINISYAVQEKPEGLAQAFIIAEDFIGDDSVSLILGDNIYYGQGLSKMLQRASAKKAGATVFGYHVNDPERFGVVEFDESMKAISIEEKPTEPKSNYAVTGLYFYDNRVVEIAKSIKPSERGELEITDVNKRYLELGELDVELMGRGFAWLDTGTHESLLEASTFIETIERRQNLKIACLEEIAYRMGYIDEAAVEKLAEPLKKNAYGQYLMKLINK

SEQ ID NO: 2499 - DNA, 882 bp, Myxococcus xanthus
  CDS (1)..(882)
atgaagggcatcatcctcgccggtggctcggggacgcggctgtacccactgacgcgcgtggtcagcaagcagttgctgcccgtgcatgacaagccgatgatctactaccccctgagcacactgatgctcgcgggtatccgggacgtgctggtcatctccacgccgcaggacctgccgcgcttccaagaactgctgggcagcggcgaccagtggggcatgcgtttcagctatgcggagcagcccaagccggacggcctggcccaggccttcgtcatcggccgggacttcgtgggcgctgacagcgtgtcgctggtgctgggcgacaacatcttctacggccacggcctgagcgagctggtgaagcgcgcggcgtcgcgtacctcgggagcgacggtgttcgggtactacgtgaaggacccggagcgttacggcgtggtggagctggacgcgaagaaccgagcggtgagcctggaggagaagccgctgaagccgaagtccaactacgccgtcaccgggctgtacttctacgacaaccaggtgctggacatcgccgcgggcctcaagccgagcaagcggggtgagttggagattaccgacgtcaacgcggagtacctgcgacgcggccagctcgacgtggagctcatggggcgtggctacgcgtggctggacaccggcacgcacgagtcgctgatgcaggcgtcgaacttcatcgaaatcatcgagcgccgccagggcctcaaggtgtcgtgcccggaggagattgcgttccgcatgggatacatcggcgcgcagcaactgctgacgctggccgagcccatgctcaagaacgactacggccagtacctgcgggcgctcgcggagaaccggggggccgtttcgtga

SEQ ID NO: 2500 - protein, 293 aa, Myxococcus xanthus
MKGIILAGGSGTRLYPLTRVVSKQLLPVHDKPMIYYPLSTLMLAGIRDVLVISTPQDLPRFQELLGSGDQWGMRFSYAEQPKPDGLAQAFVIGRDFVGADSVSLVLGDNIFYGHGLSELVKRAASRTSGATVFGYYVKDPERYGVVELDAKNRAVSLEEKPLKPKSNYAVTGLYFYDNQVLDIAAGLKPSKRGELEITDVNAEYLRRGQLDVELMGRGYAWLDTGTHESLMQASNFIEIIERRQGLKVSCPEEIAFRMGYIGAQQLLTLAEPMLKNDYGQYLRALAENRGAVS

SEQ ID NO: 2501 - DNA, 885 bp, Proteus mirabilis
  CDS (1)..(885)
atgatgaaaggtattattttagcgggtggctctggtacacgcttacatccgataacgaaaggggtatcgaaacagctgttacctatctatgataaacccatgatctattatccgctctcagtacttatgttagcgggaattcgtgatattttgattatcaccactcctgatgatcttacctcatttcaacgtttattgggtgatggctctgcatttggtgtccatctgcaatataaagttcagccatctcctgatggcttagctcaagcctttattttaggggatgagtttattggtgatgagcactgttgtttagtcttaggcgataatatctattttggtcaagggtttagccccaaactaaaacaagttgctcaacgtcagcggggcgcaacagtatttggttatcaagtgatggatccggagcgcttcggtgttgttgaatttgatgatgatttcaaagtgctgtcaatagaagaaaaacctcaacagcctaaatcgaattgggcggtcactgggctttatttctatgataaccgcgtggttgattttgcgaaaaaggtgaaaccttctgttcgtggtgagcttgagataacctcgattaatcagatgtaccttgagtgtggtgagcttaatgtggagctattgggacgcggttttgcttggttagatacggggactcacgatagtttaattgaagccagtacttttgtacaaaccgttgaaaaacgtcaaggttttaaagtggcgtgtctggaagagatagcttggcgtaatggttggttaactgacgaacaagtcagagaaagcgcaaaatcactcgccaaaacaggttatggccgctatctattggatttattacatgtccgtcctcgccaatattaa

SEQ ID NO: 2502 - protein, 294 aa, Proteus mirabilis
MMKGIILAGGSGTRLHPITKGVSKQLLPIYDKPMIYYPLSVLMLAGIRDILIITTPDDLTSFQRLLGDGSAFGVHLQYKVQPSPDGLAQAFILGDEFIGDEHCCLVLGDNIYFGQGFSPKLKQVAQRQRGATVFGYQVMDPERFGVVEFDDDFKVLSIEEKPQQPKSNWAVTGLYFYDNRVVDFAKKVKPSVRGELEITSINQMYLECGELNVELLGRGFAWLDTGTHDSLIEASTFVQTVEKRQGFKVACLEEIAWRNGWLTDEQVRESAKSLAKTGYGRYLLDLLHVRPRQY

SEQ ID NO: 2503 - DNA, 870 bp, Streptococcus pneumoniae
  CDS (1)..(870)
atgaaaggtattattcttgcaggcggctcaggtacccgcctgtacccacttactcgggctgcgtcaaaacagctgatgccggtttatgataaacctatgatttattatccgttgtcgacattaatgttggctggaattaaagatattttgattatctcaactcctcaagatttgccccggtttaaggacttgctcttggatggttccgaatttgggatcaagctttcctatgcggaacaacctagtcccgatggacttgctcaggcttttcttatcggtgaagaatttatcggtgacgatagtgttgccttgattttgggcgacaatatctatcatggacctggtttgagcaaaatgcttcaaaaggcagcccagaaagagaaaggtgcgactgtttttggctaccaagtgaaggatccagagcgttttggtgtggtcgagtttgatacagacatgaatgccatttccatagaagaaaaaccagagaatcctcgctccaactatgccgtgaccggtctgtatttctatgataatgatgttgtagaaattgctaaaggtattaaaccaagtgcacgtggcgagttagaaattacagatatcaacaaggcttacctaaatcgtggtgacctttctgttgagctgatggggcgtggttttgcctggttggatacgggaacccatgaaagcctgctagaagcttctcagtatatcgaaacagttcaacggatgcagaatgttcaagttgcaaacttggaagaaattgcctatcgcatgggctatatcagttgtgaagatgtgctcgagttggcgcaacctctgaagaagaatgaatacggacaatatttgctccgtttgattggagaagcatag

SEQ ID NO: 2504 - protein, 289 aa, Streptococcus pneumoniae
MKGIILAGGSGTRLYPLTRAASKQLMPVYDKPMIYYPLSTLMLAGIKDILIISTPQDLPRFKDLLLDGSEFGIKLSYAEQPSPDGLAQAFLIGEEFIGDDSVALILGDNIYHGPGLSKMLQKAAQKEKGATVFGYQVKDPERFGVVEFDTDMNAISIEEKPENPRSNYAVTGLYFYDNDVVEIAKGIKPSARGELEITDINKAYLNRGDLSVELMGRGFAWLDTGTHESLLEASQYIETVQRMQNVQVANLEEIAYRMGYISCEDVLELAQPLKKNEYGQYLLRLIGEA

SEQ ID NO: 2505 - DNA, 879 bp, Shigella dysenteriae; strain 1617
  CDS (1)..(879)
atgaaaacgcgtaaaggtattattttagcgggtggctctggtactcgtctttatcctgtgactatggctgtcagtaaacagctattacctatttatgataagccgatgatctattacccgctctctacactgatgttggcgggtattcgcgatattctgattattagtacgccacaggatactcctcgttttcaacaactcctgggtgatggtagccagtgggggttaaatcttcagtacaaagtgcaaccgagtccagatggtcttgcgcaggcatttatcatcggtgaagagtttatcggtggtgatgattgtgctctggttctcggtgataatatcttctacggtcatgatctgccgaagttaatggatgtcgctgtcaacaaagaaagtggtgcaacggtatttgcctatcacgttaatgatcctgaacgctacggtgttgttgagtttgataaaaacggtacggcaatcagcctggaagaaaaaccgctacaaccaaaaagtaattatgcggtaaccgggctttatttctatgataacgacgttgtcgaaatggcgaaaaaccttaagccttctgcccgtggtgaactggaaattaccgatattaaccgtatttatatggagcaggggcgtttatccgttgccatgatgggacgtggttatgcatggctggacacggggacacatcaaagtcttattgaagcaagcaacttcattgcaacaattgaagagcgccaagggttaaaggtatcttgcctggaagagattgcttatcgtaaaggctttattgacgcagagcaggttaatgtattagccgaaccgctaaagaaaaatgcttatggtcagtatctgttgaaaatgattaaaggttattaa

SEQ ID NO: 2506 - protein, 292 aa, Shigella dysenteriae; strain 1617
MKTRKGIILAGGSGTRLYPVTMAVSKQLLPIYDKPMIYYPLSTLMLAGIRDILIISTPQDTPRFQQLLGDGSQWGLNLQYKVQPSPDGLAQAFIIGEEFIGGDDCALVLGDNIFYGHDLPKLMDVAVNKESGATVFAYHVNDPERYGVVEFDKNGTAISLEEKPLQPKSNYAVTGLYFYDNDVVEMAKNLKPSARGELEITDINRIYMEQGRLSVAMMGRGYAWLDTGTHQSLIEASNFIATIEERQGLKVSCLEEIAYRKGFIDAEQVNVLAEPLKKNAYGQYLLKMIKGY

SEQ ID NO: 2507 - DNA, 882 bp, Enterobacter cloacae
  CDS (1)..(882)
atgacgaaacgtaaagggattatattagctggcggatcgggtacacgtctttatcccgtgactatggccgtaagtaagcaattgttgccaatttacgataagccaatgatctattacccgctctctacgcttatgctggcaggtatacgggatattctgattatcagtacgcctcaggacactccgcgttttgaacaactgctcgggaacggtagccagtggggattgcatatccagtacaaagtgcaaccaagtcctgatggactggcacaagcttttattctgggtgaagagtttatcggtgaggataattgtgcgctggtattaggcgataatattttctacggacacgatctccccagactgcttgaaggcgcagcaagccagcaagagggggcgaccgtattcgcctatcatgtcagcgatccggaacgctatggcgtcgttgagtttgataaagacggtactgcaattggtcttgaggagaagcctcagcaacccaagagtaattacgcaataaccggtctttatttttacgacaacgatgtggttgagatggccaaaagtttaacgccgtccgagcgaggtgaactcgaaattaccgacatcaaccgcatctatatgcagcagggacgattgtctgtcgcaatgatgaggcgcggttacgcctggctggataccggaacgcatcagagtatgatcgaagcaagcaattttatcgccacaattgaagagcgacaggggctaaaagtttcatgtcctgaagagattgcgttccgacgaggttttattgatgccgaacaacttcgggtactcgctgaaccattgaaaaagaccgggtatgggcagtatctgctgaatctgaccaagggattagtctga

SEQ ID NO: 2508 - protein, 293 aa, Enterobacter cloacae
MTKRKGIILAGGSGTRLYPVTMAVSKQLLPIYDKPMIYYPLSTLMLAGIRDILIISTPQDTPRFEQLLGNGSQWGLHIQYKVQPSPDGLAQAFILGEEFIGEDNCALVLGDNIFYGHDLPRLLEGAASQQEGATVFAYHVSDPERYGVVEFDKDGTAIGLEEKPQQPKSNYAITGLYFYDNDVVEMAKSLTPSERGELEITDINRIYMQQGRLSVAMMRRGYAWLDTGTHQSMIEASNFIATIEERQGLKVSCPEEIAFRRGFIDAEQLRVLAEPLKKTGYGQYLLNLTKGLV

SEQ ID NO: 2509 - DNA, 882 bp, Pseudomonas aeruginosa PAO1
  CDS (1)..(882): transl_table=11
atgaaacgcaagggcatcatcctcgccggaggctcgggcacccgcctgcacccggcaacgctggccatctccaagcagttgctgccggtgtacgacaagccgatgatctactacccgctcagtaccctgatgctggcgggcatccgcgagatactgatcatctcgaccccacaggacaccccacgcttccagcagttgctgggcgacggttcgaactggggcctggacctgcaatatgccgtgcaaccgtcgccggacggcctggcccaggccttcctgatcggcgagtcgttcatcggcaacgacctcagcgcgctggtcctgggcgacaacctctattacggccacgacttccacgagttgctcggcagcgcttcgcagcgccagaccggcgccagtgtcttcgcctaccacgtgctggacccggagcgctacggcgtggtcgagttcgaccagggcggcaaggccatcagcctggaagagaagccactggagccgaagtcgaactacgcggtcaccggcctgtatttctacgaccagcaggtggtggacatcgccagggacctgaagccttcgccgcgcggcgagctggagatcaccgacgtcaaccgcgcctatctggagcgcggccagctcagcgtggagatcatgggccgcggctacgcctggctggataccggcacccacgattcgctgctcgaggccggccagttcatcgccaccctggagaaccgccagggtctcaaggtggcctgcccggaagagatcgcctaccggcagaagtggatcgacgccgcgcaactggaaaaactcgccgcgccgctggccaagaacggctacggccaatacctcaagcgcctgctgaccgagaccgtgtactga

SEQ ID NO: 2510 - protein, 293 aa, Pseudomonas aeruginosa PAO1
MKRKGIILAGGSGTRLHPATLAISKQLLPVYDKPMIYYPLSTLMLAGIREILIISTPQDTPRFQQLLGDGSNWGLDLQYAVQPSPDGLAQAFLIGESFIGNDLSALVLGDNLYYGHDFHELLGSASQRQTGASVFAYHVLDPERYGVVEFDQGGKAISLEEKPLEPKSNYAVTGLYFYDQQVVDIARDLKPSPRGELEITDVNRAYLERGQLSVEIMGRGYAWLDTGTHDSLLEAGQFIATLENRQGLKVACPEEIAYRQKWIDAAQLEKLAAPLAKNGYGQYLKRLLTETVY

SEQ ID NO: 2511 - DNA, 879 bp, Salmonella enterica subsp. enterica serovar Typhi str. CT18
  CDS (1)..(879): transl_table=11
atgaaaacgcgtaagggcattattttagcgggaggctccggcactcgtctttatccggtgaccatggcggtaagtaagcaattgctaccaatttatgataaaccgatgatttactatcccctttccacacttatgctggcaggcattcgggatatcctgatcatcagtacgccacaggacacgccgcgttttcaacaactgctgggagacggcagccaatgggggctgaatcttcaatataaagtacagccaagtccggatggcttagcacaggcgtttattattggtgaagagttcattggtaataatgattgtgcattagtgctgggtgacaatatcttctatggtcatgatttaccaaagttaatggaagctgccgttaataaagaaagtggtgctaccgtcttcgcttatcatgtaaacgatccagagcgctacggtgtggttgagtttgaccaaaatggcacagccgttagtctggaggaaaaaccgttacaaccgaagagtaattacgcggtaacggggctgtatttttatgataatagcgtggtggagatggcgaaaaatcttaagccttcctctcgcggtgagttagaaatcacggatattaaccgtatctatatggatcagggaagattgtctgtcgctatgatggggcgcggttatgcctggctggatacgggaacgcatcagagtttgatagaggccagtaattttattgcaaccatcgaagaacgccagggtctgaaagtgtcttgcccggaagagatcgcatttcgtaaaaattttataaatgcacaacaggttataaaactggccgggccattatcaaaaaatgattacggcaaatatttgctgaagatggtgaaaggtttataa

SEQ ID NO: 2512 - protein, 292 aa, Salmonella enterica subsp. enterica serovar Typhi str. CT18
MKTRKGIILAGGSGTRLYPVTMAVSKQLLPIYDKPMIYYPLSTLMLAGIRDILIISTPQDTPRFQQLLGDGSQWGLNLQYKVQPSPDGLAQAFIIGEEFIGNNDCALVLGDNIFYGHDLPKLMEAAVNKESGATVFAYHVNDPERYGVVEFDQNGTAVSLEEKPLQPKSNYAVTGLYFYDNSVVEMAKNLKPSSRGELEITDINRIYMDQGRLSVAMMGRGYAWLDTGTHQSLIEASNFIATIEERQGLKVSCPEEIAFRKNFINAQQVIKLAGPLSKNDYGKYLLKMVKGL

SEQ ID NO: 2513 - DNA, 879 bp, Ralstonia solanacearum GMI1000
  CDS (1)..(879): transl_table=11
atgcgtaaaggcattatcctggccggaggctccggcacgcgactctatccgatcacccgctcggtttcgaagcagctgctgccggtgtacgacaagccgatgatctactatccgctgtccacgctgatgctggcggggattcgcgacatcctgatcatctccacgccggaagacacgccgcgcttcaccgacatgctcggcgacggcagcaagtgggggatcaacctgcagtacgcggtgcagccttcgccggatgggctggcgcaggcgttcatcatcgggcgcgatttcgtcggcaacgatccgtcgacgctgatcctcggcgacaacatcttccacggccacgacctcgtggcccagctgacgcgttcggccgagcagcaggcgggcgccaccgtcttcgcctatcacgtccacgatccggagcgctacggcgtggtcgagttcgaccagaacttccgtgcgctctccctggaggagaagccggccaagccgcgttcgcactacgccgttaccgggctgtacttctacgacaaccaggtgtgcgacatcgccgccgacatcaagccgtcggctcgcggcgagctcgagatcacggacgtcaacaagcactacctggcgcagggccagctcgacgtcgagatcatgggccgcggctatgcctggctcgacaccggcacgcacgattcgctgctggaagcggcgatgttcatcgcgacgctgcaaaaccggcaggggctgatggtggcctgccccgaagagatcgcgtaccgcaatcgctggatcagcgccgagcaggttgccgcgctggccaagccgctgagcaagaatggctacggccagtatctgcagcacatcatttcggaaaccgtcaaatga

SEQ ID NO: 2514 - protein, 292 aa, Ralstonia solanacearum GMI1000
MRKGIILAGGSGTRLYPITRSVSKQLLPVYDKPMIYYPLSTLMLAGIRDILIISTPEDTPRFTDMLGDGSKWGINLQYAVQPSPDGLAQAFIIGRDFVGNDPSTLILGDNIFHGHDLVAQLTRSAEQQAGATVFAYHVHDPERYGVVEFDQNFRALSLEEKPAKPRSHYAVTGLYFYDNQVCDIAADIKPSARGELEITDVNKHYLAQGQLDVEIMGRGYAWLDTGTHDSLLEAAMFIATLQNRQGLMVACPEEIAYRNRWISAEQVAALAKPLSKNGYGQYLQHIISETVK

SEQ ID NO: 2515 - DNA, 885 bp, Leptospira interrogans serovar Lai str. 56601
  CDS (1)..(885): transl_table=11
atgaaatctagaaaaggaattatactcgcaggcggttctggaacaagactttatccggtcacatacgtagtttccaaacaacttttaccggtttatgataaaccgatgatctactacccactaacaacgcttatgctagcgggtatcaaagaaatacttttgatttccacacctcaagctactcctatgtataaagaactgttaggagatggaaaacaatggggaatttccatagaatatgcggtacaacccaatccgggaggattggcgcaagcgtattggatcggagaaaatttcgtcaacggacatccgtctgttttgattcttggagataatatctatttcggtcataatcttgcttctcttttagaaaacgcttctaaaaaagagaacggttctactgtgttcgcgtatccggttcatgatccagaaaggtatggagtggtagagtttgattctgaaagacgtgcggtttcgatcgaagaaaaaccttctaaaccgaaatctaattatgcagtcactggattatatttttatgatgaagaagttgttaatatagctaaatctattaaaccttctgcaaggggagaattggagattacagacgtaaataggatttatttagaaagaggaattttaaacgttcaagtgatgggacgagggtatgcttggttggacactgggactcacgaatcacttttagaggcatctgtatttatagaaacgattgaaaaaagacaaggacttaaagttgcctgcccggaagaaattgcgtttagaaaaggttttatagatggatctcaattagaaaaattgataagtcctcttaaaaaaacaggttatggagaatatcttgtaaaagtacttaatgaaaagatttactaa

SEQ ID NO: 2516 - protein, 294 aa, Leptospira interrogans serovar Lai str. 56601
MKSRKGIILAGGSGTRLYPVTYVVSKQLLPVYDKPMIYYPLTTLMLAGIKEILLISTPQATPMYKELLGDGKQWGISIEYAVQPNPGGLAQAYWIGENFVNGHPSVLILGDNIYFGHNLASLLENASKKENGSTVFAYPVHDPERYGVVEFDSERRAVSIEEKPSKPKSNYAVTGLYFYDEEVVNIAKSIKPSARGELEITDVNRIYLERGILNVQVMGRGYAWLDTGTHESLLEASVFIETIEKRQGLKVACPEEIAFRKGFIDGSQLEKLISPLKKTGYGEYLVKVLNEKIY

SEQ ID NO: 2517 - DNA, 882 bp, Pseudomonas putida KT2440
  CDS (1)..(882): transl_table=11
atggctcgtaaaggaattattctggccggcggttcgggtacacgcctgcatccggccacactttcggtttcgaagcagctgctgccggtgtatgacaaaccgatgatctactacccgctgagcaccctgctgctcgctggtatccgggacatcctgatcatttccaccccgcaggacaccccgcgcttcgaacagctgctgggcgatggcagccagtggggcctgaacctgtcatacgcaatacaaccaagcccggatggcttggcgcaagcgttcaccatcggcgctgacttcatcggtaacgacccttctgcgttggttctcggtgacaatattttctacggccatgacttccaggcactgctattgaacgcagataaacgtgaatccggtgcttcagtattcgcttatcatgttcatgacccagaacgctatggcgtagcggagtttgacgatagcggtcgcgtattgtcgctggaagaaaaaccggcagttccaaagtctagctatgcggtcaccggcctgtatttctatgacaatcaggtagtcaatctggctcgcgagctgaagccttccccacgtggcgagctggaaatcaccgacctcaacaacctttacttgcagcagcagcagttgcaggtcgaaatcatgggccgtggctatgcgtggctcgacaccggcacgcacgacagtctgctggaggctagccagtacatcgcaaccatggagcgccgtcagggcttgaaagtcgcctgccctgaggaaatttgctaccgcgctggctggatcaacgctgagcaactcgagtgcctggctcaaccactgctgaaaaacggttatggcaagtatctgcagaacttgctgaaagagaaggtgttctga

SEQ ID NO: 2518 - protein, 293 aa, Pseudomonas putida KT2440
MARKGIILAGGSGTRLHPATLSVSKQLLPVYDKPMIYYPLSTLLLAGIRDILIISTPQDTPRFEQLLGDGSQWGLNLSYAIQPSPDGLAQAFTIGADFIGNDPSALVLGDNIFYGHDFQALLLNADKRESGASVFAYHVHDPERYGVAEFDDSGRVLSLEEKPAVPKSSYAVTGLYFYDNQVVNLARELKPSPRGELEITDLNNLYLQQQQLQVEIMGRGYAWLDTGTHDSLLEASQYIATMERRQGLKVACPEEICYRAGWINAEQLECLAQPLLKNGYGKYLQNLLKEKVF

SEQ ID NO: 2519 - DNA, 882 bp, Nitrosomonas europaea ATCC 19718
  CDS (1)..(882): transl_table=11
atgacacgcagaggcctcatccttgcgggagggtccggtacccggctgcatccggcgacgcttgcactgagcaagcagttgttgccggtattcgacaaacccatgatttattatccgctcagcaccctgatgctggcaggcatacgcgatattctcattatcagcacgccgcaggacacccctcgttttcagcaactgctgggtgacggagaacaatgggggctgaatctgcaatatgccgtgcaaccttcacccgacggcctcgcacaggcttttctgattggcgaggatttcattggtaaccatccttctgcactggtgctgggagataacattttctacggccatgatctccagcgtctgctgactcatgccatgatgcgcaccgaaggagccagcgtattcgcttatcatgtgcatgatccggaacgttatggtgtagtcgagttcaatgcacagggcaaggtattgtcactggaagaaaaaccgatacaaccaagatccagttatgcggtgaccgggctgtatttttatgatacgcaggtcgtcgatcatgccaaagcgctcaaaccttcagcacgcggcgaactggaaatcaccgatctcaaccgtctttatctcgaacagggcaacctcagcgtggaaatcatggggcgcggctacgcctggctggataccggtacgcatgcaaccctgctcgatgccagtcagttcatcgctaccctggaaaaccggcagggtctgaaagttgcctgtccggaagaaattgcctaccggcaaggatggatagatgcagcccggctggaaatgctggcccaattactggctaaaaatggttatggtcagtatctgctgaaaatactcagggaaaatgtgttctga

SEQ ID NO: 2520 - protein, 293 aa, Nitrosomonas europaea ATCC 19718
MTRRGLILAGGSGTRLHPATLALSKQLLPVFDKPMIYYPLSTLMLAGIRDILIISTPQDTPRFQQLLGDGEQWGLNLQYAVQPSPDGLAQAFLIGEDFIGNHPSALVLGDNIFYGHDLQRLLTHAMMRTEGASVFAYHVHDPERYGVVEFNAQGKVLSLEEKPIQPRSSYAVTGLYFYDTQVVDHAKALKPSARGELEITDLNRLYLEQGNLSVEIMGRGYAWLDTGTHATLLDASQFIATLENRQGLKVACPEEIAYRQGWIDAARLEMLAQLLAKNGYGQYLLKILRENVF

SEQ ID NO: 2521 - DNA, 894 bp, Chromobacterium violaceum ATCC 12472
  CDS (1)..(894): transl_table=11
atgaccacaggaaatctggcaatgaaacgaaaaggcatcattctggccggaggctccggcacccggctctacccggccaccatcgccgtcagcaagcaattgctgccgatctacgacaagccgatgatctattacccgctgacgacgctgatgctggccggcattcaggacatcctgatcatctccacgccgcaggacacgccccgcttccagcaactgctgggagacggcagtcaatgggggatcaatctgcaatacgcggtccaacccagtccggacggcctggcccaggccttcctgatcggcgagcgcttcatcgacgggtcaccgtctgcgctggtgctcggcgacaacatcttctacggccatgaattttccggtctgctgcaggcggccaatatccagacctccggcgcgaccgtcttcgcctaccgggtcagcgaccccgaacgctacggcgtggtggagttcgaccagcaaggctgcgccctgagcatcgaagagaaacccgcccagcccaaatcgcactacgcggtgaccggcctgtacttctacgactcgcaggtggtagacatcgcgaagcgcatcaagccctcgccccgaggcgaactggaaatcaccgacgtcaacaatatttacctgcaacagcagcagttgaacgtgcagaccatggggcgcggctatgcctggctggataccggcacccatgaatcgttgctggaggccggccagttcatcgccaccatagagaaccgccagggacaaaaggtggcctgccccgaggagatcgccttccgcaacggctggatagacgaagcccaggtacgccagctggcccagcccttgcagaaaaccggctacggccgctatctgctggcgatgctcagcaactga

SEQ ID NO: 2522 - protein, 297 aa, Chromobacterium violaceum ATCC 12472
MTTGNLAMKRKGIILAGGSGTRLYPATIAVSKQLLPIYDKPMIYYPLTTLMLAGIQDILIISTPQDTPRFQQLLGDGSQWGINLQYAVQPSPDGLAQAFLIGERFIDGSPSALVLGDNIFYGHEFSGLLQAANIQTSGATVFAYRVSDPERYGVVEFDQQGCALSIEEKPAQPKSHYAVTGLYFYDSQVVDIAKRIKPSPRGELEITDVNNIYLQQQQLNVQTMGRGYAWLDTGTHESLLEAGQFIATIENRQGQKVACPEEIAFRNGWIDEAQVRQLAQPLQKTGYGRYLLAMLSN

SEQ ID NO: 2523 - DNA, 894 bp, Burkholderia mallei ATCC 23344
  CDS (1)..(894): transl_table=11
atggcgcgcaagggcattattctggccggcggttccggcacgcggctgtatccgatcacgcatgcggtgtcgaagcagctgttgccggtctacgacaagccgatgatctattacccgctgtcgacgctgatggtggcggacattcgcgatgtgctgatcatctcgacgctgcaggacacgccgcgcttcgaggcgatgctgggtgacggcagccagtgggggatgaacatccgctacgcggtgcagccgtcgccggacgggctcgcgcaggcgttcgtgatcggccgggaattcgtcggccgcgatccgtcgacgctgattctcggcgacaacatcttctatggccacgatctcgcgaagcaactcgatcgggcatcggcgcggcaggcgggtgcgacggtgttcgcataccacgtgcacgatccggagcgctacggcgtcgtcgagttcgacggcgaattccgcgcgctgtcgatcgaggagaagcccgcgaagccgcgctcgaactacgcggtgacggggctgtacttctacgacaaccaggtgtgcgacatcgcggcggacatcaagccgtccgcgcgcggcgagctggagatcacggacgtgaattcccgctatctcgccgcgggtttgctcgacgtcgagatcatgggccgcggctacgcgtggctcgataccggcacgcacgattcgctgatcgaggcggcgacgttcatcgcgacgctgcaaaagcgccaggggctcgtcgtcgcgtgtccggaggagatcgcgtatcggcggcagtggatcgacgcggaacaactgctcaagctcgcacagcctttgtcgaaaaatggctatggccagtacctgaaaaacattcttacggatcaagtcgcatggccatccaagtaa

SEQ ID NO: 2524 - protein, 297 aa, Burkholderia mallei ATCC 23344
MARKGIILAGGSGTRLYPITHAVSKQLLPVYDKPMIYYPLSTLMVADIRDVLIISTLQDTPRFEAMLGDGSQWGMNIRYAVQPSPDGLAQAFVIGREFVGRDPSTLILGDNIFYGHDLAKQLDRASARQAGATVFAYHVHDPERYGVVEFDGEFRALSIEEKPAKPRSNYAVTGLYFYDNQVCDIAADIKPSARGELEITDVNSRYLAAGLLDVEIMGRGYAWLDTGTHDSLIEAATFIATLQKRQGLVVACPEEIAYRRQWIDAEQLLKLAQPLSKNGYGQYLKNILTDQVAWPSK

SEQ ID NO: 2525 - DNA, 894 bp, Burkholderia pseudomallei K96243
  CDS (1)..(894): transl_table=11
atggcgcgcaagggcattattctggccggcggttccggcacgcggctgtatccgatcacgcatgcggtgtcgaagcagctgttgccggtctacgacaagccgatgatctattacccgctgtcgacgctgatggtggcggacattcgcgatgtgctgatcatctcgacgccgcaggacacgccgcgcttcgaggcgatgctgggtgacggcagccagtgggggatgaacatccgctacgcggtgcagccgtcgccggacgggctcgcgcaggcgttcgtgatcggccgggaattcgtcggccgcgatccgtcgacgctgattctcggcgacaacatcttctatggccacgatctcgcgaagcaactcgatcgggcatcggcgcggcaggcgggcgcgacggtgttcgcataccacgtgcacgatccggagcgctacggcgtcgtcgagttcgacggcgaattccgcgcgctgtcgatcgaggagaagcccgcgaagccgcgctcgaactacgcggtgacggggctgtacttctacgacaaccaggtgtgcgacatcgcggcggacatcaagccgtccgcgcgcggcgagctggagatcacggacgtgaattcccgctatctcgccgcgggtttgctcgacgtcgagatcatgggccgcggctacgcgtggctcgataccggcacgcacgattcgctgatcgaggcggcgacgttcatcgcgacgctgcaaaagcgccaggggctcgtcgtcgcgtgtccggaggagatcgcgtatcggcggcagtggatcgacgcggaacaactgctcaagctcgcacagcctttgtcgaaaaatggctatggccagtacctgaaaaacattcttacggatcaagtcgcatggccatccaagtaa

SEQ ID NO: 2526 - protein, 297 aa, Burkholderia pseudomallei K96243
MARKGIILAGGSGTRLYPITHAVSKQLLPVYDKPMIYYPLSTLMVADIRDVLIISTPQDTPRFEAMLGDGSQWGMNIRYAVQPSPDGLAQAFVIGREFVGRDPSTLILGDNIFYGHDLAKQLDRASARQAGATVFAYHVHDPERYGVVEFDGEFRALSIEEKPAKPRSNYAVTGLYFYDNQVCDIAADIKPSARGELEITDVNSRYLAAGLLDVEIMGRGYAWLDTGTHDSLIEAATFIATLQKRQGLVVACPEEIAYRRQWIDAEQLLKLAQPLSKNGYGQYLKNILTDQVAWPSK

SEQ ID NO: 2527 - DNA, 885 bp, Azoarcus sp. EbN1
  CDS (1)..(885): transl_table=11
atgagcgcacgcaaaggcatcatcctcgccggcggctccggcacccggttgcacccggccaccctcgcggtatccaagcagctgctgccggtctatgacaaaccgatgatctattacccgctcagcacactgatgctggccggcatccgcgacatcctggtcatctcgacgccgcaggacacgccgcgtttcgagcagctgctcggcgacggcaagcgctgggggctgagcctgcggtacgcggtgcagccgagcccggacgggctcgcgcaggcctttctgatcggcgaggagttcctcgccggcggccgctcggcgctggtgctcggcgacaacctgttctacggccatgagttttccgactcgctgcggcaagcgggccagcgcgagcgcggggcgacggtgttcgcgtatccggtgcacgatccggagcgctacggcgtcgtcgaattcgatgccgacggccgggcaatgagcctggaggagaaaccggtgcggccgaagagccgttacgcggtgacgggcctgtacttctacgatgagcgcgtcgtcgacatcgcccgttcgctgcggcccagcccgcgcggcgagctcgagatcaccgacgtcaatcgcgagtatctcgaggccggcgcgctcgacgtcgaagtcatggggcggggccatgcgtggctcgacaccggcacgcacgagagcctgctcgacgcgagcctgtttatccagacgatcgagaagcgccaggggctgaaaatcgcgtgtccggaggaaatcgcgtggcgcgcgggctggatcgatgccgaccagctgcaggcgctcgcccggccgctggcgaagaacggctacggccagtatctgcagcgactcctcgacgagcgggtgttctga

SEQ ID NO: 2528 - protein, 294 aa, Azoarcus sp. EbN1
MSARKGIILAGGSGTRLHPATLAVSKQLLPVYDKPMIYYPLSTLMLAGIRDILVISTPQDTPRFEQLLGDGKRWGLSLRYAVQPSPDGLAQAFLIGEEFLAGGRSALVLGDNLFYGHEFSDSLRQAGQRERGATVFAYPVHDPERYGVVEFDADGRAMSLEEKPVRPKSRYAVTGLYFYDERVVDIARSLRPSPRGELEITDVNREYLEAGALDVEVMGRGHAWLDTGTHESLLDASLFIQTIEKRQGLKIACPEEIAWRAGWIDADQLQALARPLAKNGYGQYLQRLLDERVF

SEQ ID NO: 2529 - DNA, 882 bp, Pseudomonas syringae pv. syringae B728a
  CDS (1)..(882): transl_table=11
atggctcgtaaaggaattattctcgccggcggctcgggtacccgtttgcatccggccacgctctctgtctccaaacagttgttgccggtgtacgacaagccgatgatctactacccgctgtgcacgctgttattggccgggatccgtgacattctgatcatctccacgccgcaggacacgccgcgcttctcgcagttgctgggcgacggcagccagtggggactgagcctgacctacgccgttcagccaagtccggacgggctggctcaggcgttcaccatcggcgcagacttcatcggcaacgatgcatcggcgctggtactgggcgacaacattttctacggccatgacttccagtcgctgctgctcaatgccagcaaccgtgagtcgggtgcctcggtcttcgcgtatcacgtgcaggaccccgagcgttatggcgtagccgaattcgatgacagtggccgagtgctgtcgctggaagagaagcccaaggttgccaagtcgaattacgccgtcaccggcttgtacttctacgacaatcaggtggtcgatctggcccgccagttgaagccctccccacgcggcgagctggagatcaccgatctcaacacgctgtacctggagcagaaacagctgcacgtagagatcatgggccgtggctatgcctggctggacaccggcacgcatgacagcctgctggaagccggccagtacatcgccacgctggaaaggcgccagggcttgaaggtcgcctgcccggaagagatctgctatcgcgcgggctggattgatggtgcgcagcttgaaaagcttgcacagccgttgatcaagaatggctacggccagtatttgaagaacgtgctgaaggaaaaggttttctga

SEQ ID NO: 2530 - protein, 293 aa, Pseudomonas syringae pv. syringae B728a
MARKGIILAGGSGTRLHPATLSVSKQLLPVYDKPMIYYPLCTLLLAGIRDILIISTPQDTPRFSQLLGDGSQWGLSLTYAVQPSPDGLAQAFTIGADFIGNDASALVLGDNIFYGHDFQSLLLNASNRESGASVFAYHVQDPERYGVAEFDDSGRVLSLEEKPKVAKSNYAVTGLYFYDNQVVDLARQLKPSPRGELEITDLNTLYLEQKQLHVEIMGRGYAWLDTGTHDSLLEAGQYIATLERRQGLKVACPEEICYRAGWIDGAQLEKLAQPLIKNGYGQYLKNVLKEKVF

SEQ ID NO: 2531 - DNA, 882 bp, Pseudomonas syringae pv. phaseolicola 1448A
  CDS (1)..(882): transl_table=11
atggctcgtaaaggaatcattctggctggcggctcgggtacccgtttgcacccggccacgctctctgtctccaagcagttgttgccggtatacgacaagccgatgatctactacccgctgtgcacgctgttgctggccggtatccgcgatattttgatcatctcgacacctcaggacacgccgcgctttacccagttgctgggcgatggcagccagtggggcctgaacctgtcctatgccgtgcagccaagcccggacggcctggctcaagcgttcaccatcggtgcggacttcattggcaacgatgcgtcggcattggtattgggcgacaacattttctacggccatgacttccagtcgctgctgctcaacgccagtaaccgtgagtcgggagcctcggtgttcgcttatcacgtacaggaccccgaacgttatggcgtggccgagttcgacgacagcggtcgagtgctgtcgctggaagaaaagcccaaggttgccaaatcgaactatgccgtcaccggcctgtatttctacgacaatcaggtggtggatctggctcgtcagttgaagccttctccacgcggcgagctagagattactgatctcaacatgctgtatctggagcagaagcagctgcacgttgagataatgggccgcggctatgcctggctggacactggcacgcatgacagcctgctggaagccggtcagtacatcgccaccctggaaaaacgccagggcctgaaagtcgcctgtcctgaagagatctgctaccgcgcaggctggattgacagcgcacagcttgaaaagcttgcacagccgttgatcaagaatggctacgggcagtatttgaggaatgttctcaaagagcggatattttga

SEQ ID NO: 2532 - protein, 293 aa, Pseudomonas syringae pv. phaseolicola 1448A
MARKGIILAGGSGTRLHPATLSVSKQLLPVYDKPMIYYPLCTLLLAGIRDILIISTPQDTPRFTQLLGDGSQWGLNLSYAVQPSPDGLAQAFTIGADFIGNDASALVLGDNIFYGHDFQSLLLNASNRESGASVFAYHVQDPERYGVAEFDDSGRVLSLEEKPKVAKSNYAVTGLYFYDNQVVDLARQLKPSPRGELEITDLNMLYLEQKQLHVEIMGRGYAWLDTGTHDSLLEAGQYIATLEKRQGLKVACPEEICYRAGWIDSAQLEKLAQPLIKNGYGQYLRNVLKERIF

SEQ ID NO: 2533 - DNA, 891 bp, Dechloromonas aromatica RCB
  CDS (1)..(891): transl_table=11
atgagcagtacacgcaagggcataatactggccggcggggccggtaccagattacatccggcaaccttggcagtttccaagcaactgctcccgatttacgataagccgatgatttattacccgctcagttcgctgatgctggcgggtattcgtgatattttggttatttcaacgccacaagacactccgcgttttcatcagctattgggggacggaagtcagtggggcatcaatttgcagtatgccatccagcctagcccggatggcttggctcaggctttcctgattggttctgatttcgtcggaaatgctgactcagccttggtgctcggtgacaacatattctacggccacgattttcatcatttacttgcgaatgctagccagcgaacaagtggcgcttcggtgttcgcttatcatgtccatgatccggagcgctacggtgtggccgagtttaatgcgcagggtaaagtgctaagtcttgaagaaaagcccaagtgtccgaagtccaactacgcagtgactggcctctacttctacgacaaccaagtcgttgaacttgcaagaagtctcaaaccgtcagcgcgcggagaacttgagattactgacctgaacagcttatatcttgagcaaggtcaactcaatgtagagatcatggggcgtggttatgcatggttggatactgggacgcacgacagtttgctcgaagcagggcagttcatagctaccctggaaaaacgtcagggtctaaaggtcgcctgtccggaagaactggcttatcgccaaggctggattaatgccgaacagctaactgcgctggcagtaccactcgcaaagaatggttatggccaatatttgttggccatgctcaaggataaggtgattggatga

SEQ ID NO: 2534 - protein, 296 aa, Dechloromonas aromatica RCB
MSSTRKGIILAGGAGTRLHPATLAVSKQLLPIYDKPMIYYPLSSLMLAGIRDILVISTPQDTPRFHQLLGDGSQWGINLQYAIQPSPDGLAQAFLIGSDFVGNADSALVLGDNIFYGHDFHHLLANASQRTSGASVFAYHVHDPERYGVAEFNAQGKVLSLEEKPKCPKSNYAVTGLYFYDNQVVELARSLKPSARGELEITDLNSLYLEQGQLNVEIMGRGYAWLDTGTHDSLLEAGQFIATLEKRQGLKVACPEELAYRQGWINAEQLTALAVPLAKNGYGQYLLAMLKDKVIG

SEQ ID NO: 2535 - DNA, 888 bp, Ralstonia eutropha JMP134
  CDS (1)..(888): transl_table=11
gtggtcaatatgcgcaaaggcatcatcctggccgggggttccggcacgcggctctatcccatcacgcggtctgtatcgaagcagctgctgccggtatatgacaagccgatgatctactatccgctgtccacgctgatgctcgcggggattcgggatattctgattatttccacgccggaagatacgccgcgcttttccgacatgctcggtgacggcagcaagtggggtcttaacctccagtatgcagtgcagccgtctcctgacggcctggcccaggcgttcatcatcggtcgcgatttcatcgggaatgacccgtcgacgcttatcctcggcgacaacatctttcatggtcatgatctcgtgagccagctgacgcgctcctcggcccagtcccagggtgcaacggtttttgcgtatcacgtgcatgatcccgagcgatatggtgtcgtcgaattcgaccagaatttccgtgccctatcgctggaagaaaagccgctgaagccgcgttccaattatgcggtgacgggcctgtacttctacgacaaccaggtctgcgatatcgcggctgacatcaagccgtcggcacgcggtgagctcgaaatcaccgatgtcaacaagcagtacctgtcccaaaatcaactcgacgtcgagatcatggggcggggctacgcgtggctggatactggcacgcatgattcgttgctggaagccgcgagctttattgcaacgttgcagaatcggcaggggctgatggtggcgtgtcctgaggagattgcctatcgaagcaaatggatctcagtggaacaggtggcggcgctcgcccagccgctggcaaagaacggatacggtcagtatctgcagcgcatcgtatctgacccggtcaaataa

SEQ ID NO: 2536 - protein, 295 aa, Ralstonia eutropha JMP134
MVNMRKGIILAGGSGTRLYPITRSVSKQLLPVYDKPMIYYPLSTLMLAGIRDILIISTPEDTPRFSDMLGDGSKWGLNLQYAVQPSPDGLAQAFIIGRDFIGNDPSTLILGDNIFHGHDLVSQLTRSSAQSQGATVFAYHVHDPERYGVVEFDQNFRALSLEEKPLKPRSNYAVTGLYFYDNQVCDIAADIKPSARGELEITDVNKQYLSQNQLDVEIMGRGYAWLDTGTHDSLLEAASFIATLQNRQGLMVACPEEIAYRSKWISVEQVAALAQPLAKNGYGQYLQRIVSDPVK

SEQ ID NO: 2537 - DNA, 882 bp, Thiobacillus denitrificans ATCC 25259
  CDS (1)..(882): transl_table=11
atgaagcgcaagggcatcatcctcgccggcggttccggtacccgcctctatccggcgaccctggcagtctcgaagcagctgctgccgatttacgacaagccgatgatctattacccgctcacgacgctgatgctggcggggattcaggacattctcgtcatctcgaccccgcaggacacgccacgcttcgagcagttgctcggcgacggcagtcagtggggcatcaatctgcagtatgcggtccaggccaagcccgaggggctcgcgcaggccttcgtgatcggcgcggacttcgtcggcaacgggccgagtgccctcgtgctcggcgacaatatcttctacggccacgagatgaccgacgatctcgggtcggccagcgtcagggacaccggcgcaacggtcttcgcgtatcgcgtgcacgatccggaacgttacggcgtggttgaattcgacgacgcaggaaacgcgatcagcctggaagaaaagcccgcgcagccgaagtcgcattacgccgtcaccggcctctatttctacgacagccaggtcgtcgacatcgcgcgcaatctcaagccctcggcgcgcggcgaactggaaatcactgacgtcaaccgccactacctcgaagcgggcgagctcaaggtctcgatcatgggccgcggccacgcctggctcgacacgggcacccacgaatcgatgctcgaggcctcgctcttcatcgagacgatcgagaagcgccaggggctcaagatcgcctgcccggaagagattgcgtaccgcaagcgctacatcgacgccgaacaactcgcgaagctggccgcgccgatgaagaagaacggctacggaaggtacctgctggaaattctggacgagcatgtcttctag

SEQ ID NO: 2538 - protein, 293 aa, Thiobacillus denitrificans ATCC 25259
MKRKGIILAGGSGTRLYPATLAVSKQLLPIYDKPMIYYPLTTLMLAGIQDILVISTPQDTPRFEQLLGDGSQWGINLQYAVQAKPEGLAQAFVIGADFVGNGPSALVLGDNIFYGHEMTDDLGSASVRDTGATVFAYRVHDPERYGVVEFDDAGNAISLEEKPAQPKSHYAVTGLYFYDSQVVDIARNLKPSARGELEITDVNRHYLEAGELKVSIMGRGHAWLDTGTHESMLEASLFIETIEKRQGLKIACPEEIAYRKRYIDAEQLAKLAAPMKKNGYGRYLLEILDEHVF

SEQ ID NO: 2539 - DNA, 894 bp, Burkholderia sp. 383
  CDS (1)..(894): transl_table=11
atggcacgcaaaggcatcattctcgccggcggttcaggcacacggctctatccgatcacgcatgcagtatcgaagcaactgctgccggtgtacgacaagccgatgatctactatccgctgtcgacgctgatgattgcaggcatccgggacgtgctgatcatctcgacgccgcaggacaccccgcgcttcgagtcgatgctcggcgacggcggccagtgggggatgaatatccggtatgcgacacagccgtcgccggacgggcttgcgcaagcgttcgtcatcggccgggacttcgttggcaacgagccgtcggcgctcatcctcggcgacaacattttctacgggcacgatctcgcgaagcagctcgagcgggccagcgcgaaggatgcgggcgcgaccgtatttgcgtatcacgttcaggaccctgagcggtatggcgtggtcgagttcgaccgcgaattccgcgcgatatcgattgaagagaagccggcaaagccgcgttcgagctatgcggtcacggggctgtatttctacgacacgcaggtttgcgacatcgcagccgacatcaagccgtcggcgcgcggcgagctcgagatcaccgatgtcaattcgcgctacctggcggcgggccaactcgacgtcgagctcatggggcgcggttatgcgtggctcgatacgggtacgcacgactccttgatcgaggcggcgacgttcatcgcgacgctgcagaagcgtcaggggctcatggtcgcgtgccccgaagagatcgcgtaccgccgcaactggatcgacgcggagcaggtgctgaaactggcacagccgctcgcgaagaacgcctacgggctgtatctccggaacctactcacccatcaggtcgcatggcaatccacgtaa

SEQ ID NO: 2540 - protein, 297 aa, Burkholderia sp. 383
MARKGIILAGGSGTRLYPITHAVSKQLLPVYDKPMIYYPLSTLMIAGIRDVLIISTPQDTPRFESMLGDGGQWGMNIRYATQPSPDGLAQAFVIGRDFVGNEPSALILGDNIFYGHDLAKQLERASAKDAGATVFAYHVQDPERYGVVEFDREFRAISIEEKPAKPRSSYAVTGLYFYDTQVCDIAADIKPSARGELEITDVNSRYLAAGQLDVELMGRGYAWLDTGTHDSLIEAATFIATLQKRQGLMVACPEEIAYRRNWIDAEQVLKLAQPLAKNAYGLYLRNLLTHQVAWQST

SEQ ID NO: 2541 - DNA, 939 bp, Burkholderia thailandensis E264
  CDS (1)..(939): transl_table=11
gtgggtcgaaacgaactacgcgcaacgcgcgtaaaggctgaatcgatggcgcgcaagggcattattctcgccggcggctccggcacgcggctgtatccgatcacgcatgccgtgtcgaagcaattgctgccggtctacgacaagccgatgatctactacccgctgtcgacgctgatggtggcgggcattcgcgacgtgctgatcatctcgacgccgcaggacacgccgcgcttcgagacgatgctgggcgacggcagtcaatgggggatgagcatccgctacgcggtgcagccgtcgccggacgggcttgcgcaggcgttcatcatcggccgggaattcgtcggcaacgatccgtcgacgctgattctcggcgacaacatcttctacggccacgatctcgcgaagcagctcgagcgggcgtcggcgcggcaggcgggcgcgacggtgttcgcgtatcacgtgcacgatccggagcgctacggcgtcgtcgagttcgaccgcgaattccgtgcgctgtcgatcgaggagaagcccgcgaagccgcgctcgaactacgcggtgacggggctgtacttctacgacaaccaggtgtgcgacatcgcggcggacatcaagccgtcgccgcgcggcgagctggagatcacggacgtgaattcccgttatctcgcagcgggctcgctcgacgtcgagatcatgggccgcggctacgcttggctcgataccggcacgcacgattcgctgatcgaggcggcgacgttcatcgcgacgctgcagaagcgccaggggctcgtcgtcgcgtgcccggaggagatcgcgtaccggcggcagtggatcgatcaagagcaactgctcaagctcgcacagcctttgtcgaagaacggctatggccagtatctgaaaaacattctcacggaccaagtcgcatggccatccaagtaa

SEQ ID NO: 2542 - protein, 312 aa, Burkholderia thailandensis E264
MGRNELRATRVKAESMARKGIILAGGSGTRLYPITHAVSKQLLPVYDKPMIYYPLSTLMVAGIRDVLIISTPQDTPRFETMLGDGSQWGMSIRYAVQPSPDGLAQAFIIGREFVGNDPSTLILGDNIFYGHDLAKQLERASARQAGATVFAYHVHDPERYGVVEFDREFRALSIEEKPAKPRSNYAVTGLYFYDNQVCDIAADIKPSPRGELEITDVNSRYLAAGSLDVEIMGRGYAWLDTGTHDSLIEAATFIATLQKRQGLVVACPEEIAYRRQWIDQEQLLKLAQPLSKNGYGQYLKNILTDQVAWPSK

SEQ ID NO: 2543 - DNA, 879 bp, Methylobacillus flagellatus KT
  CDS (1)..(879): transl_table=11
atgagaaaaggcatcatcctcgccggtggatcgggcacccggctttaccctgtcacccaggcagtctccaagcaactgctgcccgtgtatgacaagcccatgatctactatcccttgtccacgctcatgctggctgggatacgcgacatcctcctgatctcaactccgcaggacacaccacgctttgaacagctattgggtgatggcagtcaatggggactcaatattgcctatgcagtacagccctccccagatggattggcccaagcctttatcatcggcaagaaatttattggcaatgatccaagtgccctggtgcttggcgacaacatcttctatggtcatgacctggcacatgacctggcacatgccgatcaacggcagcatggcgccactgtatttgcctaccctgttcacgaccctgaacgttatggcgtggtcgagttcaacgatgctggccaggctatcagcctggaagaaaagcccaaagagccaaaatcccgctatgccgttactggactgtatttctatgacaaccaggtcgttgacattgccgccagcctcaaaccatctcctcgaggcgaacttgaaattaccgatgtcaacaaaatttacctggaaaggcgctccctcaatgtggaattgatggggcgcggtcatgcctggttggatacaggaacgcatgaatccctgctagaagcctcactattcatcgaaaccatagaaaagcgacaaggcctgaaagtcgcctgccccgaagaaatcgcttaccgcaaaggttacatcgatgcagaacaagtagaaaaaattgcccagccatacctcaagaatggttacggccaatatttgatccggatgctgaaagaaaaggtcttttaa

SEQ ID NO: 2544 - protein, 292 aa, Methylobacillus flagellatus KT
MRKGIILAGGSGTRLYPVTQAVSKQLLPVYDKPMIYYPLSTLMLAGIRDILLISTPQDTPRFEQLLGDGSQWGLNIAYAVQPSPDGLAQAFIIGKKFIGNDPSALVLGDNIFYGHDLAHDLAHADQRQHGATVFAYPVHDPERYGVVEFNDAGQAISLEEKPKEPKSRYAVTGLYFYDNQVVDIAASLKPSPRGELEITDVNKIYLERRSLNVELMGRGHAWLDTGTHESLLEASLFIETIEKRQGLKVACPEEIAYRKGYIDAEQVEKIAQPYLKNGYGQYLIRMLKEKVF

SEQ ID NO: 2545 - DNA, 894 bp, Burkholderia xenovorans LB400
  CDS (1)..(894): transl_table=11
atggcgcgtaaaggcattattctcgcgggcggctcgggcacgcgcctgtatccgatcacgcacgtcgtctccaagcagttgctgccggtgtacgacaaaccgatgatctactacccgctgtccacgctgatggtggcgggcatccgcgacgtactgatcatttcgacgccgcaggacacgccgcgcttcgaggcgatgctcggcgacggcagccagtgggggatgaacatccggtatgcggtgcagccttcgccggacggtctcgcgcaggcatttattatcggtcgcgactttgtgggcaacgatccgtcggcgctgattctgggcgacaacatcttctacggtcacgatctggcgaagcagctggaaaacgccgacgggaaaacggaaggcgcgaccgtctttgcgtaccacgtgcaggacccggaacggtatggcgtggtggaattcgaccggcagttccgcgcgctgtcgatcgaggagaagcccgtgaagccgcgttcgaactacgcggtcacgggtctgtacttctacgacaaccaggtctgcgatatcgccgccgacatcaagccgtcgccgcgtggcgagctcgaaatcaccgacgtcaactcgcggtatctcgccaatgcggcgctcaatgtcgagatcatggggcgcggttatgcctggctcgataccggcacgcatgattcgctgatcgaggcggcgacgttcatcgccacgctgcagaaacgtcaggggctcgtggtcgcatgtcccgaggaaatcgcataccggcagcggtggatcgacggcgagcaactgcaggcgctcgcccaaccactcgcgaagaacgcttacggcaagtacctgcaaaaccttcttacggatcaagtggcgtggctgtccaggtaa

SEQ ID NO: 2546 - protein, 297 aa, Burkholderia xenovorans LB400
MARKGIILAGGSGTRLYPITHVVSKQLLPVYDKPMIYYPLSTLMVAGIRDVLIISTPQDTPRFEAMLGDGSQWGMNIRYAVQPSPDGLAQAFIIGRDFVGNDPSALILGDNIFYGHDLAKQLENADGKTEGATVFAYHVQDPERYGVVEFDRQFRALSIEEKPVKPRSNYAVTGLYFYDNQVCDIAADIKPSPRGELEITDVNSRYLANAALNVEIMGRGYAWLDTGTHDSLIEAATFIATLQKRQGLVVACPEEIAYRQRWIDGEQLQALAQPLAKNAYGKYLQNLLTDQVAWLSR

SEQ ID NO: 2547 - DNA, 879 bp, Burkholderia xenovorans LB400
  CDS (1)..(879): transl_table=11
atgcgtaaaggcattatcctagccggtgggtccggcacgcgtctttacccgatcacgcggtcggtgtcgaagcaactgctacccgtctacgacaagccgatgatctactatccgctgtcgacgctgatgctggcgggtattcgcgacatccttgtgatctccacggcggaagatacgccgcgttttgcagagatgctcggcgacggcagcgcttggggcatcgatctgcaatacgccgtgcagccttcgcccgatggacttgcgcaggcctttattatcggccgtgaattcatcggctctgatccttgcacgttgattctcggcgacaacattttccacgggcatgatctcgtgcgtcagctgacacgtgcggggcagtccgagcagggcgcgactgtattcgcctatcacgtgcacgatccggagcgttatggggtagttgagttcgacgagaatttccacgcgctatcgctggaagaaaagccgctcaagccgcgctccaattatgcggtgactggtctttatttctacgacaaccaggtctgcgacattgcagctgacgtcaagccgtcagcacgtggcgagctcgaaatcacggatgtcaacaaacgatatctggaaatagctcagctcgacgttgagatcatggggcgtggatatgcgtggctggatacaggcacgcacgattcgctgcttgaggccgccagtttcatagcgacgctgcagagtcggcaggggctgatggtggcctgcccggaagagattgcgtaccgcagccattggatcagtgccgaacaggtcgaacgcctcgctggaccgcttgccaaaaatcgatacggccaatacctgaaacagatcatttcggaagcagttaaatga

SEQ ID NO: 2548 - protein, 292 aa, Burkholderia xenovorans LB400
MRKGIILAGGSGTRLYPITRSVSKQLLPVYDKPMIYYPLSTLMLAGIRDILVISTAEDTPRFAEMLGDGSAWGIDLQYAVQPSPDGLAQAFIIGREFIGSDPCTLILGDNIFHGHDLVRQLTRAGQSEQGATVFAYHVHDPERYGVVEFDENFHALSLEEKPLKPRSNYAVTGLYFYDNQVCDIAADVKPSARGELEITDVNKRYLEIAQLDVEIMGRGYAWLDTGTHDSLLEAASFIATLQSRQGLMVACPEEIAYRSHWISAEQVERLAGPLAKNRYGQYLKQIISEAVK

SEQ ID NO: 2549 - DNA, 894 bp, Burkholderia xenovorans LB400
  CDS (1)..(894): transl_table=11
atggcgcgtaaaggcattattctcgcgggcggctcgggcacgcgcctgtatccgatcacgcacgtcgtctccaagcagttgctgccggtgtacgacaaaccgatgatctactacccgctgtccacgctgatggtggcgggcatccgcgacgtactgatcatttcgacgccgcaggacacgccgcgcttcgaggcgatgctcggcgacggcagccagtgggggatgaacatccggtatgcggtgcagccttcgccggacggtctcgcgcaggcatttattatcggtcgcgactttgtgggcaacgatccgtcggcgctgattctgggcgacaacatcttctacggtcacgatctggcgaagcagctggaaaacgccgacgggaaaacggaaggcgcgaccgtctttgcgtaccacgtgcaggacccggaacggtatggcgtggtggaattcgaccggcagttccgcgcgctgtcgatcgaggagaagcccgtgaagccgcgttcgaactacgcggtcacgggtctgtacttctacgacaaccaggtctgcgatatcgccgccgacatcaagccgtcgccgcgtggcgagctcgaaatcaccgacgtcaactcgcggtatctcgccaatgcggcgctcaatgtcgagatcatggggcgcggttatgcctggctcgataccggcacgcatgattcgctgatcgaggcggcgacgttcatcgaaacactgcagaaacgtcaaggtctggtggtggcgtgtccggaagagattgcgttccgccaacagtggatcgatgaggagaggttgcttcaacttgcgaagccactttccaagaatgcgtatggccaatatctgctcaatcttccgcaagatcaggtggcatggccggcccgttga

SEQ ID NO: 2550 - protein, 297 aa, Burkholderia xenovorans LB400
MARKGIILAGGSGTRLYPITHVVSKQLLPVYDKPMIYYPLSTLMVAGIRDVLIISTPQDTPRFEAMLGDGSQWGMNIRYAVQPSPDGLAQAFIIGRDFVGNDPSALILGDNIFYGHDLAKQLENADGKTEGATVFAYHVQDPERYGVVEFDRQFRALSIEEKPVKPRSNYAVTGLYFYDNQVCDIAADIKPSPRGELEITDVNSRYLANAALNVEIMGRGYAWLDTGTHDSLIEAATFIETLQKRQGLVVACPEEIAFRQQWIDEERLLQLAKPLSKNAYGQYLLNLPQDQVAWPAR

SEQ ID NO: 2551 - DNA, 879 bp, Ralstonia metallidurans CH34
  CDS (1)..(879): transl_table=11
atgcgcaaaggcattattctggccggcggttccggcactcggctctatcccatcacgcggtcggtgtccaaacaactgctgcccgtgtacgacaagccgatgatttactatccgctgtccacgctgatgctggccgggattcgggacgtccttatcatctccacgccggaagacacgcctcgcttctcggaaatgcttggtgatggcagcaattggggcatcaatctgcaatacgcggtgcaaccgtcgccggatgggcttgcccaggcgttcatcattgggcgcgatttcatcggtaacgacccgtcgacgttgatcctgggggataacatcttccacggacacgacctggttcgtcagctcgagcgttcgtcagcacagcagcagggcgcgacggtctttgcctatcacgtgcacgaccccgagcgctatggcgtggtggagttcgatgaaaactttcgcgcggtgtcgctcgaggaaaaaccagcgaagcctcgctcgcactatgccgtgaccggcctgtatttctacgacaaccaggtttgtgatattgccgccgagatcaagccgtcagcgcggggcgaactcgagattacggatgtcaacaagcgctatctggaaatgtcgcagcttgaggtcgagatcatgggacgcggttacgcatggctcgataccggcacccacgactcgttgctcgaggcagcgagcttcatagccacgctgcagaaccgtcagggactgatggtggcttgtccggaggagattgcctatcggagcaagtggatttccgccgagcaggttgagcgtctggcgaagccactgctaaagaacgcttacggcaagtatcttcagcacatcatttcggaaacaatcaaatga

SEQ ID NO: 2552 - protein, 292 aa, Ralstonia metallidurans CH34
MRKGIILAGGSGTRLYPITRSVSKQLLPVYDKPMIYYPLSTLMLAGIRDVLIISTPEDTPRFSEMLGDGSNWGINLQYAVQPSPDGLAQAFIIGRDFIGNDPSTLILGDNIFHGHDLVRQLERSSAQQQGATVFAYHVHDPERYGVVEFDENFRAVSLEEKPAKPRSHYAVTGLYFYDNQVCDIAAEIKPSARGELEITDVNKRYLEMSQLEVEIMGRGYAWLDTGTHDSLLEAASFIATLQNRQGLMVACPEEIAYRSKWISAEQVERLAKPLLKNAYGKYLQHIISETIK

SEQ ID NO: 2553 - DNA, 882 bp, Pseudomonas aeruginosa UCBPP-PA14
  CDS (1)..(882)
atgaaacgcaagggcatcatcctcgccggaggctcgggcacccgcctgcacccggcaacgctggccatctccaagcagctgctgccggtgtacgacaagccgatgatctactacccgctcagtaccctgatgctggcgggcatccgcgagatactgatcatctcgaccccacaggacaccccacgcttccagcagttgctgggcgacggttcgaactggggcctggacctgcaatatgccgtgcaaccgtcgccggacggcctggcccaggccttcctgatcggcgagtcgttcatcggcaacgacctcagcgcgctggtcctgggcgacaacctctattacggccacgacttccacgagttgctcggcagcgcttcgcagcgccagaccggcgccagcgtcttcgcctaccacgtgctggacccggagcgctacggcgtggtcgagttcgaccagggcggcaaggccatcagcctggaagagaagccactgaagccgaagtcgaactacgcggtcaccggcctgtatttctacgaccagcaggtggtggacatcgcgagggacctgaagccttcgccgcgcggcgagctggagatcaccgacgtcaaccgcgcctacctggagcgcggccagctcagcgtggagatcatgggccgcggctacgcctggctggataccggcacccacgattcgctgctcgaggccggccagttcatcgccaccctggagaaccgccagggactcaaggtggcctgcccggaagagatcgcctaccggcagaagtggatcgacgccgcgcaactggaaaaactcgccgcgccgctggccaagaacggctacggccaatacctcaagcgcctgctgaccgagaccgtgtactga

SEQ ID NO: 2554 - protein, 293 aa, Pseudomonas aeruginosa UCBPP-PA14
MKRKGIILAGGSGTRLHPATLAISKQLLPVYDKPMIYYPLSTLMLAGIREILIISTPQDTPRFQQLLGDGSNWGLDLQYAVQPSPDGLAQAFLIGESFIGNDLSALVLGDNLYYGHDFHELLGSASQRQTGASVFAYHVLDPERYGVVEFDQGGKAISLEEKPLKPKSNYAVTGLYFYDQQVVDIARDLKPSPRGELEITDVNRAYLERGQLSVEIMGRGYAWLDTGTHDSLLEAGQFIATLENRQGLKVACPEEIAYRQKWIDAAQLEKLAAPLAKNGYGQYLKRLLTETVY

SEQ ID NO: 2555 - DNA, 885 bp, Burkholderia vietnamiensis G4
  CDS (1)..(885): transl_table=11
atgacccaacgaaaaggcatcatcctcgccggaggctccggcacccggctgcacccggccacgctggccatcagcaaacaactgctgccggtgtacgacaagcctatgatctattacccgctgagcaccctcatgcttgcgggcatgcgagatgtgctcgtgatcagcacgccgcaagacaccccccgcttccagcaactgctgggtgacggctcgcagtggggcatgaacctccagtatgccgtgcaacccagccccgacggcttggcgcaggccttcatcattggtgaacagttcattggcaacgctcccagcgcgctggtgctgggcgacaacatctactacgggcacgacttccagcccctgctcaaagcggccgatgcgcaatcgagcggcgccaccgtgtttgcctaccacgtacatgaccccgagcgctatggcgtggtccagttcaacgcccagggtcaggccgtcagcatcgaagaaaagcccaaggccccaaagagcaactacgccgtcaccggtctgtacttttacgaccagcaggtggtggacattgccaaggccgtgaagcccagcgcgcggggcgagctggaaatcaccagcgtcaatcaggcctacatgcagcaaggccagttgaacgtgcaaaccatgggccgtggctacgcctggctggacaccggcacccacgacagcctgctcgatgccagccagttcattgcaaccctagaaaaccgccaaggcctcaaagtggcctgcccggaggaaattgcctggcgtagcggctggatcaacgccagccagctcgaagccctagtccagccgcttaccaaaaatggctacggccaatacctgatgcagatcttgaaagagaccgtcttctaa

SEQ ID NO: 2556 - protein, 294 aa, Burkholderia vietnamiensis G4
MTQRKGIILAGGSGTRLHPATLAISKQLLPVYDKPMIYYPLSTLMLAGMRDVLVISTPQDTPRFQQLLGDGSQWGMNLQYAVQPSPDGLAQAFIIGEQFIGNAPSALVLGDNIYYGHDFQPLLKAADAQSSGATVFAYHVHDPERYGVVQFNAQGQAVSIEEKPKAPKSNYAVTGLYFYDQQVVDIAKAVKPSARGELEITSVNQAYMQQGQLNVQTMGRGYAWLDTGTHDSLLDASQFIATLENRQGLKVACPEEIAWRSGWINASQLEALVQPLTKNGYGQYLMQILKETVF

SEQ ID NO: 2557 - DNA, 894 bp, Burkholderia vietnamiensis G4
  CDS (1)..(894): transl_table=11
atggcacgcaagggcatcattctcgccggcggttcaggcacacggctctatccgatcacgcacgcagtatcgaagcaactgctgccggtgtacgacaagccaatgatctactatccgctgtcgacgctgatgattgcaggcatccgggacgtgctgatcatctcgacgccgcaggacaccccgcgcttcgagtcgatgctcggcgacggcagccagtgggggatgaatatccagtatgcgacgcagccgtcgccggacgggctcgcgcaagcgttcgtcattggccgggacttcgttggcaacgagccgtcggcgctcatcctcggcgacaacattttctacgggcacgatctcgcgaagcagctcgagcgagccagcgcgaaggatacgggcgcgaccgtatttgcgtatcacgttcaggaccccgagcggtatggcgtggtcgagttcgatcgcgaattccgcgcgatatcgattgaagagaagccggcaaagccgcgttcgagctatgcggtcacggggctgtatttctacgacaggcaggtttgcgacatcgcagccgacatcaagccgtcggcgcgcggcgagctcgagatcaccgatgtcaattcgcgctacctggcggcgggccagctcgacgtcgagctcatggggcgcggttatgcgtggctcgatacgggtacgcacgattccttgatcgaggcggggacgttcatcgcgacgctgcagaagcgtcaggggctcatggttgcgtgtcccgaagagatcgcgtaccgccgcaactggatcgacgcggagcaggtgctgaaactggcacagccgctcgcgaagaacgcatacgggcagtatctccggaacctactcacccatcaagtcgcatggcaatccacgtaa

SEQ ID NO: 2558 - protein, 297 aa, Burkholderia vietnamiensis G4
MARKGIILAGGSGTRLYPITHAVSKQLLPVYDKPMIYYPLSTLMIAGIRDVLIISTPQDTPRFESMLGDGSQWGMNIQYATQPSPDGLAQAFVIGRDFVGNEPSALILGDNIFYGHDLAKQLERASAKDTGATVFAYHVQDPERYGVVEFDREFRAISIEEKPAKPRSSYAVTGLYFYDRQVCDIAADIKPSARGELEITDVNSRYLAAGQLDVELMGRGYAWLDTGTHDSLIEAGTFIATLQKRQGLMVACPEEIAYRRNWIDAEQVLKLAQPLAKNAYGQYLRNLLTHQVAWQST

SEQ ID NO: 2559 - DNA, 1995 bp, Alkalilimnicola ehrlichei MLHE-1
  CDS (1)..(1995): transl_table=11
atgatcggcgctacgccatcgacgacagccggatcagccaggaactcgactggcagccgcaggagagcttcgaatcgggcctgcgccgaaccgtcgagtggtacctggagaacaccgagtgggtgcagcgggtgcaaagcggcgcctaccgggaatggctggagaccaactacggccatcgcggggtggccgaatgaggacactgctcttcggccccaatggacaggtgggctgggaactgcgccgttcgctggcgcccctgggggagctgatccccctcggccgtcacgaatggcagggcctgcggggcgatctcaccgacaaggatgccatcgcccacgccatccgctcactgcgcccggatctcatcgtgaacgcggcggcctacaccgccgtggaccaggccgagtccgaacccgaacaagcgcggctgatcaacgccaccgcacccggcgtcatggccgagctcgcccgcgagcagcaagccctgttcatccactactccacggactacgtcttcgacggcagcggcgaccgcccgtggcacgaggacgacccaacggcccccttaaatgtctatggccagaccaagcgggaaggcgaggaggccgttcgcgccgcggacggccaccacctcatcttccgcaccgcctgggtctatgccgcccggggccacaacttcatccgcaccatgatccgcctggcttgccaacgcgacaccctgcaagtcatcaacgaccagcacggcgcacccaccggggcggaactcatcgccgacgtcacggcgcacgccgcacgcaccgcatcaacccgccccgacctgcgcggcacctaccacctgaccgccgccggcgagaccacctggcacgggtacgcccgcttcgtcatcgaacaggcccgcgcgggcggcgcacccgtacgcgtcgccccggaggccatcgaagccgtcgctaccgacgccttccccacggtcgcccgccgcccgcacaactcacggctggacggtcacaagctggaaaccaccttcggcctaaagcgccccgactggcgcagcggcgtcgcccgggcgctacaggaaatggacatctcgcacacccaggggaggcccgactgatgaaccgcaagggcatcatcctggccgggggcagcggcacgcgactgcatccggccacgcttgccatcagcaagcaactactgccagtctacgacaagccgatgatctactacccgctcagcaccctgatgctggcgggtattcgcgatatcctcatcatctccaccccgcaggacaccccgcgcttcgagcaactgctgggcgatggcgagcagtgggggcttaacctgaactacgccgtgcaaccctcgccggacggtctggcccaggcgttcatcatcggcgaggcgttcatcggcgacgacccctgcgccctggtcctgggcgacaacatcttctacggccaccatttcgacgagctgctcggcaacgccatggaacgcgaggacggcgcaacggtcttcgcctaccacgtccacgacccggaacgctacggcgtggccgagttcgaccgcgacggcaaggtgctctccctggaggaaaagcccgagcgaccgaaatccagctacgccgtcaccggcctgtacttctacgacaacgacgtggtcgacatggcgaaggatctaaagccctccgcccgcggcgagctggagatcaccgacctcaacatcgcctacatgaacgccggcaagctcgacgtggcgatcatgggccgcggctacgcctggctggacactggcacgcacgactccctgctggacgccagccagtttatcgccaccctcgaacaccgccagggccttaaggtcgcctgcccggaagagattgcctaccgccgcggctggatcaccgccgagacccttgagggcctggcccaaccgctgctcaaaaacggctacggccaatacctccggcgcgtgctgcaagacaccgtattctga

SEQ ID NO: 2560 - protein, 664 aa, Alkalilimnicola ehrlichei MLHE-1
MIGATPSTTAGSARNSTGSRRRASNRACAEPSSGTWRTPSGCSGCKAAPTGNGWRPTTAIAGWPNEDTALRPQWTGGLGTAPFAGAPGGADPPRPSRMAGPAGRSHRQGCHRPRHPLTAPGSHRERGGLHRRGPGRVRTRTSAADQRHRTRRHGRARPRAASPVHPLLHGLRLRRQRRPPVARGRPNGPLKCLWPDQAGRRGGRSRRGRPPPHLPHRLGLCRPGPQLHPHHDPPGLPTRHPASHQRPARRTHRGGTHRRRHGARRTHRINPPRPARHLPPDRRRRDHLARVRPLRHRTGPRGRRTRTRRPGGHRSRRYRRLPHGRPPPAQLTAGRSQAGNHLRPKAPRLAQRRRPGATGNGHLAHPGEARLMNRKGIILAGGSGTRLHPATLAISKQLLPVYDKPMIYYPLSTLMLAGIRDILIISTPQDTPRFEQLLGDGEQWGLNLNYAVQPSPDGLAQAFIIGEAFIGDDPCALVLGDNIFYGHHFDELLGNAMEREDGATVFAYHVHDPERYGVAEFDRDGKVLSLEEKPERPKSSYAVTGLYFYDNDVVDMAKDLKPSARGELEITDLNIAYMNAGKLDVAIMGRGYAWLDTGTHDSLLDASQFIATLEHRQGLKVACPEEIAYRRGWITAETLEGLAQPLLKNGYGQYLRRVLQDTVF

SEQ ID NO: 2561 - DNA, 903 bp, delta proteobacterium MLMS-1
  CDS (1)..(903): transl_table=11
atgagtacgcagcatacgcagagtacgcgcaagggaatcattctggcggggggctccggcacccggctttatccggtgaccagggcggtatccaagcagttgctgcccatttatgacaagccgatgatctattacccccttagcacattgatgctggcggggattcgggatattctgctgatcaccaccccacacgaggcccccctttttcagaccctgctgggggatggcagcgcctgggggcttaatctgcaatacgcggtgcagccttcgccggatggcttggcccaggcctttatcatcggccgggagtttgtcggcaactcgccctcggccttgattctgggcgacaatatcttttatggtcacgatctttatctgcaactgcagcgggcggtggggcaagccgacggggccacggtgtttgcctaccatgtgcaggatcctcaacgatacggggtggtctctttcgacgcggcgggcaaggccacgtcgctggaagagaagccggcccggcccaagagcaactacgcggtaaccggcctttacttttacgatgccgatgtggtggagattgccgccggtttgaaaccttcggcccggggggagttggagataaccgatgtcaaccgggcttatctggagcagggccggctggcggtggagattatggggcgcggttttgcctggctggataccggggtccatgaggatctgctggaggccggccaatttattgccaccctggagcgccgccagggcctgaaggtttcctgcccggaggagattgcctggcgccagggctggatcgacgatgatcagttggcggtggcggcggccggaatggtcaagaacggttatggccgttatctggccaatttgcttaatgccaaggtatactga

SEQ ID NO: 2562 - protein, 300 aa, delta proteobacterium MLMS-1
MSTQHTQSTRKGIILAGGSGTRLYPVTRAVSKQLLPIYDKPMIYYPLSTLMLAGIRDILLITTPHEAPLFQTLLGDGSAWGLNLQYAVQPSPDGLAQAFIIGREFVGNSPSALILGDNIFYGHDLYLQLQRAVGQADGATVFAYHVQDPQRYGVVSFDAAGKATSLEEKPARPKSNYAVTGLYFYDADVVEIAAGLKPSARGELEITDVNRAYLEQGRLAVEIMGRGFAWLDTGVHEDLLEAGQFIATLERRQGLKVSCPEEIAWRQGWIDDDQLAVAAAGMVKNGYGRYLANLLNAKVY

SEQ ID NO: 2563 - DNA, 882 bp, Escherichia coli
  CDS (1)..(882): transl_table=11
atgaaaacgcgtaaaggtattattttagcgggtggttctggtactcgtctttatcctgtgactatggcagtcagtaaacagctgttacctatttatgataaaccgatgatctattacccgctttctacactgatgttagcgggtattcgcgatattctgattatcagtacaccacaggatactcctcgttttcaacaactgctgggtgacgggagccagtgggggctaaatcttcagtacaaagtgcaaccgactccagatggacttgcgcaggcgtttattatcggtgaagagtttattggtggtgatgattgcgctttggttcttggtgataatatcttctacggccacgatctgccgaagttaatggacacagcagttaataaagaaagtggcgcaacggtatttgcctatcacgttaatgatcctgaacgctacggtgtcgttgagtttgataaaaacggtacggcaataagcctggaagaaaaaccgctacaaccaaaaagtaattatgcggtaaccgggctttatttctatgataacgacgttgtcgaaatggcgaaaaaccttaagccttctgcccgtggtgaactggaaattaccgatattaaccgtatttatatggaacaggggcgtttatccgttgccatgatggggcgtggttatgcgtggctggacacggggacacatcaaagcctgattgaggcaagcaacttcattgctactattgaagaacgtcaggggctgaaagtctcctgcccggaagaaattgcttaccgtaaagggtttgttgatgctgagcaggtgaaagtattagctgaacctctgaaaaaaaatgcttatggtcagtatctgctgaaaatgattaaaggttattcataa

SEQ ID NO: 2564 - protein, 293 aa, Escherichia coli
MKTRKGIILAGGSGTRLYPVTMAVSKQLLPIYDKPMIYYPLSTLMLAGIRDILIISTPQDTPRFQQLLGDGSQWGLNLQYKVQPTPDGLAQAFIIGEEFIGGDDCALVLGDNIFYGHDLPKLMDTAVNKESGATVFAYHVNDPERYGVVEFDKNGTAISLEEKPLQPKSNYAVTGLYFYDNDVVEMAKNLKPSARGELEITDINRIYMEQGRLSVAMMGRGYAWLDTGTHQSLIEASNFIATIEERQGLKVSCPEEIAYRKGFVDAEQVKVLAEPLKKNAYGQYLLKMIKGYS

SEQ ID NO: 2565 - DNA, 879 bp, Escherichia coli
  CDS (1)..(879): transl_table=11
atgaaaacgcgtaaaggtattattttagcgggtggttctggtacacgtctttatcctgtgactatggctgtcagtaaacagttattacctatttatgataaaccgatgatctattacccgctctctacactgatgttagcgggtattcgtgatattctgattattagtacgccacaggatactcctcgttttcaacaactgttgggtgatggtagccagtgggggctaaatcttcagtacaaagtgcaaccgactccagatggtcttgcgcaggcatttatcatcggtgaagagtttatcggtggtgatgattgtgctttggttctaggtgataacatcttttacggtcacgatctgccgaagttaatggacgcagctgttaacaaagaaagtggtgcaacggtatttgcctatcacgttaatgatcctgaacgctacggtgtcgttgagtttgataaaaacggtacggcaattagtctggaagaaaaaccgctacagccaaaaagtaattatgcggtaaccgggctttatttttatgataacgacgttgtcgaaatggcgaaaaatcttaagccttctgcccgcggtgaactggaaattaccgatattaaccgtatctatatggaacaagggcgtttatctgttgccatgatggggcgtggttatgcgtggttagacacggggacacatcagagcctgattgaggcaagcaactttattgcaacaattgaagagcgtcaggggttgaaagtttcctgcccggaagaaattgcttaccgtaaagggtttattgatgctgagaaggtgaaagtattagctgaaccgctgaaaaaaaatgcttatggtcagtatctgctgaaaatgattaaaggttattaa

SEQ ID NO: 2566 - protein, 292 aa, Escherichia coli
MKTRKGIILAGGSGTRLYPVTMAVSKQLLPIYDKPMIYYPLSTLMLAGIRDILIISTPQDTPRFQQLLGDGSQWGLNLQYKVQPTPDGLAQAFIIGEEFIGGDDCALVLGDNIFYGHDLPKLMDAAVNKESGATVFAYHVNDPERYGVVEFDKNGTAISLEEKPLQPKSNYAVTGLYFYDNDVVEMAKNLKPSARGELEITDINRIYMEQGRLSVAMMGRGYAWLDTGTHQSLIEASNFIATIEERQGLKVSCPEEIAYRKGFIDAEKVKVLAEPLKKNAYGQYLLKMIKGY

SEQ ID NO: 2567 - DNA, 891 bp, Escherichia coli
  CDS (1)..(891): transl_table=11
atgaaaacgcgtaagggtattattttagcgggtggttctggtactcgtctttatcctgtgactatggcagtcagtaaacagctgctaccgatttatgataaaccgatgatctattatccgctctctacactgatgttggcgggtattcgcgatattttgattatcagtacgccacaggatactcctcgttttcaacaactgctgggtgacggtagccagtgggggctgaatcttcagtacaaagtgcaagcgagtccggatggtcttgcgcaggcatttattatcggtgaagagtttattggtggtgatgattgtgctttgattcttggtgataatatcttttacggtcacgatctgccgaagttaatggatgccgctgttaacaaagaaagtggtgcaacggtatttgcctatcacgtaaatgatcctgaacgctacggtgtcgttgagtttgataaaaacggtacggcaataagcctggaagaaaaaccgctacaaccaaaaagtaattatgcggtaaccggactttatttctatgacaatgatgttgtagaaatggcgaaaaaccttaagccttctgcccgtggcgaactggaaattaccgatattaaccgtatttatatggagcagggacgtttgtctgtcgctatgatggggcgtggttatgcctggttggatactggtacacatcaaagtcttattgaagcaagtaacttcattgccaccattgaagagcgtcagggattaaaggtatcttgcccggaagagattgcttaccgtaaagggtttattggagaaaaagaactttatgcacttgcgcagccattgctaaaaaacaattatggaaaatatctcactggaatattaaaaaataatacatatgttaactaa

SEQ ID NO: 2568 - protein, 296 aa, Escherichia coli
MKTRKGIILAGGSGTRLYPVTMAVSKQLLPIYDKPMIYYPLSTLMLAGIRDILIISTPQDTPRFQQLLGDGSQWGLNLQYKVQASPDGLAQAFIIGEEFIGGDDCALILGDNIFYGHDLPKLMDAAVNKESGATVFAYHVNDPERYGVVEFDKNGTAISLEEKPLQPKSNYAVTGLYFYDNDVVEMAKNLKPSARGELEITDINRIYMEQGRLSVAMMGRGYAWLDTGTHQSLIEASNFIATIEERQGLKVSCPEEIAYRKGFIGEKELYALAQPLLKNNYGKYLTGILKNNTYVN

SEQ ID NO: 2569 - DNA, 879 bp, Shigella boydii
  CDS (1)..(879): transl_table=11
atgaaaacgcgtaaaggtattattttagcgggtggttctggtactcgtctttatcctgtgactatggctgtcagtaaacagctgttacctatttatgataaaccgatgatctattacccgctttctacactgatgttagcgggtattcgcgatattctgattatcagtacaccacaggatactcctcgttttcaacaactgctgggtgacgggggccagtgggggctaaatcttcagtacaaagtgcaaccgagtccagatggacttgcacaggcatttatcatcggtgaagagtttatcggaggtgatgattgtgctttggttctaggtgataacatcttttacggtcacgacctgccgaagttaatggatgtcgctgttaacaaagaaagtggtgcaacggtatttgcttatcacgttaatgatcctgaacgctatggtgtcgttgagtttgataaaaaagggacggcaattagtctggaagaaaaacctctacagccaaaaagtaattatgcggtaactgggctttatttttatgataacgacgttgtcgaaatggcgaaaaaccttaagccttctgcacgtggtgaactggaaattaccgatattaaccgtatttatatggaacaggggcgtttatccgttgccatgatggggcgtggttatgcgtggctggacacggggacacatcaaagcctgattgaggcaagcaacttcattgctacaattgaagaacgtcaggggctgaaagtttcctgtctagaagaaattgcttaccgtaaagggtttattgatgctgagcaagtaaaagtgttagcacaacctctgaaaaaaaatgcttatggtcagtacctactaaaaatgattgaaggttattaa

SEQ ID NO: 2570 - protein, 292 aa, Shigella boydii
MKTRKGIILAGGSGTRLYPVTMAVSKQLLPIYDKPMIYYPLSTLMLAGIRDILIISTPQDTPRFQQLLGDGGQWGLNLQYKVQPSPDGLAQAFIIGEEFIGGDDCALVLGDNIFYGHDLPKLMDVAVNKESGATVFAYHVNDPERYGVVEFDKKGTAISLEEKPLQPKSNYAVTGLYFYDNDVVEMAKNLKPSARGELEITDINRIYMEQGRLSVAMMGRGYAWLDTGTHQSLIEASNFIATIEERQGLKVSCLEEIAYRKGFIDAEQVKVLAQPLKKNAYGQYLLKMIEGY

SEQ ID NO: 2571 - DNA, 879 bp, Shigella boydii
  CDS (1)..(879): transl_table=11
atgaaaacgcgtaaaggtattattttagcgggtggttctggtactcgtctttatcctgtgactatggcagtcagtaaacagctgctaccgatttatgataaaccgatgatctattatccgctctctacactgatgttggcgggtattcgcgatattttgattatcagtacgccacaggatactcctcgttttcaacaactgttgggtgacggtagccagtgggggctgaatcttcagtacaaagtgcaagcgagtccggatggtcttgcgcaggcgtttattatcggtgaagagtttattggtggtgatgattgtgctttgattcttggtgataatatcttttacggtcacgatctgccgaagttaatggatgccgctgttaacaaagaaagtggtgcaacggtatttgcatatcacgtaaatgatcctgaacgctatggtgtcgtggagtttgataataacggaacagccattagccttgaagaaaaaccgttagagccaaaaagcaattatgctgtaaccggactttatttctatgacaatgatgttgtagaaatggcgaaaaaccttaagccttctgcccgtggcgaactggaaattaccgatattaaccgtatttatatggagcagggacgtttatctgttgccatgatgggacgtggatatgcatggttggacacggggacacatcaaagtcttattgaggcaagcaattttatcgcaacaatagaagaacgtcaggggctgaaagtttcctgcccggaagaaattgcttaccgtaaagggtttatcgatgctgagcaggtgaaagtattagctgaaccgttgaagaaaaatgcttatggtcagtatctgctgaaaatgattaaaggttattaa

SEQ ID NO: 2572 - protein, 292 aa, Shigella boydii
MKTRKGIILAGGSGTRLYPVTMAVSKQLLPIYDKPMIYYPLSTLMLAGIRDILIISTPQDTPRFQQLLGDGSQWGLNLQYKVQASPDGLAQAFIIGEEFIGGDDCALILGDNIFYGHDLPKLMDAAVNKESGATVFAYHVNDPERYGVVEFDNNGTAISLEEKPLEPKSNYAVTGLYFYDNDVVEMAKNLKPSARGELEITDINRIYMEQGRLSVAMMGRGYAWLDTGTHQSLIEASNFIATIEERQGLKVSCPEEIAYRKGFIDAEQVKVLAEPLKKNAYGQYLLKMIKGY

SEQ ID NO: 2573 - DNA, 879 bp, Escherichia coli
  CDS (1)..(879): transl_table=11
atgaaaacgcgtaaaggtattattctggctggtggttccggcactcgtctttatcctgtgacgatggcagtgagtaaacaactgctgccgatttatgataagccgatgatttattatccgctttcaacgcttatgttagcgggtattcgcgatattcttattatcagtacgccacaggatacaccgcgtttccaacaattgttgggggacgggagtcagtgggggcttaatctacagtataaagtacaaccgagtccggatggcctggcgcaagcgtttattattggtgaagactttgttggtggtgatgattgtgcactcgtacttggcgataatatcttctatggacacgacttgccgaaattaatggaagctgctgttaacaaagaaatcggtgcaacggtatttgcttatcacgtcaatgatcctgaacgttatggtgtcgtggagtttgataataacggtactgcgattagcctggaagaaaaaccgctggaaccaaaaagtaactatgcggttactgggctttatttctatgacaatgatgttgtagaaatggcgaaaaaccttaagccttctgcccgtggcgaactggaaattaccgatattaaccgtatttatatggagcagggacgtttgtctgtcgctatgatggggcgtggttatgcctggttggatactggtacacatcaaagtcttattgaagcaagtaacttcattgccaccattgaagagcgtcagggattaaaggtatcttgcccggaagagattgcttaccgtaaagggtttattgatgctgagcaggtgaaagtattagccgaaccgctgaagaaaaatgattatggtcagtatctgctaaaaatgattaaaggttattaa

SEQ ID NO: 2574 - protein, 292 aa, Escherichia coli
MKTRKGIILAGGSGTRLYPVTMAVSKQLLPIYDKPMIYYPLSTLMLAGIRDILIISTPQDTPRFQQLLGDGSQWGLNLQYKVQPSPDGLAQAFIIGEDFVGGDDCALVLGDNIFYGHDLPKLMEAAVNKEIGATVFAYHVNDPERYGVVEFDNNGTAISLEEKPLEPKSNYAVTGLYFYDNDVVEMAKNLKPSARGELEITDINRIYMEQGRLSVAMMGRGYAWLDTGTHQSLIEASNFIATIEERQGLKVSCPEEIAYRKGFIDAEQVKVLAEPLKKNDYGQYLLKMIKGY

SEQ ID NO: 2575 - DNA, 879 bp, Shigella boydii
  CDS (1)..(879): transl_table=11
atgaaaacgcgtaaaggtattattttagcgggtggttctggtacacgtctttatcctgtgacgatggccgtcagtaaacagctgttaccgatttatgataaaccgatgatctattacccgctttctacactgatgttagcgggtattcgcgatattctgattatcagtacgccacaggatactcctcgttttcaacaactgctgggtgacgggagccagtgggggctaaatcttcagtacaaagtacaaccgagtccggatggtcttgcgcaggcgtttattatcggtgaagagtttattggtggtgatgattgtgctttggttcttggtgacaatatcttctacggtcacgatctgccgaagttaatggacgtagctgttaacaaagaaagtggtgcaacggtatttgcctatcacgttaatgatcctgaacgctacggtgtcgttgagtttgataaaaacggtacggcgatcagcctggaagaaaaaccgctacaaccaaaaagtaattatgcggtaaccgggctttatttttatgataacgacgttgtcgaaatggcgaaaaatcttaagccttctgcccgcggtgaactggaaattaccgatattaaccgtatttatatggaacaggggcgtttatccgttgccatgatggggcgtggatatgcatggctggacacgggaacacatcaaagtcttattgaagcaagcaacttcattgcaacaattgaagaacgtcaggggctgaaagtatcctgcccggaagaaattgcttaccgtaaaggatttattgattctgagcaggtgaaagtattagctgaaccgctgaaaaaaaatgcttatggtcagtacctactaaaaatgattgaaggttattaa

SEQ ID NO: 2576 - protein, 292 aa, Shigella boydii
MKTRKGIILAGGSGTRLYPVTMAVSKQLLPIYDKPMIYYPLSTLMLAGIRDILIISTPQDTPRFQQLLGDGSQWGLNLQYKVQPSPDGLAQAFIIGEEFIGGDDCALVLGDNIFYGHDLPKLMDVAVNKESGATVFAYHVNDPERYGVVEFDKNGTAISLEEKPLQPKSNYAVTGLYFYDNDVVEMAKNLKPSARGELEITDINRIYMEQGRLSVAMMGRGYAWLDTGTHQSLIEASNFIATIEERQGLKVSCPEEIAYRKGFIDSEQVKVLAEPLKKNAYGQYLLKMIEGY

SEQ ID NO: 2577 - DNA, 888 bp, Bacillus stearothermophilus
  CDS (1)..(888): transl_table=11
ttgaaaggcattatcttagccggaggaagtggcacccgcctttacccgttaacaaaagcggtatctaaacaattattgcctatttatgacaagccgatgatttattatccattgtcgattttaatgttagctggtatccgtgatattttaattatttctactcctaatgatacacctcggtttgcagagctattgggagacgggtcacagctaggaatttcgttgtcttacgccgtgcagccttcgccagatggtcttgcacaggcgtttattattggggaagagtttatcggtgatgacaatgttgcgttgattttaggagacaatctgttttatggccatgggttgacaaagttattacaaaacgctgtggaacggaaaacgggagcgacagtgtttgggtattacgtaaatgatccagaacgttttggcgttgtagagtttgatgaaaatggaaaagtcatttccattgaagaaaaaccgaaacatccgaagtctaattatgcggtgacagggttgtatttttatgacaaccgtgttgtagaattcgcaaaaagtattaagccttccgcgcgtggcgagctggaaattaccgatgtgaataaaaaatatttagagcttggcgaattgcatgtggagattttaggaagaggtttttcatggttagattctggcacgcatgaatctttgcttgaagcttcacaatttattgagacaattgaaaagcggcaaagtttaaaagttgcttgccttgaggaaattgcctatttgaaaggatacattgaccgagaacagttattaaaactagcggagccattaaagaaaaaccagtacggtcaatacttaattgatattgccaatcaaaaaaagcggccgatttatttgtaa

SEQ ID NO: 2578 - protein, 295 aa, Bacillus stearothermophilus
MKGIILAGGSGTRLYPLTKAVSKQLLPIYDKPMIYYPLSILMLAGIRDILIISTPNDTPRFAELLGDGSQLGISLSYAVQPSPDGLAQAFIIGEEFIGDDNVALILGDNLFYGHGLTKLLQNAVERKTGATVFGYYVNDPERFGVVEFDENGKVISIEEKPKHPKSNYAVTGLYFYDNRVVEFAKSIKPSARGELEITDVNKKYLELGELHVEILGRGFSWLDSGTHESLLEASQFIETIEKRQSLKVACLEEIAYLKGYIDREQLLKLAEPLKKNQYGQYLIDIANQKKRPIYL

SEQ ID NO: 2579 - DNA, 900 bp, Bacillus stearothermophilus
  CDS (1)..(900): transl_table=11
atgaaaggtatcgttctagccggcggcagcggtacacgtttatatcctttaaccaaggcaatatctaaacaactattacctatttatgataaaccaatgatttattatccattatctgttttgatgctcgcaggtattcgcgacattcttatcatctccactccagaggatacgccgcgttttgaacagcttcttggtgatggtagtgacttgggaatatctttatcttatgctgttcaaccatcgcctgatggattggcacaagcttttattattggggaagagtttatcggtaatgatcatgtggctctgattcttggtgataatattttttacggtcatggatttacggcgatgttggagcgagcggcatctaggaaaagtggagccaccatatttggttacaatgtaaaagatcctgaacgttttggtgtagtcgaattcgacaagaatggtaaagttatttctattgaagaaaagccagaaaatccgaggtctacctatgcagtaacagggttgtatttctacgataatcgtgttattgacatcgctaagtcgcttcagccttctgctcgtggagaacttgaaattacggatgtaaataaggcgtatttagaacttggagagcttcatgtggaattgcttgggcgcggttttgcttggttagatacaggaacacatgaatcattactagaggcttcgctttttattgaaacgattgaaaaaagacaaagtttaaaagtagcgtgtctggaagaaattgcgtatcgtaaaggttacatttcgagagaacagctgctaaaattagccgagctactgaagaaaaatggttacgggcaatatttgctcgatattgccaatcgggttagtaaagaaggtgaattgattgaaaattattga

SEQ ID NO: 2580 - protein, 299 aa, Bacillus stearothermophilus
MKGIVLAGGSGTRLYPLTKAISKQLLPIYDKPMIYYPLSVLMLAGIRDILIISTPEDTPRFEQLLGDGSDLGISLSYAVQPSPDGLAQAFIIGEEFIGNDHVALILGDNIFYGHGFTAMLERAASRKSGATIFGYNVKDPERFGVVEFDKNGKVISIEEKPENPRSTYAVTGLYFYDNRVIDIAKSLQPSARGELEITDVNKAYLELGELHVELLGRGFAWLDTGTHESLLEASLFIETIEKRQSLKVACLEEIAYRKGYISREQLLKLAELLKKNGYGQYLLDIANRVSKEGELIENY

SEQ ID NO: 2581 - DNA, 879 bp, Escherichia coli
  CDS (1)..(879): transl_table=11
atgaaaacgcgtaaaggtattattttagctggtggttcgggtactcgtctttatcctgtaactatggctgtcagtaaacagttgttaccgatttatgataaaccgatgatctattacccgttgtctacactgatgttagcgggtcttcgcgatattctgattattagtacgccacaggatactcctcgttttcaacaactgctgggtgacgggagccagtgggggctaaatcttcagtacaaagtgcaaccgagtccagatggtcttgcgcaggcatttatcatcggtgaagagtttatcggtggtgatgattgtgctttggttctaggtgataatatcttttacggtcacgatctgccgaagttaatggatgtcgctgttaacaaagaaagtggtgcaacggtatttgcctatcacgttaatgatcctgaacgctacggtgtcgttgagtttgataaaaacggtacggcgatcagcctggaagaaaaaccgctacaaccaaaaagtaattatgcggtaaccgggctttatttttatgataactacgttgtcgaaatggcgaaaaatcttaagccttctgcccgcggtgaactggaaattaccgatattaaccgtatttatatggaacaggggcgtttatccgttgccatgatgggacgtggttatgcatggctggacacggggacacatcaaagtcttattgaggcaagcaattttatcgcaacaatagaagaacgtcaggggctgaaagtttcctgcccggaagaaattgcttaccgtaaagggtttatcgatgctgagcaggtgaaagtattagctgaaccgttgaagaaaaatgcttatggtcagtatctgctgaaaatgattaaaggttattaa

SEQ ID NO: 2582 - protein, 292 aa, Escherichia coli
MKTRKGIILAGGSGTRLYPVTMAVSKQLLPIYDKPMIYYPLSTLMLAGLRDILIISTPQDTPRFQQLLGDGSQWGLNLQYKVQPSPDGLAQAFIIGEEFIGGDDCALVLGDNIFYGHDLPKLMDVAVNKESGATVFAYHVNDPERYGVVEFDKNGTAISLEEKPLQPKSNYAVTGLYFYDNYVVEMAKNLKPSARGELEITDINRIYMEQGRLSVAMMGRGYAWLDTGTHQSLIEASNFIATIEERQGLKVSCPEEIAYRKGFIDAEQVKVLAEPLKKNAYGQYLLKMIKGY

SEQ ID NO: 2583 - DNA, 882 bp, Shigella boydii
  CDS (1)..(882): transl_table=11
atgaaaacgcgtaaaggtattattttagcgggtggttctggtacacgtctttatcctgtgactatggctgtcagtaaacagctattacctatttatgataaaccgatgatctattacccgctctctacactgatgttagcgggtattcgtgatattctgattattagtacgccacaggatactcctcgttttcaacaactgttgggtgatggtagccagtgggggctaaatcttcagtacaaagtgcaaccgagtccagatggtcttgcgcaggcatttatcatcggtgaagagtttatcggtggtgatgattgtgctttggttctaggtgataacatcttttacggtcacgatctgccgaagttaatggacgcagctgttaacaaagaaagtggttcaacggtatttgcctatcacgttaatgatcctgaacgctacggtgtcgttgagtttgataaaaaaggtacagcaattagcctggaagaaaaaccgttacaaccaaaaagtaattatgcggtaaccgggctttatttctatgataacggcgttgtggaaatggcgaaaaaccttaagccttctgcccgtggtgaactggaaattaccgatattaaccgtatttatatggaacaggggcgtttatccgttgccatgatggggcgtggttatgcatggctggacacggggacacatcagagtcttattgaagcaagcaacttcattgcaacaattgaagagcgtcagggcttgaaagtttcctgtccggaagaaattgcttaccgtaaaggatttattgattctgagcaggtgaaagtattagctgaaccgctgaaaaaaaatgcttatggtcaatatctgctgaaaatgattaatactttatcttga

SEQ ID NO: 2584 - protein, 293 aa, Shigella boydii
MKTRKGIILAGGSGTRLYPVTMAVSKQLLPIYDKPMIYYPLSTLMLAGIRDILIISTPQDTPRFQQLLGDGSQWGLNLQYKVQPSPDGLAQAFIIGEEFIGGDDCALVLGDNIFYGHDLPKLMDAAVNKESGSTVFAYHVNDPERYGVVEFDKKGTAISLEEKPLQPKSNYAVTGLYFYDNGVVEMAKNLKPSARGELEITDINRIYMEQGRLSVAMMGRGYAWLDTGTHQSLIEASNFIATIEERQGLKVSCPEEIAYRKGFIDSEQVKVLAEPLKKNAYGQYLLKMINTLS

SEQ ID NO: 2585 - DNA, 876 bp, Shigella boydii
  CDS (1)..(876): transl_table=11
atgaaaacgcgtaaaggtattattttagcgggtggatctggtacacgtctttatcctgtgactatggctgtcagtaaacagctattacctatttatgataagccgatgatctattacccgctctctacactgatgttggcgggtattcgcgatattctgattattagtacgccacaggatactcctcgttttcaacaactgctgggtgacggtagccagtgggggctaaatcttcagtacaaagtgcaaccgactccagatgggcttgcgcaggcgtttattatcggtgaagagtttatcggtggtgatgattgtgctttggttcttggtgataatatcttctacggtcatgatctgccgaagttaatggatgtcgctgttaacaaagaaagtggtgcaacggtatttgcctatcacgttaatgatcctgaacgctacggtgtcgttgagtttgataaaaacggtacggcaatcagcctggaagaaaaaccgctacaaccaaaaagtaattatgcggtaaccgggctttatttctatgataacgacgttgtcgaaatggcgaaaaaccttaagccttctgcccgtggtgaactggaaattaccgatattaaccgtatttatatggaacaggggcgtttatccgttgccatgatggggcgtggttatgcatggctggatacggggacacatcagagtcttattgaagcaagcaacttcattgccaccattgaagagcgccagggactaaaggtttcctgcccagaagaaattgcttaccgtaaagggtttattgatgcagagcagattaaggtattagccgaaccgctgaagaaaaatgcttatggtcagtatttgctgaaaatgattaaaggttag

SEQ ID NO: 2586 - protein, 291 aa, Shigella boydii
MKTRKGIILAGGSGTRLYPVTMAVSKQLLPIYDKPMIYYPLSTLMLAGIRDILIISTPQDTPRFQQLLGDGSQWGLNLQYKVQPTPDGLAQAFIIGEEFIGGDDCALVLGDNIFYGHDLPKLMDVAVNKESGATVFAYHVNDPERYGVVEFDKNGTAISLEEKPLQPKSNYAVTGLYFYDNDVVEMAKNLKPSARGELEITDINRIYMEQGRLSVAMMGRGYAWLDTGTHQSLIEASNFIATIEERQGLKVSCPEEIAYRKGFIDAEQIKVLAEPLKKNAYGQYLLKMIKG

SEQ ID NO: 2587 - DNA, 879 bp, Salmonella enterica
  CDS (1)..(879): transl_table=11
atgaaaacgcgtaagggcattattttagcggggggctccggcaccagtctttatccggtgaccatggcggtaagtaagcaattgctaccaatttatgataaaccgatgatttactatcccctttccacgcttatgctggcaggcattcgagatatcctgatcatcagtacgccacaggacacgccgcgttttcaacaactgctgggagacggcagtcagtgggggctgaatcttcaatataaagtacagccaagcccggatggcttagcacaggcatttattattggtgaagagttcattggtcatgatgattgtgcattagtgctgggtgacaatatcttctatggccatgatttaccaaagttaatggaagctgccgttaataaagaaagtggtgctaccgtctttgcttatcatgtaaacgatccagagcgctacggtgtggttgagtttgaccaaaatggcacagccgttagtctggaggaaaaaccgttacaaccgaagagtaattacgcggtaacggggctgtatttttacgataacagcgtggtggagatggcgaaaaatcttaagccttctgctcgcggtgagttagaaatcacggatattaaccgtatctatatggagcagggaagattgtctgtcgctatgatggggcgcggttatgcctggctggatacagggacgcatcagagtttgatagaggccagtaattttattgcaaccatcgaagaacgccagggactaaaagtgtcctgcccggaagaaatcgcttatagaaaagggtttattgatgcggagcagattaaaaatctggctaaaccgttgtcgaagaatgcttatgggcagtatctcctgaacatgattaaaggttattaa

SEQ ID NO: 2588 - protein, 292 aa, Salmonella enterica
MKTRKGIILAGGSGTSLYPVTMAVSKQLLPIYDKPMIYYPLSTLMLAGIRDILIISTPQDTPRFQQLLGDGSQWGLNLQYKVQPSPDGLAQAFIIGEEFIGHDDCALVLGDNIFYGHDLPKLMEAAVNKESGATVFAYHVNDPERYGVVEFDQNGTAVSLEEKPLQPKSNYAVTGLYFYDNSVVEMAKNLKPSARGELEITDINRIYMEQGRLSVAMMGRGYAWLDTGTHQSLIEASNFIATIEERQGLKVSCPEEIAYRKGFIDAEQIKNLAKPLSKNAYGQYLLNMIKGY

SEQ ID NO: 2589 - DNA, 870 bp, Salmonella enterica
  CDS (1)..(870): transl_table=11
atgaaaacgcgtaagggcattattttagcggggggctccggcactcgtctttatcctgtgaccatggcggtaagtaagcaattgctgccaatctatgataaaccgatgatttactatcccctttccacgcttatgctggcaggcattcgggatatcttgatcatcagtacgccacaggatacgccgcgttttcaacaactgctgggagacggcagccagtgggggttgaatcttcaatataaagtacaactaagtccggatggcttagcacaggcgtttattattggtgaagagttcattggtaacgatgactgtgcattagtgctgggtgacaatatcttctatggtcacgatttgcctaaactaatggacgctgccgttaataaagaagatggcgctaccgtctttgcttatcatgtaaacgatccggagcgctacggtgtggttgagtttgacaaaaatggcacagccgttagtctggaagaaaaaccgttacaaccgaagagcaattatgcggtaacgggtctttatttttacgataatagcgtggtggcgatggcgaaaaatcttaagccttccgctcgcggtgagttagagatcacggatattaaccgtatttatatggagcagggacgcttgtcagttgcgatgatggggcgcggctatgcctggctggatacgggtacacatcagagtttgatagaggccagtaattttattgcgacgattgaggagcggcaaggtttaaaagttgcctgtttagaagagatagcatataggaaaaactatatttcaaaagaaaaaattcagaatgccattttaaaattcgggaaaagcgcatatggagcctatttaaaatctttattttag

SEQ ID NO: 2590 - protein, 289 aa, Salmonella enterica
MKTRKGIILAGGSGTRLYPVTMAVSKQLLPIYDKPMIYYPLSTLMLAGIRDILIISTPQDTPRFQQLLGDGSQWGLNLQYKVQLSPDGLAQAFIIGEEFIGNDDCALVLGDNIFYGHDLPKLMDAAVNKEDGATVFAYHVNDPERYGVVEFDKNGTAVSLEEKPLQPKSNYAVTGLYFYDNSVVAMAKNLKPSARGELEITDINRIYMEQGRLSVAMMGRGYAWLDTGTHQSLIEASNFIATIEERQGLKVACLEEIAYRKNYISKEKIQNAILKFGKSAYGAYLKSLF

SEQ ID NO: 2591 - DNA, 879 bp, Salmonella enterica
  CDS (1)..(879): transl_table=11
atgaaaacgcgtaagggcattattttagcggggggctccggcactcgcctttatcctgtgaccatggcggtaagtaaacaattacttccaatctatgataaaccgatgatttactatccgctttctacacttatgcttgcaggcattcgggatatcctgatcatcagtacaccacaggatacgccgcgttttcaacaactgctgggagacggtagtcaatggggactgaaccttcaatataaagtacagccaaacccggatggtctggcgcaggcatttattattggcgaagaatttattggtaatgatgactgtgcattagtgttgggggataatatcttctatggtcacgatctacctaaactgatggacgttgccattaataaagaaaatggcgctacggtatttgcttatcatgtaaacgatccggagcgctacggtgtggttgagtttgaccaaaatggcacagccgttagtctggaagaaaaaccgttacaaccgaagagtaattatgcagtaacggggctgtatttttatgataacagcgtggtggagatggcgaaaaatcttaagccttctgctcgcggtgagttagaaatcacggatattaaccgtatttatatggaacaaggacgcttgtcagttgcgatgatggggcgcggttatgcctggctggatacggggacgcatcagagtttgatagaggccagtaattttattgcgacgattgaggaacgtcagggattgaaagtctcttgcccagaagagattgcttatcgtaaagggtttattgattcacaaaaagttatgagcttggctgaaaaattatccaaaaatgcatatggacaatatttaataaatatgattaaagggagatag

SEQ ID NO: 2592 - protein, 292 aa, Salmonella enterica
MKTRKGIILAGGSGTRLYPVTMAVSKQLLPIYDKPMIYYPLSTLMLAGIRDILIISTPQDTPRFQQLLGDGSQWGLNLQYKVQPNPDGLAQAFIIGEEFIGNDDCALVLGDNIFYGHDLPKLMDVAINKENGATVFAYHVNDPERYGVVEFDQNGTAVSLEEKPLQPKSNYAVTGLYFYDNSVVEMAKNLKPSARGELEITDINRIYMEQGRLSVAMMGRGYAWLDTGTHQSLIEASNFIATIEERQGLKVSCPEEIAYRKGFIDSQKVMSLAEKLSKNAYGQYLINMIKGR

SEQ ID NO: 2593 - DNA, 879 bp, Salmonella enterica
  CDS (1)..(879): transl_table=11
atgaaaacgcgtaagggcattattttagcggggggctccggcactcgtctttatcctgtgaccatggcggtaagtaagcaattgctgccaatctatgataaaccgatgatttactatcccctttccacgcttatgctggcaggcattcgggatatcttgatcatcagtacgccacaggacacgccgcgttttcaacaactgctgggagacggtagccagtgggggctgaatcttcaatataaagtacaaccaagcccggatggcttagcacaggcgtttattattggtgaagagttcattggtaacgatgactgtgcattagtgctgggtgacaatatcttctatggtcacgatttgcctaaactaatggacgctgccgttaataaagaagatggcgctaccgtctttgcttatcatgtaaacgatccggagcgctacggtgtggttgagtttgaccaaaatggcacagccgttagtctggaagaaaaaccgttacaaccgaagagtaattatgcggtaacgggtctttatttttatgataatagcgtggtggcgatggcgaaaaaacttaagccttccgctcgcggtgagttagagatcacggatattaaccgtatttatatggagcagggacgcttgtcagttgcgatgatggggcgcggctatgcctggctggatacgggtacacatcagagtttgatagaggccagtaattttattgcaaccatcgaagaacgccaggggctgaaagtgtcttgtccggaagagatcgcttatagaaaagggtttattgatgcggagcagattaaaaatctggctaaaccgttgtccaaaaatgcttatgggcagtatctcctgaacatgattaaaggttattaa

SEQ ID NO: 2594 - protein, 292 aa, Salmonella enterica
MKTRKGIILAGGSGTRLYPVTMAVSKQLLPIYDKPMIYYPLSTLMLAGIRDILIISTPQDTPRFQQLLGDGSQWGLNLQYKVQPSPDGLAQAFIIGEEFIGNDDCALVLGDNIFYGHDLPKLMDAAVNKEDGATVFAYHVNDPERYGVVEFDQNGTAVSLEEKPLQPKSNYAVTGLYFYDNSVVAMAKKLKPSARGELEITDINRIYMEQGRLSVAMMGRGYAWLDTGTHQSLIEASNFIATIEERQGLKVSCPEEIAYRKGFIDAEQIKNLAKPLSKNAYGQYLLNMIKGY

SEQ ID NO: 2595 - DNA, 879 bp, Salmonella enterica
  CDS (1)..(879): transl_table=11
atgaaaacgcgtaagggcattattttagcggggggctccggcactcgtctttatcctgtaaccatggcggtaagtaagcaattgctgccaatttatgataaaccgatgatttactatcccctttccacgcttatgctggcaggcattcgggatatcttgatcatcagtacgccacaggacacgccgcgttttcaacaactgctgggagacggcagccagtgggggctgaatcttcaatataaagtacaaccaagcccggatggtttagcacaggcgtttattattggtgaagagttcattggtaacgatgattgtgcattagtgctaggtgacaatatcttctatggccacgatttgcctaaactgatggacgctgctgttaataaagaagatggcgctaccgtctttgcttatcatgtgaacgatccggagcgctacggtgtggttgagtttgaccaaaatggcacagccgttagtctggaagaaaaaccgttacaaccgaagagtaattatgcggtaacggggctgtatttttatgataacagcgtggtggagatggcgaaaaatcttaagccttccgctcgcggtgagttagaaatcacggatattaaccgtatctatatggatcagggacgcttgtcagttgcgatgatggggcgcggttatgcctggctggatacagggacgcatcagagtttgatagaggccagtaattttattgcaaccatcgaagaacgccagggactaaaggtatcctgcccagaagagatcgcttatagaaaagggttcattgatgcggagcagattaaaaatctggctaaaccgttgtcgaagaatgcttatgggcagtatctcctgaacatgattaaaggttattaa

SEQ ID NO: 2596 - protein, 292 aa, Salmonella enterica
MKTRKGIILAGGSGTRLYPVTMAVSKQLLPIYDKPMIYYPLSTLMLAGIRDILIISTPQDTPRFQQLLGDGSQWGLNLQYKVQPSPDGLAQAFIIGEEFIGNDDCALVLGDNIFYGHDLPKLMDAAVNKEDGATVFAYHVNDPERYGVVEFDQNGTAVSLEEKPLQPKSNYAVTGLYFYDNSVVEMAKNLKPSARGELEITDINRIYMDQGRLSVAMMGRGYAWLDTGTHQSLIEASNFIATIEERQGLKVSCPEEIAYRKGFIDAEQIKNLAKPLSKNAYGQYLLNMIKGY

SEQ ID NO: 2597 - DNA, 873 bp, Salmonella enterica
  CDS (1)..(873): transl_table=11
atgaaaacgcgtaagggcattattttagcgggtggctccggtacccgtctttatcctgtaaccatggcggtaagtaaacaattacttccaatctatgataaaccgatgatttactatccgctttctacacttatgcttgcaggcattcgggatattctgatcatcagtacaccacaggatacgccgcgttttcaacaactgctgggagacggcagccagtgggggctaaatcttcagtataaagtacagccgaacccggatggtctggcgcaggcatttattattggcgaagaatttattggtaacgatgactgtgcattagtgctgggggataatatcttctatggtcacgatctacctaaattgatggacgttgccgttaataaagaaaatggcgctacagtatttgcttatcatgtaaacgatccggagcgttacggtgtggttgagtttgaccaaaatggtacagccgttagtctggaagaaaaaccgttacaaccgaagagtaattacgcggtaacaggtctgtatttttacgataacagcgtggtggcgatggcgaaaaatcttaaaccttctgctcgcggtgagctagagatcacggatattaaccgtatctatatggagcagggaagactgtctgttgccatgatggggcgcggttatgcctggctggatacgggtacgcatcagagtttgatcgaagcgagtaattttatcgcgacaattgaagaacgtcagggcctgaaagtagcttgcccggaagagattgcatatcgtaaaggattcatagatattaaagaattaaaagttcttgctaagccccttttaaaaaataattatggccaatatcttctaaaaattatgaagtaa

SEQ ID NO: 2598 - protein, 290 aa, Salmonella enterica
MKTRKGIILAGGSGTRLYPVTMAVSKQLLPIYDKPMIYYPLSTLMLAGIRDILIISTPQDTPRFQQLLGDGSQWGLNLQYKVQPNPDGLAQAFIIGEEFIGNDDCALVLGDNIFYGHDLPKLMDVAVNKENGATVFAYHVNDPERYGVVEFDQNGTAVSLEEKPLQPKSNYAVTGLYFYDNSVVAMAKNLKPSARGELEITDINRIYMEQGRLSVAMMGRGYAWLDTGTHQSLIEASNFIATIEERQGLKVACPEEIAYRKGFIDIKELKVLAKPLLKNNYGQYLLKIMK

SEQ ID NO: 2599 - DNA, 879 bp, Salmonella enterica
  CDS (1)..(879): transl_table=11
atgaaaacgcgtaaagggattatattagctggtggctctggaactcgtctttatccggtgacaatggctgtcagcaaacaactgcttccgatctatgataaaccaatgatctattatccactgtccatgctgatgttagctgggattcgtgacattctgattattagtactccacaggatactccacgatttgaacagttactgggtgaaggtagtcagtggggattaaatctgcaatataaagtacaaccgacgccggatggtctggctcaggcatttattattggtgaagagtttatcggtaatgacgactgtgctttagtgctaggcgacaacattttttacggccatgatcttccaagattaatggaaacagccgtaaataaagaaagtggtgcaactgtatttgcttatcatgtcaacgatcctgaacgttacggtgttgtagagttcgacaaagatggcacagcgattagcctggaagaaaaaccacttgaaccaaaaagtaattatgcggtgacagggctgtatttctatgacaatgatgttgttgaaatggcaaagaacttaaaaccttcagcacgtggcgagttggaaattacagacattaaccgaatttacatggagcaggggcggttatctgttgcaatgatgggacgtggctatgcctggctggatacaggtactcatcaaagcttaatcgaagcaagcaactttattgcgacaattgaagaacgtcagggattaaaagtttcttgcccagaagagatagcataccgtaaaggctttattgactcggaacaggtgaaaaaattagccatcccattgtcaaaaaatgcttatggacaatatttgattagaatggttaaaggttattaa

SEQ ID NO: 2600 - protein, 292 aa, Salmonella enterica
MKTRKGIILAGGSGTRLYPVTMAVSKQLLPIYDKPMIYYPLSMLMLAGIRDILIISTPQDTPRFEQLLGEGSQWGLNLQYKVQPTPDGLAQAFIIGEEFIGNDDCALVLGDNIFYGHDLPRLMETAVNKESGATVFAYHVNDPERYGVVEFDKDGTAISLEEKPLEPKSNYAVTGLYFYDNDVVEMAKNLKPSARGELEITDINRIYMEQGRLSVAMMGRGYAWLDTGTHQSLIEASNFIATIEERQGLKVSCPEEIAYRKGFIDSEQVKKLAIPLSKNAYGQYLIRMVKGY

SEQ ID NO: 2601 - DNA, 879 bp, Salmonella enterica
  CDS (1)..(879): transl_table=11
atgaaaacgcgtaagggcattattttagcggggggctccggcactcgtctttatcctgtgaccatggcggtaagtaagcaattgcttccaatctatgataagccgatgatttattatccgctttctacacttatgcttgcaggcattcgggatatcctgatcatcagtacaccacaggatacgccgcgttttcaacaactgctgggagacggcagccagtgggggctaaatcttcagtataaagtacagccgaacccggatggtctggcgcaggcatttattattggcgaagaatttattggtaacgatgactgtgcattagtgctgggggataatatcttctatggtcacgatctacctaaactgatggacgttgccgttaataaagaaaatggcgcttacggtattgcttatcatgtaaacgatccggagcgttacggtgtggttgagtttgaccaaaatggtacagccgttagtctggaagaaaaaccgttacaaccgaagagtaattatgcagtaacgggtctgtatttttacgataacagcgtggtggcgatggcaaaaaatcttaaaccttctgctcgcggtgagttagagatcacggatattaaccgtatctatatggagcagggaagactgtctgttgccatgatggggcgcggttatgcctggctggatacggggacgcatcagagtttgatagaggccagtaattttattgcgacgattgaggaacgtcagggattaaaagtctcttgcccagaagagattgcttatcgtaaagggtttattgattcacaaaaagttatgagcttggctaaaaaattatccaaaaatgcatatggacaatatttaataaatatgattaaagggagatag

SEQ ID NO: 2602 - protein, 292 aa, Salmonella enterica
MKTRKGIILAGGSGTRLYPVTMAVSKQLLPIYDKPMIYYPLSTLMLAGIRDILIISTPQDTPRFQQLLGDGSQWGLNLQYKVQPNPDGLAQAFIIGEEFIGNDDCALVLGDNIFYGHDLPKLMDVAVNKENGAYGIAYHVNDPERYGVVEFDQNGTAVSLEEKPLQPKSNYAVTGLYFYDNSVVAMAKNLKPSARGELEITDINRIYMEQGRLSVAMMGRGYAWLDTGTHQSLIEASNFIATIEERQGLKVSCPEEIAYRKGFIDSQKVMSLAKKLSKNAYGQYLINMIKGR

SEQ ID NO: 2603 - DNA, 870 bp, Salmonella enterica
  CDS (1)..(870): transl_table=11
atgaaaacgcgtaagggcattattttagcggggggctccggcactcgcctttatcctgtgaccatggcagtaagtaagcaattgctgccaatctatgataaaccgatgatttactatcccctttccacgcttatgctggcaggcattcgggatatcttgatcatcagtacgccacaggatacgccgcgttttcaacaactgctgggagacggtagccagtgggggctgaatcttcaatataaagtacaactaagcccggatggcttagcacaggcgtttattattggtgaagagttcattggtaacgataactgtgcattagtactgggtgacaatatcttctatggtcacgatttgcctaaactaatgaacgctgccgttaataaagaagatggcgctaccgtctttgcttatcatgtaaacgatccggagcgctacggtgtggttgagtttgaccaaaatggcacagccgttagtctggaagaaaaaccgttacaaccgaagagtaattatgcggtaacggggctgtatttttatgataacagcgtggtggcgatggcgaaaaatcttaagccttccgctcgcggtgagttagagatcacggatattaaccgtatttatatggagcagggacgcttgtcagttgcgatgatggggcgcggctatgcctggctggatacgggtacacatcagagtttgatagaggccagtaattttattgcgacgattgaggagcggcaaggtttaaaagttgcctgtttagaagagatagcatataggaaaaactatatttcaaaagaaaaaattcagaatgccattttaaaattcgggaaaagcgcatatggagcctatttaaaatctttattttag

SEQ ID NO: 2604 - protein, 289 aa, Salmonella enterica
MKTRKGIILAGGSGTRLYPVTMAVSKQLLPIYDKPMIYYPLSTLMLAGIRDILIISTPQDTPRFQQLLGDGSQWGLNLQYKVQLSPDGLAQAFIIGEEFIGNDNCALVLGDNIFYGHDLPKLMNAAVNKEDGATVFAYHVNDPERYGVVEFDQNGTAVSLEEKPLQPKSNYAVTGLYFYDNSVVAMAKNLKPSARGELEITDINRIYMEQGRLSVAMMGRGYAWLDTGTHQSLIEASNFIATIEERQGLKVACLEEIAYRKNYISKEKIQNAILKFGKSAYGAYLKSLF

SEQ ID NO: 2605 - DNA, 879 bp, Salmonella enterica
  CDS (1)..(879): transl_table=11
atgaaaacgcgtaagggcattattttagcggggggctccggaactcgtctttatccggtgaccatggcggtaagtaagcaattgctaccaatttatgataaaccgatgatttactatcccctttccacgcttatgctggcaggcattcgggatatcctgatcatcagtacgccacaggacacgccgcgttttcaacaactgctgggagacggcagccagtgggggctgaatcttcaatataaagtacagccaagcccggatggcttagcacaggcgtttattattggtgaagagttcattggtcatgatgattgtgcattagtgctgggtgacaatatcttctatggtcatgatttaccaaagttaatggaagctgccgttaataaagaaagtggtgctaccgtctttgcttatcatgtaaacgatccagagcgctacggtgttgttgagtttgaccaaaatggcacagccgttagtctggaggaaaaaccgttacaaccgaagagtaattacgcggtaacggggctgtatttttatgataatagcgtggtggagatggcgaaaaatcttaagccttctgctcgcggtgagttagaaatcacggatattaaccgtatctatatggatcagggaagattgtctgtcgctatgatggggcgcggttatgcctggctggacacagggacgcatcagagtttgatagaggccagtaattttattgcaaccatcgaagaacgccagggtctgaaagtgtcttgcccggaagagatcgcttatagaaaagggtttattgatgcggagcagattaaaaatctggctaaaccgttgtcgaagaatgcttatgggcagtatctcctgaacatgattaaaggttattaa

SEQ ID NO: 2606 - protein, 292 aa, Salmonella enterica
MKTRKGIILAGGSGTRLYPVTMAVSKQLLPIYDKPMIYYPLSTLMLAGIRDILIISTPQDTPRFQQLLGDGSQWGLNLQYKVQPSPDGLAQAFIIGEEFIGHDDCALVLGDNIFYGHDLPKLMEAAVNKESGATVFAYHVNDPERYGVVEFDQNGTAVSLEEKPLQPKSNYAVTGLYFYDNSVVEMAKNLKPSARGELEITDINRIYMDQGRLSVAMMGRGYAWLDTGTHQSLIEASNFIATIEERQGLKVSCPEEIAYRKGFIDAEQIKNLAKPLSKNAYGQYLLNMIKGY

SEQ ID NO: 2607 - DNA, 879 bp, Salmonella enterica
  CDS (1)..(879): transl_table=11
atgaaaacgcgtaagggcattattttagcggggggctccggcacccgtctttatccggtgaccatggcggtaagtaagcaattgctaccaatttatgataaaccgatgatttactatcccctttccacgcttatgctggcaggcattcgggatatcctgatcatcagtacgccacaggacacgccgcgttttcaacaactactgggagacggcagccagtgggggctgaatcttcaatataaagtacagccaagcccggatggcttagcacaggcgtttattattggtgaagagttcattggtaatgatgattgtgcattagtactaggtgacaatatcttctatggtcatgatttaccaaagttaatggaagctgccgttaataaagaaagtggtgctaccgtctttgcttatcatgtaaacgatccggagcgctacggtgtggttgagtttgaccaaagtggcacagccgttagtctggaggaaaaaccgttacaaccgaagagtaattacgcggtaacggggctgtatttttatgataatagcgtggtggagatggcgaaaaatcttaagccttccgctcgcggtgagttagaaatcacggatattaaccgtatctatatggatcagggaagattgtctgtcgctatgatggggcgcggttatgcctggctggatacagggacgcatcagagtttgatagaggccagtaattttattgcaaccatcgaagaacgccagggactaaaagtgtcctgcccggaagaaatcgcttatagaaaagggtttattgatgcggagcagattaaaaatctggctaaaccgttgtcgaagaatgcttatgggcagtatctcctgaacatgattaaaggttattaa

SEQ ID NO: 2608 - protein, 292 aa, Salmonella enterica
MKTRKGIILAGGSGTRLYPVTMAVSKQLLPIYDKPMIYYPLSTLMLAGIRDILIISTPQDTPRFQQLLGDGSQWGLNLQYKVQPSPDGLAQAFIIGEEFIGNDDCALVLGDNIFYGHDLPKLMEAAVNKESGATVFAYHVNDPERYGVVEFDQSGTAVSLEEKPLQPKSNYAVTGLYFYDNSVVEMAKNLKPSARGELEITDINRIYMDQGRLSVAMMGRGYAWLDTGTHQSLIEASNFIATIEERQGLKVSCPEEIAYRKGFIDAEQIKNLAKPLSKNAYGQYLLNMIKGY

SEQ ID NO: 2609 - DNA, 885 bp, Leptospira borgpetersenii
  CDS (1)..(885): transl_table=11
atgaaatcgagaaaagggattatactcgcaggcggttctggaacaaggctttatccggttacgtacgtcgtttccaaacaacttttgccggtttacgataaaccgatgatttattacccactaacaacgcttatgctagcgggaattaaagaaatacttttgatttccacgccccaagcgactcctatgtataaagaactgttaggagacggaaaacaatggggaatttctatcgaatatgcggttcagcccgaaccgggaggattggcgcaagcatattggatcggagaaaatttcgtcaacgggcatccgtccgtattgattcttggagataatatttatttcggtcataatcttgctgttcttttagagaacgcttctaaaaaaactaagggttctaccgtgttcgcgtatccggttcatgatccggagcggtatggagtggtggaatttgattcggaaagacgtgcggtttcgatcgaagaaaaaccttctaagccgaagtccaattacgcagtcactggattatatttttatgatgaagaagttgtgagtatagccaagtccattaaaccttctgcaagaggagaattggaaattacggacgtaaataggatttatttagaaagaggaattttaaacgttcaagtgatgggacgaggatacgcttggttggatactgggactcacgaatctcttttagaggcgtctgtatttatagaaacgattgaaaaaagacagggacttaaagttgcctgcccggaggaaatcgcatttagaaaaggttttatagatgggtctcaattagaaaaattgatagttcctcttaaaaaaacaggttatggagaatatcttgtgaaaatacttcaagaaaagatttactaa

SEQ ID NO: 2610 - protein, 294 aa, Leptospira borgpetersenii
MKSRKGIILAGGSGTRLYPVTYVVSKQLLPVYDKPMIYYPLTTLMLAGIKEILLISTPQATPMYKELLGDGKQWGISIEYAVQPEPGGLAQAYWIGENFVNGHPSVLILGDNIYFGHNLAVLLENASKKTKGSTVFAYPVHDPERYGVVEFDSERRAVSIEEKPSKPKSNYAVTGLYFYDEEVVSIAKSIKPSARGELEITDVNRIYLERGILNVQVMGRGYAWLDTGTHESLLEASVFIETIEKRQGLKVACPEEIAFRKGFIDGSQLEKLIVPLKKTGYGEYLVKILQEKIY

SEQ ID NO: 2611 - DNA, 879 bp, Shigella flexneri
  CDS (1)..(879): transl_table=11
atgaaaacgcgtaaaggtattattctggctggtggttccggcactcgtctttatcctgtgacaatggctgtgagcaaacaactgctaccgatttatgataaaccgatgatttattatccgctttcaacgcttatgttggcgggtattcgagatattctgattatcagtacgccgcaggatacaccacgttttcaacaattgcttggtgatggaagccagtgggggcttaatctgcaatataaagtacaaccgagtccggatggtctggcgcaagcatttatcattggtgaagaatttataggtggtgatgattgtgcgctggtacttggtgataatatcttctatggtcacgacctgccgaaattaatggataccgctgttaacagagagagtggcgcaacggtttttgcctatcacgtaaatgatcctgagcgctacggtgtggtggaatttgatgataacggtacggcaattagtctggaagaaaaaccgcaggaaccaaaaagtaactatgcggttactgggctttatttctatgacaatgacgttgtagaaatggcgaaaaaccttaaaccatctgcacgtggcgaactggaaattaccgatattaaccgtatttatatggaccaaggacgtttgtctgtcgctatgatggggcgtggttatgcatggctggacacggggacacatcaaagtcttattgaagcaagcaacttcattgcaacaattgaagagcgtcaggggctgaaagtttcctgcccggaagaaattgctcaccgtaaaggctttattgatgctgagcaagtgaaggtattagccgagccgctgaagaaaaatgcttatggtcagtatctgctgaaaatgattaaaggttattaa

SEQ ID NO: 2612 - protein, 292 aa, Shigella flexneri
MKTRKGIILAGGSGTRLYPVTMAVSKQLLPIYDKPMIYYPLSTLMLAGIRDILIISTPQDTPRFQQLLGDGSQWGLNLQYKVQPSPDGLAQAFIIGEEFIGGDDCALVLGDNIFYGHDLPKLMDTAVNRESGATVFAYHVNDPERYGVVEFDDNGTAISLEEKPQEPKSNYAVTGLYFYDNDVVEMAKNLKPSARGELEITDINRIYMDQGRLSVAMMGRGYAWLDTGTHQSLIEASNFIATIEERQGLKVSCPEEIAHRKGFIDAEQVKVLAEPLKKNAYGQYLLKMIKGY

SEQ ID NO: 2613 - DNA, 882 bp, Escherichia coli
  CDS (1)..(882): transl_table=11
atgaaaacgcgtaaaggtattattctggctggtggttccggcactcgtctttatcctgtgacgatggcagtaagtaaacaactgctgccgatttatgataagccgatgatttattatccgctttcaacgcttatgttagcgggtattcgcgatattcttattatcagtacgccacaggatacgccgcgtttccaacaattgttgggggacgggagccagtgggggcttaatctacagtataaagtacaaccgagtccggatggcctggcgcaagcgtttatcattggtgaagactttattggtggcgatgattgtgcacttgtgcttggtgataatatcttctatggacacgacttgccgaaattaatggaagctgctgttaacaaagaaagcggtgcaacggtatttgcttatcacgttaatgatcctgaacgttatggtgtcgtggagtttgataataacggtactgcaattagcctggaagaaaaaccgctggaaccaaaaagtaactatgcggttactgggctttatttctatgacaatgacgttgtggaaatggcccggaaaaaccttaagccttctgcccgaggtgaactggaaattaccgatattaaccgtatttatatggaacaaggacgtttgtctgtcgctatgatggggcgtggctatgcatggctggatacagggacgcatcaaagtcttattgaagcaagcaacttcattgccaccattgaagagcgccagggactaaaggtttcctgtccggaagaaattgcttatcgtaaagggtttattgatgctgagcaggtaaaagtattagccgaaccgttgaagaaaaatgcttatggtcagtatctgctcaaaatgattaaaggttattaa

SEQ ID NO: 2614 - protein, 293 aa, Escherichia coli
MKTRKGIILAGGSGTRLYPVTMAVSKQLLPIYDKPMIYYPLSTLMLAGIRDILIISTPQDTPRFQQLLGDGSQWGLNLQYKVQPSPDGLAQAFIIGEDFIGGDDCALVLGDNIFYGHDLPKLMEAAVNKESGATVFAYHVNDPERYGVVEFDNNGTAISLEEKPLEPKSNYAVTGLYFYDNDVVEMARKNLKPSARGELEITDINRIYMEQGRLSVAMMGRGYAWLDTGTHQSLIEASNFIATIEERQGLKVSCPEEIAYRKGFIDAEQVKVLAEPLKKNAYGQYLLKMIKGY

SEQ ID NO: 2615 - DNA, 879 bp, Salmonella anatum
  CDS (1)..(879): transl_table=11
atgaaaacgcgtaagggcattattttagcggggggctccggcacccgtctttatccggtgaccatggcggtaagtaagcaattgctaccaatttatgataaaccgatgatttactatcccctttccacacttatgctggcaggtattcgggatatcctgatcatcagtacgccacaggacacgccgcgttttcaacaactgctgggagacggcagccagtgggggctgaatcttcaatataaagtacagccaagcccggatggcttagcacaggcgtttattattggtgaagagttcattggtaatgatgattgtgcattagtactgggtgacaatatcttctatggtcatgatttaccaaagttaatggaagctgccgttaataaagaaagtggtgctaccgtctttgcttatcatgtaaacgatccagagcgctacggtgtggttgagtttgaccaaagtggcacagccgttagtctggaggaaaaaccgttacaaccgaagagtaattacgcggtaacggggctgtatttttacgataacagcgtggtggagatggcgaaaaatcttaagccttccgctcgcggtgagttagaaatcacggatattaaccgtatctatatggagcagggaagattgtctgtcgctatgatggggcgcggttatgcttggctggatacgggaacgcatcagagtttgatagaggccagtaattttattgcaaccatcgaagaacgccagggtctgaaagtgtcttgcccggaagagatcgcttatagaaaagggtttattgatgcagagcagattaaaaatctggctaaaccgttgtcgaagaatgcttatgggcagtatctcctgaacatgattaaaggttattaa

SEQ ID NO: 2616 - protein, 292 aa, Salmonella anatum
MKTRKGIILAGGSGTRLYPVTMAVSKQLLPIYDKPMIYYPLSTLMLAGIRDILIISTPQDTPRFQQLLGDGSQWGLNLQYKVQPSPDGLAQAFIIGEEFIGNDDCALVLGDNIFYGHDLPKLMEAAVNKESGATVFAYHVNDPERYGVVEFDQSGTAVSLEEKPLQPKSNYAVTGLYFYDNSVVEMAKNLKPSARGELEITDINRIYMEQGRLSVAMMGRGYAWLDTGTHQSLIEASNFIATIEERQGLKVSCPEEIAYRKGFIDAEQIKNLAKPLSKNAYGQYLLNMIKGY

SEQ ID NO: 2617 - DNA, 879 bp, Salmonella typhimurium
  CDS (1)..(879): transl_table=11
atgaaaacgcgtaagggcattattttagcggggggctccggcacccgtctttatccggtgaccatggcggtaagtaagcaattgctaccaatttatgataaaccgatgatttactatcccctttccacgcttatgctggcaggcattcgggatatcctgatcatcagtacgccacaggacacgccgcgttttcaacaactgctgggagacggcagccagtgggggctgaatcttcaatataaagtacagccaagcccggatggcttagcacaggcgtttattattggtgaagagttcattggtcatgatgattgtgcattagtgctgggtgacaatatcttctatggtcatgatttaccaaagttaatggaagctgccgttaataaagaaagtggtgctaccgtcttcgcttatcatgtaaacgatccggagcgctacggtgtggttgagtttgaccaaaagggcacagccgttagtctggaagaaaaaccattacaaccgaagagtaattacgcggtaacggggctgtatttttatgataatagcgtggtggagatggcgaaaaatcttaagccttccgctcgcggtgagttagaaatcacggatattaaccgtatctatatggagcagggaagattgtctgtcgctatgatggggcgcggttatgcctggctggatacagggacgcatcagagtttgatagaggccagtaattttattgcaaccatcgaagaacgccaggggctaaaagtgtcctgcccggaagagatcgcatttcgtaaaaattttataaatgcacaacaggttatagaactggccgggccattatcaaaaaatgattatggcaaatatttgctgaagatggtgaaaggtttataa

SEQ ID NO: 2618 - protein, 292 aa, Salmonella typhimurium
MKTRKGIILAGGSGTRLYPVTMAVSKQLLPIYDKPMIYYPLSTLMLAGIRDILIISTPQDTPRFQQLLGDGSQWGLNLQYKVQPSPDGLAQAFIIGEEFIGHDDCALVLGDNIFYGHDLPKLMEAAVNKESGATVFAYHVNDPERYGVVEFDQKGTAVSLEEKPLQPKSNYAVTGLYFYDNSVVEMAKNLKPSARGELEITDINRIYMEQGRLSVAMMGRGYAWLDTGTHQSLIEASNFIATIEERQGLKVSCPEEIAFRKNFINAQQVIELAGPLSKNDYGKYLLKMVKGL

SEQ ID NO: 2619 - DNA, 28 bp, Artificial sequence
  primer
atgaaaatgcgtaaaggtattattttag

SEQ ID NO: 2620 - DNA, 28 bp, Artificial sequence
  primer
ttaatttgaatccttcgtcattttataa

SEQ ID NO: 2621 - protein, 283 aa, Artificial sequence
  consensus sequence
  Variant (17)..(17): Xaa in position 17 is any amino acid
  Variant (19)..(20): Xaa in position 19 to 20 is any amino acid
  Variant (28)..(28): Xaa in position 28 is any amino acid
  Variant (62)..(63): Xaa in position 62 to 63 is any amino acid
  Variant (73)..(76): Xaa in position 73 to 76 is any amino acid
  Variant (78)..(78): Xaa in position 78 is any amino acid
  Variant (91)..(91): Xaa in position 91 is any amino acid
  Variant (94)..(95): Xaa in position 94 to 95 is any amino acid
  Variant (97)..(97): Xaa in position 97 is any amino acid
  Variant (99)..(103): Xaa in position 99 to 103 is any amino acid
  Variant (105)..(105): Xaa in position 105 is any amino acid
  Variant (115)..(122): Xaa in position 115 to 122 is any amino acid
  Variant (124)..(128): Xaa in position 124 to 128 is any amino acid
  Variant (138)..(138): Xaa in position 138 is any amino acid
  Variant (150)..(153): Xaa in position 150 to 153 is any amino acid
  Variant (155)..(155): Xaa in position 155 is any amino acid
  Variant (157)..(157): Xaa in position 157 is any amino acid
  Variant (162)..(163): Xaa in position 162 to 163 is any amino acid
  Variant (165)..(165): Xaa in position 165 is any amino acid
  Variant (178)..(179): Xaa in position 178 to 179 is any amino acid
  Variant (181)..(183): Xaa in position 181 to 183 is any amino acid
  Variant (185)..(187): Xaa in position 185 to 187 is any amino acid
  Variant (188)..(188): Xaa in position 188 is any or no amino acid
  Variant (192)..(192): Xaa in position 192 is any amino acid
  Variant (201)..(201): Xaa in position 201 is any amino acid
  Variant (203)..(204): Xaa in position 203 to 204 is any amino acid
  Variant (206)..(208): Xaa in position 206 to 208 is any amino acid
  Variant (210)..(210): Xaa in position 210 is any amino acid
  Variant (212)..(212): Xaa in position 212 is any amino acid
  Variant (214)..(215): Xaa in position 214 to 215 is any amino acid
  Variant (229)..(229): Xaa in position 229 is any amino acid
  Variant (232)..(232): Xaa in position 232 is any amino acid
  Variant (235)..(236): Xaa in position 235 to 236 is any amino acid
  Variant (239)..(239): Xaa in position 239 is any amino acid
  Variant (241)..(241): Xaa in position 241 is any amino acid
  Variant (243)..(243): Xaa in position 243 is any amino acid
  Variant (250)..(250): Xaa in position 250 is any amino acid
  Variant (257)..(257): Xaa in position 257 is any amino acid
  Variant (259)..(261): Xaa in position 259 to 261 is any amino acid
  Variant (263)..(269): Xaa in position 263 to 269 is any amino acid
  Variant (272)..(272): Xaa in position 272 is any amino acid
  Variant (275)..(275): Xaa in position 275 is any amino acid
  Variant (278)..(278): Xaa in position 278 is any amino acid
  Variant (281)..(281): Xaa in position 281 is any amino acid
RKGIILAGGSGTRLYPXTXXVSKQLLPXYDKPMIYYPLSTLMLAGIRDILIISTPQDTPRFXXLLGDGSQWGXXXXYXVQPSPDGLAQAFXIGXXFXGXXXXXLXLGDNIFYGHXXXXXXXXAXXXXXGATVFAYHVXDPERYGVVEFDXXXXAXSXEEKPXXPXSNYAVTGLYFYDXXVXXXAXXXXKPSXRGELEITDXNXXYXXXGXLXVXXMGRGYAWLDTGTHXSLXEAXXFIXTXEXRQGLKVXCPEEIAXRXXXIXXXXXXXLAXPLXKNXYGXYL

SEQ ID NO: 2622 - protein, 60 aa, Artificial sequence
  protein pattern
  Variant (14)..(14): Xaa in position 14 is His or Tyr
  Variant (16)..(16): Xaa in position 16 is Ala, Ile, Leu or Val
  Variant (18)..(18): Xaa in position 18 is any amino acid
  Variant (19)..(19): Xaa in position 19 is Ala, Gly, Ser or Val
  Variant (27)..(27): Xaa in position 27 is Ile or Val
  Variant (38)..(38): Xaa in position 38 is Cys, Ser or Thr
  Variant (39)..(39): Xaa in position 39 is any amino acid
  Variant (41)..(41): Xaa in position 41 is Leu or Met
  Variant (42)..(42): Xaa in position 42 is Ile, Leu or Val
  Variant (44)..(44): Xaa in position 44 is Asp or Gly
  Variant (46)..(46): Xaa in position 46 is any amino acid
  Variant (47)..(47): Xaa in position 47 is Asp or Glu
  Variant (48)..(48): Xaa in position 48 is Ile or Val
  Variant (50)..(50): Xaa in position 50 is Ile, Leu or Val
  Variant (52)..(52): Xaa in position 52 is Ser or Thr
  Variant (54)..(54): Xaa in position 54 is Ala, Leu or Pro
  Variant (55)..(55): Xaa in position 55 is any amino acid
  Variant (56)..(56): Xaa in position 56 is Ala, Asp or Glu
  Variant (57)..(57): Xaa in position 57 is any amino acid
  Variant (58)..(58): Xaa in position 58 is Gly, Pro or Thr
  Variant (59)..(59): Xaa in position 59 is any amino acid
  Variant (60)..(60): Xaa in position 60 is Phe or Tyr
KGIILAGGSGTRLXPXTXXVSKQLLPXYDKPMIYYPLXXLXXAXIXXXLXIXTXXXXXXX

SEQ ID NO: 2623 - protein, 58 aa, Artificial sequence
  protein pattern
  Variant (2)..(2): Xaa in position 2 is Ala or Ser
  Variant (3)..(3): Xaa in position 3 is Ser or Thr
  Variant (8)..(9): Xaa in position 8 to 9 is any or no amino acid
  Variant (11)..(12): Xaa in position 11 to 12 is any or no amino acid
  Variant (20)..(20): Xaa in position 20 is Ala or Val
  Variant (23)..(23): Xaa in position 23 is Asp or Asn
  Variant (24)..(27): Xaa in position 24 to 27 is any amino acid
  Variant (28)..(28): Xaa in position 28 is Ala or Val
  Variant (29)..(29): Xaa in position 29 is Ile, Leu, Met or Val
  Variant (31)..(31): Xaa in position 31 is Ile or Leu
  Variant (36)..(37): Xaa in position 36 to 37 is any amino acid
  Variant (38)..(38): Xaa in position 38 is Ala or Pro
  Variant (39)..(39): Xaa in position 39 is Lys or Arg
  Variant (41)..(41): Xaa in position 41 is any amino acid
  Variant (52)..(53): Xaa in position 52 to 53 is any amino acid
  Variant (55)..(55): Xaa in position 55 is Cys or Val
  Variant (56)..(56): Xaa in position 56 is Ala, Asp, Glu, Asn, Gln or Ser
  Variant (57)..(57): Xaa in position 57 is any amino acid
GXXVFAYXXHXXDPERYGVXEFXXXXXXXSXEEKPXXXXSXYAVTGLYFYDXXVXXXA

SEQ ID NO: 2624 - protein, 59 aa, Artificial sequence
  protein pattern
  Variant (2)..(2): Xaa in position 2 is any amino acid
  Variant (6)..(6): Xaa in position 6 is Ile, Leu or Val
  Variant (8)..(9): Xaa in position 8 to 9 is any amino acid
  Variant (11)..(11): Xaa in position 11 is Leu or Met
  Variant (12)..(15): Xaa in position 12 to 15 is any amino acid
  Variant (17)..(17): Xaa in position 17 is any amino acid
  Variant (19)..(19): Xaa in position 19 is Ala, Glu or Gln
  Variant (20)..(20): Xaa in position 20 is any amino acid
  Variant (34)..(34): Xaa in position 34 is Ala, Asp, Glu or Gln
  Variant (35)..(35): Xaa in position 35 is Ser or Thr
  Variant (37)..(37): Xaa in position 37 is Ile, Leu or Met
  Variant (38)..(38): Xaa in position 38 is Asp, Glu or Gln
  Variant (40)..(40): Xaa in position 40 is Ala, Gly or Ser
  Variant (41)..(41): Xaa in position 41 is any amino acid
  Variant (42)..(42): Xaa in position 42 is Phe or Tyr
  Variant (44)..(44): Xaa in position 44 is Ala or Glu
  Variant (45)..(45): Xaa in position 45 is any amino acid
  Variant (46)..(46): Xaa in position 46 is Ile, Leu or Met
  Variant (47)..(47): Xaa in position 47 is Glu or Gln
  Variant (48)..(48): Xaa in position 48 is any amino acid
  Variant (52)..(53): Xaa in position 52 to 53 is any amino acid
  Variant (55)..(55): Xaa in position 55 is Ala or Ser
  Variant (57)..(57): Xaa in position 57 is Leu or Pro
LXITDXNXXYXXXXXLXVXXMGRGYAWLDTGTHXXLXXAXXXIXXXXXRQGXXVXCXEE

SEQ ID NO: 2625 - protein, 54 aa, Artificial sequence
  protein pattern
  Variant (2)..(2): Xaa in position 2 is any amino acid
  Variant (3)..(4): Xaa in position 3 to 4 is any or no amino acid
  Variant (7)..(7): Xaa in position 7 is Ile, Leu or Met
  Variant (8)..(8): Xaa in position 8 is Asp, Asn or Ser
  Variant (9)..(9): Xaa in position 9 is Ile or Leu
  Variant (10)..(10): Xaa in position 10 is any amino acid
  Variant (12)..(13): Xaa in position 12 to 13 is any amino acid
  Variant (15)..(15): Xaa in position 15 is Ala, Leu or Pro
  Variant (16)..(16): Xaa in position 16 is Asn, Ser or Thr
  Variant (25)..(25): Xaa in position 25 is any amino acid
  Variant (28)..(29): Xaa in position 28 to 29 is any amino acid
  Variant (31)..(31): Xaa in position 31 is Ile, Leu or Val
  Variant (32)..(32): Xaa in position 32 is Ala, Asp or Gly
  Variant (33)..(35): Xaa in position 33 to 35 is any amino acid
  Variant (36)..(36): Xaa in position 36 is Cys or Ser
  Variant (37)..(37): Xaa in position 37 is Ala or Thr
  Variant (39)..(39): Xaa in position 39 is Ile or Val
  Variant (44)..(44): Xaa in position 44 is Ile or Leu
  Variant (45)..(45): Xaa in position 45 is Phe or Tyr
  Variant (46)..(46): Xaa in position 46 is His or Tyr
  Variant (49)..(49): Xaa in position 49 is Asp, Glu or His
  Variant (50)..(50): Xaa in position 50 is Phe or Leu
  Variant (51)..(53): Xaa in position 51 to 53 is any amino acid
  Variant (54)..(54): Xaa in position 54 is Leu or Met
DXXXWGXXXXYXXQXXPDGLAQAFXIGXXFXXXXXXXLXLGDNXXXGHXXXXXX

SEQ ID NO: 2626 - protein, 30 aa, Artificial sequence
  protein pattern
  Variant (2)..(2): Xaa in position 2 is Ala or Cys
  Variant (3)..(3): Xaa in position 3 is Phe, Trp or Tyr
  Variant (4)..(6): Xaa in position 4 to 6 is any amino acid
  Variant (7)..(7): Xaa in position 7 is Phe, Trp or Tyr
  Variant (8)..(8): Xaa in position 8 is Ile or Val
  Variant (9)..(9): Xaa in position 9 is Asp, Gly, Asn, Ser or Thr
  Variant (10)..(12): Xaa in position 10 to 12 is any amino acid
  Variant (13)..(13): Xaa in position 13 is Ile, Leu or Val
  Variant (14)..(15): Xaa in position 14 to 15 is any amino acid
  Variant (16)..(16): Xaa in position 16 is Ile or Leu
  Variant (17)..(17): Xaa in position 17 is Ala, Ile or Val
  Variant (18)..(18): Xaa in position 18 is any amino acid
  Variant (20)..(20): Xaa in position 20 is any or no amino acid
  Variant (22)..(22): Xaa in position 22 is any or no amino acid
  Variant (24)..(24): Xaa in position 24 is Asn or Thr
  Variant (25)..(25): Xaa in position 25 is any amino acid
  Variant (28)..(28): Xaa in position 28 is any amino acid
IXXXXXXXXXXXXXXXXXPXLXKXXYGXYL

SEQ ID NO: 2627 - DNA, 3123 bp, Escherichia coli K12
  CDS (1)..(3123): transl_table=11
atgcaggtgttacccccgagcagcacaggcggcccgtcgcgcctgtttattatgcgtcctgtggccaccacgctgctgatggtggcgatcttactcgccgggattatcggttatcgcgccctgcccgtttcggcgctgccggaagtggactatccgaccattcaggtggtcacgctctacccaggtgccagcccggatgtcatgacctctgccgttaccgcgccgctagaacgccagttcgggcagatgtctggcctgaaacagatgtcgtcgcaaagttccggcggtgcgtcagttatcactttgcagttccagctaacattaccgctcgatgtcgccgagcaggaagtgcaggccgcgattaacgctgcgaccaacttgttgccgagcgatctgcctaacccgccggtttacagcaaagtgaacccggcagatccgccgatcatgacgctcgccgtcacctcaaccgccatgccgatgacgcaagtggaagatatggtggaaacccgcgtcgcgcagaaaatctcgcagatttccggcgtcggcctggtgacgctttccggcggtcagcgtccggctgttcgcgtcaaacttaacgctcaggcgattgccgccctcggcctgaccagcgaaaccgtgcgcaccgccattaccggcgctaacgttaactcggcaaaaggtagcctcgacggcccttcccgtgcggtcacgctttccgcgaacgaccagatgcaatccgccgaagagtatcgccagctaatcatcgcctaccagaacggcgcgccaattcgtctgggcgatgtcgcaactgtagagcaaggtgcagaaaacagctggctcggcgcgtgggcgaacaaagaacaggccattgtgatgaatgttcagcgccagcccggtgctaacattatctccaccgccgacagcattcggcagatgctgccacagctcactgagagtctgccgaaatcggtgaaggtgacagtgctttccgatcgcaccaccaatatccgcgcatccgtcgatgatactcagtttgaattgatgatggctatcgcgctggtagtcatgattatctacctgtttttgcgcaatattccggcgaccatcattcccggtgttgctgtaccgctgtcgttaatcggcactttcgcggttatggtgtttctcgatttttcaatcaataacctgacactgatggcgttaactatcgccaccggattcgtggtcgatgacgccatcgtggtgatcgaaaacatttcccgctatatcgaaaaaggcgaaaaaccgttggcggcggcgctcaagggcgcaggtgaaatcggctttaccattatctcgctgaccttctcactgattgcggtgttgatcccactgctgtttatgggcgatatcgtcgggcgactgttccgcgaatttgctattaccctggcggtagcgattttgatctcagcggtggtgtcgctgaccctgacaccgatgatgtgcgcgcggatgctcagccaggagtcgttgcgtaaacagaaccgcttctcccgtgcctcggaaaaaatgttcgacaggataatcgccgcctatggtcgtggactggcgaaagtgctgaatcatccgtggctgaccttaagcgtggcactcagcacgctgctgcttagcgtgctgctgtgggtgttcattccgaaaggtttcttcccggtacaggacaatggcattattcagggcactttgcaggcaccgcaatccagctcctttgccaatatggcccagcgacaacgccaggtcgcggacgtgattttgcaggatccggcagtgcaaagcctgacctcatttgttggcgttgatggcactaacccgtcgctgaacagtgcacgtttacaaatcaacctcaaaccgttggatgaacgtgatgatcgggtgcaaaaagtcatcgcccgtctgcaaacggcggtagataaagtgccgggcgtcgatctcttcctgcaaccaacgcaggatctgactattgatactcaggtcagccgcacccagtaccagtttaccttgcaggccacgtcactggatgcgctcagtacctgggtgccacagttgatggaaaaactccagcaactgccacagctttctgatgtctccagcgactggcaggacaaagggctggtggcgtatgtcaatgttgatcgcgacagcgccagccgtctggggatcagcatggcggatgtcgataacgccctgtacaacgcgtttggtcagcggctgatttccactatttatactcaggccaaccagtatcgcgtggtgctggagcacaacaccgaaaataccccaggcctcgcggcgctggataccattcgcctgaccagcagcgacggcggcgtggtgccgctaagctcaattgccaaaattgagcagcgttttgcgccgctctccatcaaccatctggatcagttcccggtaacgaccatctcctttaacgtgccggataactattcgctgggcgatgcggtgcaggcgattatggacaccgaaaagacgctgaatctgccggtggatatcaccacgcagttccagggcagcaccctcgccttccagtcggcgctgggcagcactgtctggctgattgtcgcggcggtggtggcgatgtatatcgtgctcggcattctgtacgagagctttattcacccgatcaccattctctcgacgctacccaccgcaggggttggcgcactgctggcgttgctgattgctggtagcgaactggatgtgattgcgattatcggcattattttgctgatcggtatcgtgaagaagaacgccatcatgatgatcgacttcgcgctggctgctgagcgcgagcaaggcatgtcgccgcgcgaggcaatctaccaggcttgtctgttgcgttttcgtccgatcctgatgaccactctggcggctctgcttggcgcgctgccgctgatgttgagtaccggggtcggcgcggaactgcgtcgtccgttaggtatcggcatggtcggcggtctgattgtcagccaggtgctgacgctgtttaccacgccggtgatttatttgctgttcgaccgcctggcattgtggaccaaaagccgctttgcccgtcatgaagaggaggcgtaa

SEQ ID NO: 2628 - protein, 1040 aa, Escherichia coli K12
MQVLPPSSTGGPSRLFIMRPVATTLLMVAILLAGIIGYRALPVSALPEVDYPTIQVVTLYPGASPDVMTSAVTAPLERQFGQMSGLKQMSSQSSGGASVITLQFQLTLPLDVAEQEVQAAINAATNLLPSDLPNPPVYSKVNPADPPIMTLAVTSTAMPMTQVEDMVETRVAQKISQISGVGLVTLSGGQRPAVRVKLNAQAIAALGLTSETVRTAITGANVNSAKGSLDGPSRAVTLSANDQMQSAEEYRQLIIAYQNGAPIRLGDVATVEQGAENSWLGAWANKEQAIVMNVQRQPGANIISTADSIRQMLPQLTESLPKSVKVTVLSDRTTNIRASVDDTQFELMMAIALVVMIIYLFLRNIPATIIPGVAVPLSLIGTFAVMVFLDFSINNLTLMALTIATGFVVDDAIVVIENISRYIEKGEKPLAAALKGAGEIGFTIISLTFSLIAVLIPLLFMGDIVGRLFREFAITLAVAILISAVVSLTLTPMMCARMLSQESLRKQNRFSRASEKMFDRIIAAYGRGLAKVLNHPWLTLSVALSTLLLSVLLWVFIPKGFFPVQDNGIIQGTLQAPQSSSFANMAQRQRQVADVILQDPAVQSLTSFVGVDGTNPSLNSARLQINLKPLDERDDRVQKVIARLQTAVDKVPGVDLFLQPTQDLTIDTQVSRTQYQFTLQATSLDALSTWVPQLMEKLQQLPQLSDVSSDWQDKGLVAYVNVDRDSASRLGISMADVDNALYNAFGQRLISTIYTQANQYRVVLEHNTENTPGLAALDTIRLTSSDGGVVPLSSIAKIEQRFAPLSINHLDQFPVTTISFNVPDNYSLGDAVQAIMDTEKTLNLPVDITTQFQGSTLAFQSALGSTVWLIVAAVVAMYIVLGILYESFIHPITILSTLPTAGVGALLALLIAGSELDVIAIIGIILLIGIVKKNAIMMIDFALAAEREQGMSPREAIYQACLLRFRPILMTTLAALLGALPLMLSTGVGAELRRPLGIGMVGGLIVSQVLTLFTTPVIYLLFDRLALWTKSRFARHEEEA

SEQ ID NO: 2629 - DNA, 3141 bp, Agrobacterium tumefaciens str. C58
  CDS (1)..(3141)
atgatcccaaatttctgtatcaaccgccccgtcgccaccacacttctcgccatcggccttgtgctcgccgggcttgccggcttccgcctgctgcccgtcgctgccctgccgaaggtggattttccgacgatcaacgtctcctcgtcgctctcgggcgcctcgccgcaaaccatggccacatcggtcaccacaccgctggtcaagcagttcgaaaccattcccggcgtcagcgaaatcagcgccaccaacacgctcggcaacagctcgatcgtgctgcagttcgatctcaaccgcgatatcgacgccgcagcagccgatgttcaggccgccatttcgcgcgcccaacggcaattgccgagcaacatgacgacaaccccaagctatcgcaagaccaatccggccgatgcgccggtgctgctgcttgccgtcaacagcaaggaaatgccgaccagcaaggtggatgagatcgccgaaaacatcatctcgccgcttctctccaccatttcgggcgtcgcacaggtgagcatctatggtgcgcaaacctatgccgtgcgcattggtctcgatccaacgcagcttcaggcaagagggctcggtgttgatacggtcacaacggccatcacccaggcgaacaatcaggtacccgtgggtgccttgcagaccgacaatcagcgcttgaccatcgaggccgatacccagcggaccaatgcggccgccttccgctcgctggtcgtctccacgaataatggcgcgccgattcatctcggcgatatcgccaatgtcactgacagcatcgacaataccaatgccggcagctggttcgatggcgaacaggctattattcttgccgtgcagcggcagccggatgccaataccgtcgaagtggttgatgccatcaaggccaagctgccggcgctgcaacagcaattgccgccatccgtcaatatccacgtcatgaacgatgcttcgaccgccatcaaggatgcgatctctgacgttcagttcaccctgttcctcaccatcgggctggtggttgcggtcatctatcttttcaccgggcacctgacggcaaccatcattccgggccttgccgtgccgctgtcactcatcaccgctttcggcatgatgtatgttctgggctacagcatcgacaatatctcgctgctcgggctgacgctatcggtgggcctggtggtggatgacgccatcgtcatgctggagaacatcctgcggctgcatgaaaaaggcctgcccatgcgtgaggcggccttgcagggggcggcggaagtcagcggcaccatcctgtccatgtccgtctcgctggtggccgtcttcattcccattctgttgatgggcggcgtgatcggcaggctcttcaacgagttcggtatggtcgtcacgctggcgatcatggcctcggcgctggtctcactgacagtaacgccgatgctcgcttcgcgcctgtccggccactcctcgcggccgccggccatcatccgctggttcgatgccggcttcgagcgcacgcttcgcctctacggcaaggccgtcggctggtgcctttcccatcgccgcatcgtgcttgcctcatttctcgcctcggtcgccgcctcggtctacctgttcgaaaccctgccctccagcttcttcccgcaggaagatatcggccgcctttctgtctcgacacaggcgcgtgaggatatttcctacacggcgatgcgggatctccaggcacaggtcgccgatcagatccgcaagaacccggcggtcgtgcatgtcacttccatcgtcggtggcaattcacgcaatccgctgaacaacggttcgatgtttgtggaattgaagccaaaggaagaacgcgcgccgataagccaggtgctgaccgaactgggtcaggccacgtcgaaagtggcgggcattcgcacctatatcaacccgcagcagagcctgcgtttcggcggacgcagttccgccagccaatatcagctcgtcgttcagggcttgaatgccgatacgaccaatgaatggtcgaacaagctgatggaggcgatgcgccgcgaccacacattcaccgccgtcaccaccgacgcccagaacggggcgattgccgcgacgatctccgtcgatccggaaaaagcggccgccttcggcatcaccaatgaccagttacgcaagacactggaaatgtccttcggcggctataccgcggcacaaatccagtcgacgggcgatagctacgacgtcatcgtggaattcgacagctccaaatcctggaatgacgatttcctcagcgatatcaatattctttcggcgaaatcaggagttctggttccactttccaacttcgcctcgctgacccgtacgcaggcgccggttaccatcaaccagacgggccagctcgtctccaccaccatctccttcaacctgccggatggcgtggcgctttccgatgccacaagccggatcgaccagatcaagaccacgatcggcctgccgcaggatgtgttcaccagctatggcggtacggcggcgatcttccagcagagccagggcaataccggcgtcctcattctggcggcagtgctgaccatctatgtggtgctgggcgtgctctatgaaagcttcatccacccgctgaccatcctctccggcctgccggccgcagcctttggcgctcttgtggcgctgaaagtgatgggcatggatttctcgatcatcgcgctcatcggccttttgatgctgatcggtatcgtgaagaaaaacgcgatcatgatgatcgacgtggcggtggagttgatgcgcgaaaaggcggaaccgcccgcaatcgccattcacgaagcctgcgtgcgccggttccggccgatcatgatgaccaccttctgcgcattgctgggcgcactgcccatcgcgctcggctccggcgcaagttcggaactgcgccagccgctcggcatcgccgttgtcggtggtctcatcgtctcgcaactgctgacgctgttcatcacacccgtgatcttcgtggaaatggaccggttcggccacttcctcaccgggctattttcccgcaagaaaaacgttgagccccatgcagaacagcaaaaaccgcgtaggaaggccgaaccggattccgtggcggcctaa

SEQ ID NO: 2630 - protein, 1046 aa, Agrobacterium tumefaciens str. C58
MIPNFCINRPVATTLLAIGLVLAGLAGFRLLPVAALPKVDFPTINVSSSLSGASPQTMATSVTTPLVKQFETIPGVSEISATNTLGNSSIVLQFDLNRDIDAAAADVQAAISRAQRQLPSNMTTTPSYRKTNPADAPVLLLAVNSKEMPTSKVDEIAENIISPLLSTISGVAQVSIYGAQTYAVRIGLDPTQLQARGLGVDTVTTAITQANNQVPVGALQTDNQRLTIEADTQRTNAAAFRSLVVSTNNGAPIHLGDIANVTDSIDNTNAGSWFDGEQAIILAVQRQPDANTVEVVDAIKAKLPALQQQLPPSVNIHVMNDASTAIKDAISDVQFTLFLTIGLVVAVIYLFTGHLTATIIPGLAVPLSLITAFGMMYVLGYSIDNISLLGLTLSVGLVVDDAIVMLENILRLHEKGLPMREAALQGAAEVSGTILSMSVSLVAVFIPILLMGGVIGRLFNEFGMVVTLAIMASALVSLTVTPMLASRLSGHSSRPPAIIRWFDAGFERTLRLYGKAVGWCLSHRRIVLASFLASVAASVYLFETLPSSFFPQEDIGRLSVSTQAREDISYTAMRDLQAQVADQIRKNPAVVHVTSIVGGNSRNPLNNGSMFVELKPKEERAPISQVLTELGQATSKVAGIRTYINPQQSLRFGGRSSASQYQLVVQGLNADTTNEWSNKLMEAMRRDHTFTAVTTDAQNGAIAATISVDPEKAAAFGITNDQLRKTLEMSFGGYTAAQIQSTGDSYDVIVEFDSSKSWNDDFLSDINILSAKSGVLVPLSNFASLTRTQAPVTINQTGQLVSTTISFNLPDGVALSDATSRIDQIKTTIGLPQDVFTSYGGTAAIFQQSQGNTGVLILAAVLTIYVVLGVLYESFIHPLTILSGLPAAAFGALVALKVMGMDFSIIALIGLLMLIGIVKKNAIMMIDVAVELMREKAEPPAIAIHEACVRRFRPIMMTTFCALLGALPIALGSGASSELRQPLGIAVVGGLIVSQLLTLFITPVIFVEMDRFGHFLTGLFSRKKNVEPHAEQQKPRRKAEPDSVAA

SEQ ID NO: 2631 - DNA, 3141 bp, Xanthomonas campestris pv. campestris str. ATCC 33913
  CDS (1)..(3141)
atgaacatctccgcgcccttcatcaagcgcccgatcggcacctcgttgctggcgatcggtttgttcgtgatcggattgatgtgctacctgcggctgggcgtggcggcgttgccgaatatccaaatcccggtgatcttcgtgcacgccacgcagtccggcgccgacgccagcaccatggcctccacggtcaccgcgccactggaacgccacctgggccagctacccggcatcgaccgcatgcgctcctccagttcggagagcagcagcatggtgttcatgattttccagagtaatcgcgacattgattcggccgcgcaggatgtgcagaccgcgatcaactcggcacagtccgatctgccctccgggctcggcacgccgatgtaccagaaggccaacccgaacgacgacccggtcatcgccattgcgctgacctccgacacccaatcggccgatgagctctacaacgtggccgattcgctgctggcgcaacggctgcggcagatcaccggcatcagttcggtggatatcgccggtgcctccacgccagccgtgcgcgtggatgtggacctgcgcgcgctcaacgcattgggcttgaccccggacgacctgcgcaacgctgtgcgcgcggccaacgtcacctcgccgaccggctttttgtccgacggcaacaccaccatggcgatcatcgccaacgattcggtggccaaggccgccgacttcgcgcagctggcgatctccacccaatccaacgggcgcatcgtgcgcctgggcgatgtggccaccgtctacgacggtcagcaggatgcctaccaggccgcctggttcaacggcaaacccgcggtggtgatgtatgccttcacccgcgccggtgccaacattgtcgaaaccgtggaccaggtgaaggcgcagattcccgagctgcgcgcctacctgcaacccggcacgacccttacaccgtatttcgaccgcacgcccaccatccgcgcctcgctgcatgaagtgcaggccacgctgatgatcagcctggcgatggtggtgctgaccatggcgctgttcctgcgccgcctggcgcccacgctcatcgccgcggtcaccgtgccgctgtcgctggccggctcggcgttggtgatgtacgtgctcggcttcaccttgaacaacctcagcctgctggcgctggtgatcgcgattggcttcgtggtcgacgatgcgatcgtggtgatcgaaaacatcatgcgccacctcgacgagggcatgccgcgcctgcaggccgcactcaccggcgcgcgcgagatcggcttcaccatcgtgtcgatcactgcctcactggtggcggtgttcattccgatgttgtttgccagcggcatggtcggcgcgttcttccgcgagttcaccgtgaccttggtggccgccatcgtggtttcgatgctggtgtcgctgacgctgacgccggcgttgtgcagccgcttcctctccgcccataccgcgccggaaaaacccagccgtttcggcgcctggctggatcgcatgcacgaccgcatgctcgcggtgtacacggtggcactggatttttcgttgcggcatgccttgctgttgtcgctgacgccgctggtgctgatcgccgccaccatcttcctgggtggtgcggtcaagaaaggctcgttcccgccacaggacaccggcctgatctggggccgcgccaattccagcgccatggtgtcgtttgccgacatggtcagccgccagcgccgcatcaccgacatgttgatggccgacccggcggtgaaaaccgtgggcgcgcggctgggctccggccgccaggggtccagcgcctcattcaacatcgaactgaaaaaacgcgacgaaggccggcgcgagaccaccgcgcaggtggttgcgcgcctgagcgccaaggccgaccgttacccggatctagatttgcgcctgcgcgcaatccaggacctgcccagcgatggcggtggcggtaccagtcaaggagcgcaataccgcgtgtcgctgcagggcaacgatctcgcgcaactgcaggaatggctgcccaaggtgcaggccgcactgaaaaagaacccgcgcctgcgcgatgtcggtaccgacgtggatacctcgggcctgcgccagaacatcgtgatcgaccgcgccaaggccgcgcgcctgggaatttcagtgggtgccatcgacggcgcactgtatggcgcgttcggccagcgctccatctccaccatctattcggatctcaaccagtacagcgtggtggtcaatgcactgccatcgcagaccgccacgcccaaggcactggatgaagtgttcgtgcccaatcgcgccggccagatggtgccgatcaccgcggtggccacgcaggtgccgggcctggcgccgccgcagatcacccacgacaaccagtattcgacgatggatctgagctacaacctcgcaccgggcgtgagcaccggcgaggcggatctgatcatcaagaacaccgtggaagggctgcgcatgcccggcgacatccgcatcagcgatggtggcggtttcaacgtgcaactcaatcccaattcgatgggcgtgttgctgctggccgcagtgctcaccgtgtacatcgtgctgggcatgctctacgagagcctgatccacccggtgaccatcctgtccacgctgccggccgccggcgtgggcgcgctgctggcgttgttcatcaccaacaccgagctgtcggtgatttcgatgatcgcgctggtgctgctgatcggcattgtcaaaaagaacgccatcatgatgatcgacttcgcactggtggcgcagcgcgagcatggcaaggatgcacgtgcggctgcacgcgaggcatcgatcgtgcgcttccgcccgatcatgatgaccacgatggtggcgatcctggccgcggtgccgctggcggtggggctgggcgaaggctcggaactgcgccggccgctgggtatcgcgatgattggcgggttggtgttctcgcagggcctgaccctgctcagcaccccggcgctgtacgtgatcttttcctgcctgagcgagcgctggaaggcgcgccgcgcgcgcaagcgtgcacagcgggccgagcgcgccgccgcacgccgcccggcagcctccgcacactaa

SEQ ID NO: 2632 - protein, 1046 aa, Xanthomonas campestris pv. campestris str. ATCC 33913
MNISAPFIKRPIGTSLLAIGLFVIGLMCYLRLGVAALPNIQIPVIFVHATQSGADASTMASTVTAPLERHLGQLPGIDRMRSSSSESSSMVFMIFQSNRDIDSAAQDVQTAINSAQSDLPSGLGTPMYQKANPNDDPVIAIALTSDTQSADELYNVADSLLAQRLRQITGISSVDIAGASTPAVRVDVDLRALNALGLTPDDLRNAVRAANVTSPTGFLSDGNTTMAIIANDSVAKAADFAQLAISTQSNGRIVRLGDVATVYDGQQDAYQAAWFNGKPAVVMYAFTRAGANIVETVDQVKAQIPELRAYLQPGTTLTPYFDRTPTIRASLHEVQATLMISLAMVVLTMALFLRRLAPTLIAAVTVPLSLAGSALVMYVLGFTLNNLSLLALVIAIGFVVDDAIVVIENIMRHLDEGMPRLQAALTGAREIGFTIVSITASLVAVFIPMLFASGMVGAFFREFTVTLVAAIVVSMLVSLTLTPALCSRFLSAHTAPEKPSRFGAWLDRMHDRMLAVYTVALDFSLRHALLLSLTPLVLIAATIFLGGAVKKGSFPPQDTGLIWGRANSSAMVSFADMVSRQRRITDMLMADPAVKTVGARLGSGRQGSSASFNIELKKRDEGRRETTAQVVARLSAKADRYPDLDLRLRAIQDLPSDGGGGTSQGAQYRVSLQGNDLAQLQEWLPKVQAALKKNPRLRDVGTDVDTSGLRQNIVIDRAKAARLGISVGAIDGALYGAFGQRSISTIYSDLNQYSVVVNALPSQTATPKALDEVFVPNRAGQMVPITAVATQVPGLAPPQITHDNQYSTMDLSYNLAPGVSTGEADLIIKNTVEGLRMPGDIRISDGGGFNVQLNPNSMGVLLLAAVLTVYIVLGMLYESLIHPVTILSTLPAAGVGALLALFITNTELSVISMIALVLLIGIVKKNAIMMIDFALVAQREHGKDARAAAREASIVRFRPIMMTTMVAILAAVPLAVGLGEGSELRRPLGIAMIGGLVFSQGLTLLSTPALYVIFSCLSERWKARRARKRAQRAERAAARRPAASAH

SEQ ID NO: 2633 - DNA, 3141 bp, Xanthomonas axonopodis pv. citri str. 306
  CDS (1)..(3141)
atgaacatctccgcgcccttcatcaagcgcccgatcggcacctcgctgctggcgatcggtttgttcgtgatcggattgatgtgctacctgcggctgggcgtggcggcgctgccgaacatccagattccgatcatcttcgtgcacgctacccaatccggtgccgacgccagcaccatggcctccaccgtcaccgcgccgctggaacgtcacctgggccagttgcccgggatcgaccgcatgcgctcgtccagctcggagagcagcagcctggtcgtactggtgttccagagcagccgcaacatcgattcggccgcgcaggacatccagaccgcgatcaacgcatcgcaatcggacctgccctccgggctaggaacgccgatgtactccaaggccaacccgaacgacgacccggtgatcgccatcgcgttgacctcggagacgcaatcggccgatgagctctacaacgtggccgattcgctgctggcgcagcggctgcgccagatcaccggcatcagctcggtggacatcgccggtgcgtccaccccggcagtacgcgtggacgtggacctgcgcgcactcaacgcgctgggcctgacaccggacgatctgcgcaatgcggtgcgcgcggccaatgtgacctcgccgaccggattcctgtccgacggcaacaccaccatggccatcatctccaacgattcggtgtccaaggccgccgattttgcgcagctggcgatctccacccagtccaacgggcgcatcgtgcgcctgggcgatgtggccaccgtttacgacggccagcaggatgcctatcaagccgcctggttcgacggcaaaccggcggtggtgatgtacgccttcacccgcgccggcgccaacatcgtcgagaccgtcgaccaggtgaaggcgcagattcccgaactgcgtagctatctgcagcccggcaccacgctcacgccctacttcgaccgcacgcccaccattcgcgcctcgctgcacgaggtgcaggccacgctgatgatcagcctggcgatggtgatcctgaccatggcgctgttcctgcgccggctcgcgcccaccctgatcgccgctgtcaccgtgccgctgtcgctggccggctcggcgctggtgatgtacgtgctcggcttcaccttgaacaacctcagcctgctggcgttggtcattgcgattggcttcgtggtcgacgatgcgatcgtggtgatcgaaaacgtcatgcgccatctggacgaaggcatgtcgcgcctggacgcggcgttggccggtgcgcgcgagatcgggttcaccatcgtgtcgatcaccgcctcgctggtggcggtgttcatcccgatgctgttcgccagcggcatgatcggtgcgttcttccgcgagttcaccgtgacgttggtggcggcgatcgtggtgtcgatgctggtctcgctgaccttgacgccggcgctgtgcagccgtttcctgtcgccgcacgccgagcctgaaacacccgaccgtttcggcgcctggctggaccgcatgcacgaacgcatgctgcgcgcgtacacggtggcgctggatttctcgctgcgccacgcactcctgctgtcgttgacgccgttgttgctgatcgccgccaccatctttctgggcagtgcggtcaagaagggctcgttccccgcgcaggacaccggcctgatctggggccgcgccaattccagcgccacggtgtcgtttgccgacatggtcagccgccagcgccgcatcaccgacatgctgatggccgacccggcggtgaaaaccgtcggcgcacgcctgggctccggccgtcagggctccagcgcatcgttcaatatcgagctcaaaaagcgcgatgagggccgtcgcgacaccaccgccgaagtggtcgcgcgcctgagcgccaaggccgaccgttacccggacctggacttgcgcctgcgggcgatccaggacctgcccagcgacggcggcggcggcaccagccagggcgcgcaataccgcgtgtcgctgcagggcaacgacctggcgcagctgcaggaatggcttcccaaactgcaggctgcgctgaaaaagaacccgcacctgcgcgatgtcggtaccgacgtggataccgccggcctgcgccagaacatcgtgatcgaccgcgccaaggcggcgcgcctgggcatctcggtgggcgccatcgatggtgcgctgtatggcgcgttcggccagcgctcgatttccaccatctattccgatctcaatcagtacagcgtggtggtcaatgcactgccctcgcagacagccacccccaaggcgctggatcagatcttcgtgcccaaccgtgccggccagatggtgccgatcaccgcggtcgccacccaggcaccgggcctggcgccgccgcagatcatccacgaaaaccagtacaccacgatggagctgagctacaacctggcaccgggcgtcagcacgggcgaggcggacttgatcatcaaatccaccgtggagggcctgcgcatgcccgacggcatccgcctcagtggcgacgacagcttcaacgtgcagctcagtcccaattcgatgggcatcctgctgctggccgcagtgctcaccgtctacatcgtgctgggcatgctctacgagagcctgatccatccggtgaccatcctgtccaccttgccggccgccggcgtgggcgcgctgctggcgttgttcatcaccaacaccgaactgtcggtgatctcgatgatcgcgctggtgctgctgatcggcatcgtcaagaaaaacgccatcatgatgatcgacttcgcgttggtggcgcagcgcgtgcatggcatggatgcgcgcgcagccgcacgcgaggcctcgatcgtgcgcttccgcccgatcatgatgaccacgatggtggcgatcctggccgccgtgccgctggcggtgggcctgggcgagggctcggagctgcgtcgccctctaggtatcgcgatgatcggcgggctggtgttctcgcagagcctgaccctgctcagcacgccggcgctatacgtgatcttctcgtgcctgagcgagcgctggaaggcgcgtcgcgcccgcgcgcgggcacgccgtgcagaacgcgcagcggcgcgtcgcccggccgcccaagcgcactga

SEQ ID NO: 2634 - protein, 1046 aa, Xanthomonas axonopodis pv. citri str. 306
MNISAPFIKRPIGTSLLAIGLFVIGLMCYLRLGVAALPNIQIPIIFVHATQSGADASTMASTVTAPLERHLGQLPGIDRMRSSSSESSSLVVLVFQSSRNIDSAAQDIQTAINASQSDLPSGLGTPMYSKANPNDDPVIAIALTSETQSADELYNVADSLLAQRLRQITGISSVDIAGASTPAVRVDVDLRALNALGLTPDDLRNAVRAANVTSPTGFLSDGNTTMAIISNDSVSKAADFAQLAISTQSNGRIVRLGDVATVYDGQQDAYQAAWFDGKPAVVMYAFTRAGANIVETVDQVKAQIPELRSYLQPGTTLTPYFDRTPTIRASLHEVQATLMISLAMVILTMALFLRRLAPTLIAAVTVPLSLAGSALVMYVLGFTLNNLSLLALVIAIGFVVDDAIVVIENVMRHLDEGMSRLDAALAGAREIGFTIVSITASLVAVFIPMLFASGMIGAFFREFTVTLVAAIVVSMLVSLTLTPALCSRFLSPHAEPETPDRFGAWLDRMHERMLRAYTVALDFSLRHALLLSLTPLLLIAATIFLGSAVKKGSFPAQDTGLIWGRANSSATVSFADMVSRQRRITDMLMADPAVKTVGARLGSGRQGSSASFNIELKKRDEGRRDTTAEVVARLSAKADRYPDLDLRLRAIQDLPSDGGGGTSQGAQYRVSLQGNDLAQLQEWLPKLQAALKKNPHLRDVGTDVDTAGLRQNIVIDRAKAARLGISVGAIDGALYGAFGQRSISTIYSDLNQYSVVVNALPSQTATPKALDQIFVPNRAGQMVPITAVATQAPGLAPPQIIHENQYTTMELSYNLAPGVSTGEADLIIKSTVEGLRMPDGIRLSGDDSFNVQLSPNSMGILLLAAVLTVYIVLGMLYESLIHPVTILSTLPAAGVGALLALFITNTELSVISMIALVLLIGIVKKNAIMMIDFALVAQRVHGMDARAAAREASIVRFRPIMMTTMVAILAAVPLAVGLGEGSELRRPLGIAMIGGLVFSQSLTLLSTPALYVIFSCLSERWKARRARARARRAERAAARRPAAQAH

SEQ ID NO: 2635 - DNA, 3108 bp, Rhodopseudomonas palustris CGA009
  CDS (1)..(3108)
atggcctcgatgtccgacccgttcatccgaaggccggtcggcaccacgctgctggcgatcgggttgtttctggtcggcatggtggcctatgcggtgctgccggtggcggcgctgccgaacgtcgatttcccgatgatcatggtgcaggcgtcgcggcctggggcggcgccgtcggtgatggcctcgaccgtcgctgcgccgctggagcggcggctcggcgaaatcgccgggctcgatcagatcacctcgaccagctcgctcggcaacacccgcattcagttgcagttctcgatcggccgcaacgtcgacagcgccgcgcgcgatgtgcaagcggcgatcaacgccgcggtcagcgacctgccgaccgacctgccgacgctgcccaagttccgcaagttcaactccgcggcggcgccggtctacatcctggcgctgacctccaagaccatgccggcgagcgcgatctacgacgtcgccgacacggtgttggcgcagcgcatctcgcaggtgccgggcgtcggcgacgtcacggtctccggcgccgaccagcccgcggtgcggatcgcgctcaacccggtcgcgctgtctaacgccggcatctcgaccgacgacgtccgcaccgcgatcatcaacgccaatccggtgggcccggtcggctcgttcgacggaccgcggctgaccgaaacgctgtcgaccaatccgcagatgcgaaccgcggagcagttccgcagcatcgtcatcaagagcgatacgaacggcacggtgcggctgtcggatgttgccaccgtcagcgacgccacccgcaacgcccgcaccatcgcctggtacaacaagcagccggcggtgatcatccagatcaccaagcagggcgacgccaacgtcatcgagaccgtcgaccgggtcaaagctctgctgcccgagctgaagcagtggattccggcaggcgtcgacatctcggtgctggccgaccgcaccggcacgatccgcgccagcgtcgacgacatgcagtggacgctgctggccaccgcggtgctggtgatggcggtggtgctgctgttcttgcgccggctgacgcccacgatcgccgccggcgtgtcggtgccgctggcgctggccggaacctgcgccggaatgtggatcagcgggttttcgatcaacaatctgtcgctgatggcgctggcgatcgcggtcggcttcgtcgtcgacgatgcgatcgtgatgatcgagaacatgtaccgcaacctcgagcgcggcatggcgccgctgccggccgcgatggagggcgcccggcagatcggctttacggtgctgtcgatcagcctgtcgctggtcgccgcgttcgcgccgctgatcttcatggatggcctgatcggccggctgctgcgcgagttctcgctgacgctgacgtttgcgatcgtggtctcgaccgtggtgtcgctgacggtgacgccgatgatctgcgcccattacatccgcgccgaagcgtcgccgaaacagacttggttcgatcgcgcggtcgaaggcacgctgaaccgcatcgtcggcttctatgcctggacgctgcgcggcgtgctgtcggtgccgtggctgaccgttgtggtgttcatcgccaccatcgcgctcacggtgacgctgtatatcaaggtgcccaagggctatttcccgattgacgattccggcttcatcatcggctcgacccgcgcctcggccgacatctcgttccagtcgatgcggactttgcaggaggagctcgccgacatcgtgatggccgatccggcggtgagcggcgtcggctcggtgctgggtggcggcggaccgggcgccggcggcgccaatcgcggcacgatgttcatcaatctgaagccgaccgccgaacgcgagggtgtcaccactcagatggtgatcgatcgcctgcgccggcagctcagccgcgttgccggcatccggctgtttatgttcgccgcccaggatctgcgcggcggcggccgctccagcgaatccaattatcagtacacgctgagcagtcccgatctcgacctgttgcagaaatgggcgccgatcgtcgccaagcggatgcagaccgtcgacggcatcaccgacgtgaccagcgatcgcgacgacggcggcctgcagctgacgctgtcgatcgaccgcaccatggcgtcgcggctcggcgtgcggattcaggacatcgacaacgcgctcaacaacgcattctcgcagcggcagatcgcgacgatctacacccagcgcaaccagtatcaggtggtgctggagatcgacccgaacttccagaccgatccaaccgacctgaagcggatctatgtcgacagcaccagcggcgatcaggtgccgttgtcggcggtggtgcgcgccgagcgcgggctggcggcgctggcggtcgcccatacccagggcgtgccgtcgaccacggtgtcgttcaacacgttgcccgacgtgccgctgcaggaggcgaccgccaacattcagcgcgcggtcgatgaactgcacatgccggaggggattcgcggctcattcgacggcaacgccggcgatttccgcgccacctccaataagcagccgctgctgatcctggcggccttcatcgcgatgtacatcgtgctcggggtgctctacgagagcctggcgcatccgctgacgatcatctcgacgctgccgtcggcggggctcggcgcgctgctggcgctgctggtcaccggcaccgagctgtcggtgatcgccttcgtcggcatcatcatgttgatcggcatcgtcaagaagaacgggatcatgatggtggacttcgcgctggaggccgaacgcgagcgcggtctgccgtcggccgacgccatcttcgaagcctgcatcgtgcgcttccggccgatcctgatgaccacgctggcggcgctgttcgcggcgatcccgctggtggtggcggtcggccccggcaccgagctgcggcggccgctcggcatcaccatcatcggcgggctgttcgtgtcgcaggtgctgacgttgtatacgacgccggtgatctatctgttgatcgaccgggtgcggcagcggcgctggcgccgcggcgcgccggccgcagtgccggcagagtag

SEQ ID NO: 2636 - protein, 1035 aa, Rhodopseudomonas palustris CGA009
MASMSDPFIRRPVGTTLLAIGLFLVGMVAYAVLPVAALPNVDFPMIMVQASRPGAAPSVMASTVAAPLERRLGEIAGLDQITSTSSLGNTRIQLQFSIGRNVDSAARDVQAAINAAVSDLPTDLPTLPKFRKFNSAAAPVYILALTSKTMPASAIYDVADTVLAQRISQVPGVGDVTVSGADQPAVRIALNPVALSNAGISTDDVRTAIINANPVGPVGSFDGPRLTETLSTNPQMRTAEQFRSIVIKSDTNGTVRLSDVATVSDATRNARTIAWYNKQPAVIIQITKQGDANVIETVDRVKALLPELKQWIPAGVDISVLADRTGTIRASVDDMQWTLLATAVLVMAVVLLFLRRLTPTIAAGVSVPLALAGTCAGMWISGFSINNLSLMALAIAVGFVVDDAIVMIENMYRNLERGMAPLPAAMEGARQIGFTVLSISLSLVAAFAPLIFMDGLIGRLLREFSLTLTFAIVVSTVVSLTVTPMICAHYIRAEASPKQTWFDRAVEGTLNRIVGFYAWTLRGVLSVPWLTVVVFIATIALTVTLYIKVPKGYFPIDDSGFIIGSTRASADISFQSMRTLQEELADIVMADPAVSGVGSVLGGGGPGAGGANRGTMFINLKPTAEREGVTTQMVIDRLRRQLSRVAGIRLFMFAAQDLRGGGRSSESNYQYTLSSPDLDLLQKWAPIVAKRMQTVDGITDVTSDRDDGGLQLTLSIDRTMASRLGVRIQDIDNALNNAFSQRQIATIYTQRNQYQVVLEIDPNFQTDPTDLKRIYVDSTSGDQVPLSAVVRAERGLAALAVAHTQGVPSTTVSFNTLPDVPLQEATANIQRAVDELHMPEGIRGSFDGNAGDFRATSNKQPLLILAAFIAMYIVLGVLYESLAHPLTIISTLPSAGLGALLALLVTGTELSVIAFVGIIMLIGIVKKNGIMMVDFALEAERERGLPSADAIFEACIVRFRPILMTTLAALFAAIPLVVAVGPGTELRRPLGITIIGGLFVSQVLTLYTTPVIYLLIDRVRQRRWRRGAPAAVPAE

SEQ ID NO: 2637 - DNA, 3099 bp, Geobacter sulfurreducens PCA
  CDS (1)..(3099)
atgaacattgccgaaatcttcatccgccggccggtcatgacgagtctcatcatgctggcggttatgcttttcggcctcatcgcctacgacaagctgccggtcaatgacctgcccaccgtcgactatccgaccatccaggtttccgccactctgccgggcgccaaccccgacaccatggcctcatcggtggcacttcccctggagcgcgagttctccaccattgccggtgtcgactctatgacctccaccaacggcatcggcatatcccgcattaccatcaagttcaccctggagcgggacatcgatgccgcggcccaagatgtccaggccgccatttcaagggcccagcgccagcttcctcaggacatgccggcccctccatcgttccagaaggtgaatccggctgatcagccgatcctctatctggtcctcagttcgccgacgcttcccctctccacggtccacgaatacgccgataccatgatcgcccagcggatttccatggtcaacggcgtagcctcggtacagatctacggctcccagaaatatgcggtacgggttcaggtggaccccaaggccctggcggcccgcaaaatcggcattgacgaggtggcccaggccctggagcgggggaacgtgaaccttcccaccggcaccctccagggaaagcacgaggccctgacgatccagaccagtggccagctttacagcgcaaaggagtatgagccgctcatcgtcgcctatcgcaacggttcaccggtccgtctcggagagatcggccgggttattgacagcgtggagaacgacaaggtggccggctggtacaaacagacccgtgccattgtcctcgccatccaacgccagccaggcaccaataccatcgaagtggtaaacaggattaaggagctgcttccccagttccgctcccaactccccggctcggtggacctgagtatccactttgaccggaccgaggggatcaaggagtcggtcgccgatgtgaagttcactatggtgctcaccatctgcctggttatcatggtgatctttctcttcctgcgcaacctgccggcaacggtaattccgagcctggcgctaccgctctccattgtcggtgctttttcggccatgtacctgatggggttttcggtcaataacatctcactgttggctctgaccctgtcggtgggcttcgtggtggacgacgccattgtcatgctggagaacatcgtccgtcacctggagaagggggagagccccatggaggcgtccctccgcggctcccgcgagatcggattcaccattgtctccatgaccatttcattggtggcggtctttatcccggttcttttcatgaaagggatgctcggccggctgctccacgaattcgccgtcaccatcagcctggccattctcatttccggcttcgtatcgctctcgctgacacccatgctatgcagccgcttccttcgtccgcacagtggcgaaaagggccacggcaggttttatacggtcatggagcggtttttcgacggcatgtaccgcctctatgaagtgactctggcaaaggttctgaggctccgccggaccgtgttggccggcacccttgccatgaccctgctcaccatctggctcttcacgagaatccccacagggctgctgcccagcgacgacatcggggccatcttcgctattaccgagggtgcccaggggatttccttcgaggaaatgaaggccaagcagcagcagttggcggccattgtgctccaggacccgaacgttgaaggattcatgtcttcggcgggcgccgccgggagccgggtgtcctccaattcggggttcatgttcattcggctcaagccccgccacgagcggaagcttaacgcggatcaggtcatccagcagctccggccgaaagtcatggctgtgcccgggattctcatgttcctccagaatccgccgccgattcgactggaggctcagttggccaagagccagtatcagttcgtgctccagagtcccgatacggatgaactctaccggcgcgcagccgacctggaggccagattgaagcaggtgccgctcctgctggacgtgaccagcgacctccagctcaataatccccaggtgcaactcgacatagaccgggacaaggcgtcggccctcggcatcaccgcccaccaggtggaggatgccctctattacgcctacggctcccgccaggtttccaccatctttgctccaaacaaccagttcaaggttatcctggaactggagccccgctaccagaccgacccggcagccctgtccatgctttacatccgttcccagcagggcgaccttgttcctctcaacaccctcgccaccctgcggcggaccctcggtcccctttccgtgaaccatctggggcagatcccggcggtgaccatctcctttaacctgcgaccggacacccctctcagcgaggccgtgtcagccatcgagcaggtgagccgcgatacgcttccagcttcattcaccaccagtttccagggagttgcccaggcctaccagcagtcgaccacggggctaattgtcctgatcatcatggcgatcgtggtaatctacattgtcctcggtattctttatgagagctacatccatcccctcaccatcctgtcgggtcttccgtcagccgggttcggggcactcattaccctgatgatcttcggcaaggaactgaatctctacggctttgtcggtctcatcatgctgattggcattgttaagaaaaacgcgatcatgatgatcgacttcgccctggaggcccagcgcaccgaagggaaaccgccgctggaggcaatccaccagggggctctcgtccgtttccgccccattatgatgaccaccatggcggcgctgatggggacactccccattgcgctggggatcggtgccggggccgaggccaggcgcactctggggctggcagtggtgggggggcttctggtgtcccagttgctgaccctttacataacaccggttatttattactacatggaccgcatgcagggatggttcgtcgggaaactgccgggccgccggagggtcagcgcatga

SEQ ID NO: 2638 - protein, 1032 aa, Geobacter sulfurreducens PCA
MNIAEIFIRRPVMTSLIMLAVMLFGLIAYDKLPVNDLPTVDYPTIQVSATLPGANPDTMASSVALPLEREFSTIAGVDSMTSTNGIGISRITIKFTLERDIDAAAQDVQAAISRAQRQLPQDMPAPPSFQKVNPADQPILYLVLSSPTLPLSTVHEYADTMIAQRISMVNGVASVQIYGSQKYAVRVQVDPKALAARKIGIDEVAQALERGNVNLPTGTLQGKHEALTIQTSGQLYSAKEYEPLIVAYRNGSPVRLGEIGRVIDSVENDKVAGWYKQTRAIVLAIQRQPGTNTIEVVNRIKELLPQFRSQLPGSVDLSIHFDRTEGIKESVADVKFTMVLTICLVIMVIFLFLRNLPATVIPSLALPLSIVGAFSAMYLMGFSVNNISLLALTLSVGFVVDDAIVMLENIVRHLEKGESPMEASLRGSREIGFTIVSMTISLVAVFIPVLFMKGMLGRLLHEFAVTISLAILISGFVSLSLTPMLCSRFLRPHSGEKGHGRFYTVMERFFDGMYRLYEVTLAKVLRLRRTVLAGTLAMTLLTIWLFTRIPTGLLPSDDIGAIFAITEGAQGISFEEMKAKQQQLAAIVLQDPNVEGFMSSAGAAGSRVSSNSGFMFIRLKPRHERKLNADQVIQQLRPKVMAVPGILMFLQNPPPIRLEAQLAKSQYQFVLQSPDTDELYRRAADLEARLKQVPLLLDVTSDLQLNNPQVQLDIDRDKASALGITAHQVEDALYYAYGSRQVSTIFAPNNQFKVILELEPRYQTDPAALSMLYIRSQQGDLVPLNTLATLRRTLGPLSVNHLGQIPAVTISFNLRPDTPLSEAVSAIEQVSRDTLPASFTTSFQGVAQAYQQSTTGLIVLIIMAIVVIYIVLGILYESYIHPLTILSGLPSAGFGALITLMIFGKELNLYGFVGLIMLIGIVKKNAIMMIDFALEAQRTEGKPPLEAIHQGALVRFRPIMMTTMAALMGTLPIALGIGAGAEARRTLGLAVVGGLLVSQLLTLYITPVIYYYMDRMQGWFVGKLPGRRRVSA

SEQ ID NO: 2639 - DNA, 3081 bp, Salmonella enterica subsp. enterica serovar Paratypi A str. ATCC
  CDS (1)..(3081)
atgcgctttttcgcccttttcatctaccgcccggtcgccaccattttgattgccgccgccattacgctgtgcggcattctgggctttcgtctgctgccggtcgccccgctgccgcaggtcgatttcccggtgattatggttagcgcctcgctgccgggcgcctcgccggaaaccatggcttcgtcggtggcgacgccgttggaacgttctttgggacgcattgcaggcgtcaatgaaatgacttccagcagctcgctcggcagtacgcgcattattctcgaatttaatttcgatcgtgatattaacggcgcggcgcgcgatgtgcaggccgccattaacgccgcgcaaagcttgttgccaggcggaatgcccagccgcccgacttatcgcaaggccaacccgtccgacgcgccgattatgattttaacgctcacctcggagagctggtcacaaggcaaactgtatgatttcgcctctactcaactggcgcaaaccatcgcgcaaattgacggcgtcggcgatgttgacgtcggcggcagctccctgcccgcagtacgtgtaggcttaaacccgcaggcgctctttaaccagggcgtctcgctggatgaggtccgcgaagcgatcgacagcgccaacgtacgccgaccgcaaggcgcaattgaagatagcgtccaccgctggcaaatccagaccaacgacgaactgaaaaccgccgccgaataccagccgctgattattcactataacaacggcgcggcggtacgcctgggcgacgtcgccagcgtcaccgactcggtgcaggatgtccgtaacgccgggatgacgaacgctaaacccgctattttgttgatgatccgcaagttgccggaggccaacattattcagacggtcgacggcatccgggcaaaactgccggaactgcgggcaatgatccccgccgctatcgatttacaaatcgcccaggatcgttcgccgacaattcgcgcatcgctgcaagaggtagaagagacgctggctatctctgtcgcgctggtgatcctggtggtgtttttattcctgcgttccgggcgcgccacgctaatccccgccgtcgccgttcccgtttcgctcatcggcaccttcgccgccatgtatctgtgcggcttcagcctcaacaatctgtcgctgatggcgctgactatcgcgaccggatttgtcgttgatgatgccattgtggtgctggaaaatatcgcccgccatctggaggcgggaatgaaacctttgcaggcggcattacagggtacgcgggaagtcgggtttacggtcatctccatgagtctgtcgctggtggcggtatttctgccgctgctgttaatgggcggcctgccaggacgattattacgggaattcgccgttaccctctcggtggcgattggcatttcgctggtggtctcgctcacactgacgccgatgatgtgcggctggatgcttaaatcaagcaaaccgcgcacccaaccgcgtaaacggggcgttggccgtttgctggtcgccttgcaacagggttacggcacgtcgttaaaatgggtgcttaaccatacgcgtcttgtcggtgtggtttttcttggcaccgttgcgctgaacatctggctttatatcgccatccctaaaacattctttccggagcaggacactggcgtgttgatgggcggtattcaggctgaccagagcatctctttccaggccatgcgcggcaagctgcaggattttatgaaaattattcgcgacgatccggcggtgaataatgtcactggttttaccggcggctcgcgggtgaatagcggcatgatgtttattacgctgaagccgcgcggcgaacgcaaagagacggcgcagcaaatcattgatcgactgcgggtcaaactggcaaaagaacccggcgccaggctgtttctgatggcggtacaggatattcgcgtcggcgggcggcaggctaacgccagttaccaatatacattgctgtctgactccctgccggcgctgcgcgagtgggagccgaaaatacgcaaagcgctctcggccctgccgcaactggcggacgtaaactccgaccagcaggataacggcgcggagatgaaccttatctacgaccgcgacaccatgtcacggctgggcattgatgttcaggccgcaaacagtctgttaaataatactttcggccagcggcaaatttccaccatttatcagccgatgaaccagtataaagtggtgatggaagtcgatccgcgctatacccaggatatcagcgcgctggagaaaatgttcgttatcaaccgtgacggaaaagcgatccccctctcttatttcgcccaatggcggcccgccaatgcgccgctgtcggtgaaccatcagggactttccgcggcgtccacgattgcctttaacctgccgaccggcacatcgttatcgcaggcgacggaggccattaatcgcaccatgacgcagcttggcgtcccctcgacggtacgcggcagtttttccggaacggcgcaagtcttccagcagaccatgaattcacagcttattttgatagtggcggcgatcgctaccgtctacattgtgctggagatactgtacgaaagctacgtccatccgctgaccattctctctactctgccatcggcgagcgttggggcgcttctggcgctggaactcttcaatgcccctttcagcctaatcgccctgatagggatcatgctattaattggcattgtgaagaaaaacgccattatgatggtcgattttgcgcttgaagcgcaacgaagcggcggcctgacgccggaacaagccattttccaggcctgcttgttacgcttccgtccaataatgatgaccacgctggcggcgctgttcggcgcactgccattggtgttatctggcggagacggttcggaattacggcagccgctggggataaccattgtcggcggtttggtcatgagccagctcctgacgctctataccacgccggtggtgtacctctttttcgaccgcctgcggctgcgtttttcgcgtaaaaatagcaaaccggtagtagagatatga

SEQ ID NO: 2640 - protein, 1026 aa, Salmonella enterica subsp. enterica serovar Paratypi A str. ATCC
MRFFALFIYRPVATILIAAAITLCGILGFRLLPVAPLPQVDFPVIMVSASLPGASPETMASSVATPLERSLGRIAGVNEMTSSSSLGSTRIILEFNFDRDINGAARDVQAAINAAQSLLPGGMPSRPTYRKANPSDAPIMILTLTSESWSQGKLYDFASTQLAQTIAQIDGVGDVDVGGSSLPAVRVGLNPQALFNQGVSLDEVREAIDSANVRRPQGAIEDSVHRWQIQTNDELKTAAEYQPLIIHYNNGAAVRLGDVASVTDSVQDVRNAGMTNAKPAILLMIRKLPEANIIQTVDGIRAKLPELRAMIPAAIDLQIAQDRSPTIRASLQEVEETLAISVALVILVVFLFLRSGRATLIPAVAVPVSLIGTFAAMYLCGFSLNNLSLMALTIATGFVVDDAIVVLENIARHLEAGMKPLQAALQGTREVGFTVISMSLSLVAVFLPLLLMGGLPGRLLREFAVTLSVAIGISLVVSLTLTPMMCGWMLKSSKPRTQPRKRGVGRLLVALQQGYGTSLKWVLNHTRLVGVVFLGTVALNIWLYIAIPKTFFPEQDTGVLMGGIQADQSISFQAMRGKLQDFMKIIRDDPAVNNVTGFTGGSRVNSGMMFITLKPRGERKETAQQIIDRLRVKLAKEPGARLFLMAVQDIRVGGRQANASYQYTLLSDSLPALREWEPKIRKALSALPQLADVNSDQQDNGAEMNLIYDRDTMSRLGIDVQAANSLLNNTFGQRQISTIYQPMNQYKVVMEVDPRYTQDISALEKMFVINRDGKAIPLSYFAQWRPANAPLSVNHQGLSAASTIAFNLPTGTSLSQATEAINRTMTQLGVPSTVRGSFSGTAQVFQQTMNSQLILIVAAIATVYIVLEILYESYVHPLTILSTLPSASVGALLALELFNAPFSLIALIGIMLLIGIVKKNAIMMVDFALEAQRSGGLTPEQAIFQACLLRFRPIMMTTLAALFGALPLVLSGGDGSELRQPLGITIVGGLVMSQLLTLYTTPVVYLFFDRLRLRFSRKNSKPVVEI

SEQ ID NO: 2641 - DNA, 3099 bp, Zymomonas mobilis subsp. mobilis ZM4
  CDS (1)..(3099)
atgaacccttcacgtctttttatcttgcggcctgtcgcaacctcgctgatcgtcattgcgattgtgctagctggcctgctcggctttcactatatgtcgctttcggctttgcccgaggtcgattatccgactattcaggtttcaaccctctatccgggggcttcacctgaagttatcagccaaacggtttccgcgcctttggaacggcaattcgggcagatgtctggcctttcccgtatgaccaccaaaagtgcggctggggcatcggttatcaccttgcaatttggccttaatgaagccttggatgttgcagagcaggaagtgcaggcggccatcaatgccgcgaacgccctgttacctgcggatcttcccgcgcctcctgtctatgccaaggtcaatccggcagattctccggttctcaccttggcggcaacctctgatacgatgccactgacggatgtccaaaatctggttcaaacccgtctggcgcaaaagatttcacaggtttccggtgtcggcttggtcgaattatccggcggccaacggccagccatgcggatacaagccgatacgcaagccttggccagctatggcatttcgctttcaacgcttcgaacggcgattgataatgccaatgctaattctgcgaaaggtagcttcgacgggcccacgcgttcatggcaaatcaacgccaatgaccagcttttgacggttgaagattataaaaatctgatcatcgctatgcgtaataaccgtccggttcggatgagcgatgtggcacaggtcgtcgcaggggctgaaaacaatcatcttggtgcttattataatattacacctgcggttatcatcaatgtccggcggcaaccgggcgcaaatgtgattgccacggtcgataatattaaaaaacagcttcccgaattagaggccggattaccggctggtctcaaagtatcagtcgtcgctgaccggacaacgggtatccgcgcctctattgaacatgtcgaggttgagcttgtcttggccgtcgtcatggtcattctggttattttcttctttcttcattctatacgggcaacgcttattgcggcggtcgcggtgccgatctcgctgatcggcagctttgctgcgatgtatatgatgaattacagcctgaataacctctccttgatggcacttaccattgcctctggttttgtggttgatgacgcgattgtgatgatcgaaaatatcgaacgccatatcgaggccggcgtggcgccttttcaggcggcgctaaagggggcgcaagaaatcggttttacgattatctcgctgactatctcgctgattgccgttttaatcccgcttttgtttatgagcgatgtcgtcgggcggcttttccgtgaatttgcgatgaccttggctatcactatcctgatttctgcggttgtctcgctgacattgaccccgatgctatcggctcgccttttggtcgcccatcgtcataaaaatcctatcggtgatcgtattcaaaaaggctttgaacggctcgaatatcattacgaacatggccttagatgggtgctgggacatcaaacattaacgcttgtcttaacgattgttaccttcatcggaacggctctattctatgttgccattccaaaaggtctgttcccgttacaggcgaccggacagcttcggatacagaccgataccagccccgatgtgtcctacagccggatggccgaattgcaaaaacaggcagcggccaaaatattacaagacccagcggttgaaaatttatcggtgatgagcggtgttgatggtgtcaccaatagcgctcttaaccaaggggttatgctagttaatttgaaagagggcatttcagatgaacagccggttatcaaacgcctttatcaggcggttggtgctgtcgcaggcatccgcgcgcatatccaaccggtgcaggatttaacggtcgataccgatacggggcccacccgttttcgtttgtcagtcgaaggtgccgatactgacagcgtgcataaagcggcgcgcgctatcgctgatagcttgggtcaaagcaaaaagctgacagatgtctatactgatgccgatgccaaaggggatgcggtttacgtcaatattgaccgcgaaacagccagccggttatcggtaaccgttgccgatattgatgacacgctttattccgcttttggtcagcgtattatctcaacgattttcactgaaaccaaccaatatcgcgttattctcgaagcccgtcccaatcttttaaatagtattgaatctttgggacatctcaatctcgcgggcagtggaacattaccgacgcctttaaatggcttctcaactctaaaaataggccaagccccgctgcaaattatgcatgtggcgcaattcccagctgcaacggtcggctttgacttggcctccaataccgctttgggtgatggggtaaaggctgtccgcgctcaaattgccagacttgatctcccctctggtattacgacgaccttgcttggcgcagccagcgcttatgaaaaagccctcggcaaccagatactccttatctttgcggctttggtttgcgtctatattgtcctcggtgttctgtatgaaagctatattcacccgctgactattctttcaacgctaccttctgccagtgtcggtgccattctcgctttatgggtctctggacacgatctcgatatcatcgggattatcggcatcattttgttgatcggtatcgtcaagaaaaacgctatcatgatgatcgactttgcgattgccgccgaaagggaggaaaagaaatcccccgaagaagcgatctttaatgcggcaaccttgcgtttcagacctatcctgatgaccactttggccgccctttttgcagccattcctctgatgatcggtcatggcagcggggcggaattgcgccgtcctcttggtcttgcgattttcggagggctcttggcctcgcaaatgctgaccgtctttacaacgccggtgatctatctgttctttgaccgtctgggacagaaaatagcgcatctccgccgtcacaaagattctgaaaacgaggtaacatcggcgtga

SEQ ID NO: 2642 - protein, 1032 aa, Zymomonas mobilis subsp. mobilis ZM4
MNPSRLFILRPVATSLIVIAIVLAGLLGFHYMSLSALPEVDYPTIQVSTLYPGASPEVISQTVSAPLERQFGQMSGLSRMTTKSAAGASVITLQFGLNEALDVAEQEVQAAINAANALLPADLPAPPVYAKVNPADSPVLTLAATSDTMPLTDVQNLVQTRLAQKISQVSGVGLVELSGGQRPAMRIQADTQALASYGISLSTLRTAIDNANANSAKGSFDGPTRSWQINANDQLLTVEDYKNLIIAMRNNRPVRMSDVAQVVAGAENNHLGAYYNITPAVIINVRRQPGANVIATVDNIKKQLPELEAGLPAGLKVSVVADRTTGIRASIEHVEVELVLAVVMVILVIFFFLHSIRATLIAAVAVPISLIGSFAAMYMMNYSLNNLSLMALTIASGFVVDDAIVMIENIERHIEAGVAPFQAALKGAQEIGFTIISLTISLIAVLIPLLFMSDVVGRLFREFAMTLAITILISAVVSLTLTPMLSARLLVAHRHKNPIGDRIQKGFERLEYHYEHGLRWVLGHQTLTLVLTIVTFIGTALFYVAIPKGLFPLQATGQLRIQTDTSPDVSYSRMAELQKQAAAKILQDPAVENLSVMSGVDGVTNSALNQGVMLVNLKEGISDEQPVIKRLYQAVGAVAGIRAHIQPVQDLTVDTDTGPTRFRLSVEGADTDSVHKAARAIADSLGQSKKLTDVYTDADAKGDAVYVNIDRETASRLSVTVADIDDTLYSAFGQRIISTIFTETNQYRVILEARPNLLNSIESLGHLNLAGSGTLPTPLNGFSTLKIGQAPLQIMHVAQFPAATVGFDLASNTALGDGVKAVRAQIARLDLPSGITTTLLGAASAYEKALGNQILLIFAALVCVYIVLGVLYESYIHPLTILSTLPSASVGAILALWVSGHDLDIIGIIGIILLIGIVKKNAIMMIDFAIAAEREEKKSPEEAIFNAATLRFRPILMTTLAALFAAIPLMIGHGSGAELRRPLGLAIFGGLLASQMLTVFTTPVIYLFFDRLGQKIAHLRRHKDSENEVTSA

SEQ ID NO: 2643 - DNA, 3096 bp, Azotobacter vinelandii
  CDS (1)..(3096)
atgaatatttcgcgccccttcattctccgcccggtcgccacgacgctgatcatggtggcgatcttcctctgcgggctgatcgcctaccgcctgctgccggtttccgcgctgcccgaggtggactatccgaccatccgcgtgctgacgctctatcccggcgccagtccggaagtgatgaccagcgcggtgaccgccccgctggagcgccagttcggccagatgccgggcctgaatcagatgacctcgaccagttccggcggcgcctcggtgatcaccttgcgcttcagcctggacgtgaacctggaggtcgccgagcagtcggtgcaggcggcgatcaacgcggccagcaatctgttgcccgacgacctgccgacgccgccggtatacaacaaggtcaatccggccgacacaccggtgatgaccctggcggtcacctcggcgaccatgccgctgccggagatcaacgatctggtcgatacccgcatggcgcagaagctggcgcagatcagcggggtcggcatggtcagcctggccggcggccagcgcccggcggtgcgcatcaaggtcgatccgcaggcgctggccaactacggcctgaacctgtccgacgtgcgctcgttgatcaccgcctccaacgtcaaccagcccaagggtaacttcgacggtccgacccgggtgtcccagctcgacgccaacgaccagctcaagtccgccgacgaataccgcaacctgatcctcgcccacctgaacggcgccaccctgcgcctgaaggatgtggcgcagatcgccgacggcgccgagaacgagcgcctggccgcctgggccaaccgcaacgcggcggtgctggtgaacatccagcgccagccgggggccaacgtcatcgaagtggtcgagcgtgtccaggcgctgctgccgcagatcaccgcgaccctgccggccagcctcgaggtgattcccctcaccgaccgcacccagaccatccgcgccgcggtgcgcgacgtgcagttcgagctgctgctggcggtggggctggtggtgctggtgaccttcgtcttcctgcgccggctgtcggccacggtgatcccctcgatcgccgtccccttgtccttgatcggcaccttcggggtcatgtacctggccggcttctcgatcaacaacctgacgctgatggcgctgacagtggccgccggtttcgtggtggacgacgccattgtcatgctggagaacatcgcccgccacctggaagaaggcgcgacgccgctggaggccgcgctcaagggggcgcagcagatcggcttcacgctgatctcgctgaccttctcgctgatcgccgtgctgatcccattgttgttcatggccgatgtggtcggccggctgttccgcgaattcgccatcaccctctcggtgtcgatcctgatttccctgctggtctcgttgaccctgacaccgatgatgtgcgcgttgttcctcaagcaggaaggaccgccggagcatcagggccgtttctaccgcgccagcggcgtctggatcgaggttttgatcgcccgctacgacgccgccctgcattgggtgctgcgccaccaggtgctgaccctgctgatcgccgtggctactctaggcctcaccgtggtgctctacctggcggtgcccaagggcttcttcccggtccaggacaccggggtgatccagggcatttccgaggcgccgcagagcatttccttccgcgccatgagcgaacgccagcagcgcctggccgaggtcatcctgcaggacccggcggtggccagcctgtcttcctacatcggcgtggacggcgacaacgtcaccctgaacagcgggcgcctgctgatcaacctcaagccgcatgccgagcgcgaggtcaccgccagccaggtgatcgagcggctgcgcccgcgactggccgcggtgccggacatccaactgttcctccagccggtgcaggatctgaccatcgaggaccggatcagccgcacccagttccagttcagcctggagtcgccggacggtgccttgctggaggagtggacgccgaagctggtcgaggcgctgagcgtgctgccggagctgaccgacgtggccagcgatctgcagagccgcagcctgcaggtctacctgagcatcgaccgcgacaccgcctcgcgcctcggcgtgaccgtcgccgacatcgacgatgcactctacgacgccttcggccagcggcagatctccactatctatacccaggccagccagtaccgggtggtgctggagagccgggccgccgataccctcggtccggcggcgctggacgaggtgcacgtggccagcgccgagggcggccaggtgcgcctgtcgtccctggcgcgcatcgaggagcgggcggcgtcgctgctgatcaaccacatcggccagttcccggcggtgaccctgtcgttcaacctggcgccgggcgtctccctcggccaggcggtggcggcgatcgagcgggtgcagcaggagatcggcctgccgggcggcatcgagagccgcttccagggcgccgccgaggccttccgcgcctcgctgtcgagcaccctgctgctgatcctcgcggcggtggtcaccatgtacatcgtgctcggcgtgctctacgagagctacatccacccgatcaccatcctttccacgctgccctcggccgcggtgggcgccctgctggcgctgctgttttccggcaacgacctggggctgatcgcgatcatcggcatcatcctcctgatcggcatcgtcaagaagaacgcgatcatgatgatcgacttcgcgctggaggccgagcgtcaccagggcatggacccgcaggcggcgatccatcgcgcggcactgttgcgtttccggccgatcctgatgaccaccctggccgcgctgttcggcgccatcccgctgatgttcgcctcgggctcgggcgccgaactgcgccagccgctgggcctggtgctggtcggcggcctgctgctcagccagctcctgacgctgttcaccacgccggtgatctacctcgccttcgaccgcctgtcgcggcgcttcgcgggccgcagcgcggcgggggtggcggcatga

SEQ ID NO: 2644 - protein, 1031 aa, Azotobacter vinelandii
MNISRPFILRPVATTLIMVAIFLCGLIAYRLLPVSALPEVDYPTIRVLTLYPGASPEVMTSAVTAPLERQFGQMPGLNQMTSTSSGGASVITLRFSLDVNLEVAEQSVQAAINAASNLLPDDLPTPPVYNKVNPADTPVMTLAVTSATMPLPEINDLVDTRMAQKLAQISGVGMVSLAGGQRPAVRIKVDPQALANYGLNLSDVRSLITASNVNQPKGNFDGPTRVSQLDANDQLKSADEYRNLILAHLNGATLRLKDVAQIADGAENERLAAWANRNAAVLVNIQRQPGANVIEVVERVQALLPQITATLPASLEVIPLTDRTQTIRAAVRDVQFELLLAVGLVVLVTFVFLRRLSATVIPSIAVPLSLIGTFGVMYLAGFSINNLTLMALTVAAGFVVDDAIVMLENIARHLEEGATPLEAALKGAQQIGFTLISLTFSLIAVLIPLLFMADVVGRLFREFAITLSVSILISLLVSLTLTPMMCALFLKQEGPPEHQGRFYRASGVWIEVLIARYDAALHWVLRHQVLTLLIAVATLGLTVVLYLAVPKGFFPVQDTGVIQGISEAPQSISFRAMSERQQRLAEVILQDPAVASLSSYIGVDGDNVTLNSGRLLINLKPHAEREVTASQVIERLRPRLAAVPDIQLFLQPVQDLTIEDRISRTQFQFSLESPDGALLEEWTPKLVEALSVLPELTDVASDLQSRSLQVYLSIDRDTASRLGVTVADIDDALYDAFGQRQISTIYTQASQYRVVLESRAADTLGPAALDEVHVASAEGGQVRLSSLARIEERAASLLINHIGQFPAVTLSFNLAPGVSLGQAVAAIERVQQEIGLPGGIESRFQGAAEAFRASLSSTLLLILAAVVTMYIVLGVLYESYIHPITILSTLPSAAVGALLALLFSGNDLGLIAIIGIILLIGIVKKNAIMMIDFALEAERHQGMDPQAAIHRAALLRFRPILMTTLAALFGAIPLMFASGSGAELRQPLGLVLVGGLLLSQLLTLFTTPVIYLAFDRLSRRFAGRSAAGVAA

SEQ ID NO: 2645 - DNA, 3105 bp, Nostoc punctiforme PCC 73102
  CDS (1)..(3105)
atgaacctttcggaaccatttatccgtcgtccgatcatgacgactctggtgatgacggcaattttgattttcggttttatgagttatcgcttgctgccaatcagcgatttacccagtgtggattatcccacaattcaggtaagcgcctcccgaccgggagctagcccggaaacaatggcagcatcggttgctcgtcctttagagaagcaattttccagtattgctggactcgattcgctcaattcaactagcactctgggacagactcaaattacactgcaattcaacttgagtcgcaacattgatgatgcagcgcaggatgtagaagcagccatatcaggagcatcggggcaaattgccacggatttacccaatcctcccacctacagtaaggttaaccccgcagatcaaccgattctttacctttacttagactctcccacactgccgctttcccaggtagataattatgccgagacttatctggcgcaaaagttatctacaatcaatggggtagcacaggtagctgtctacggttcccaaaagtatgcggctcgaattcaactcgatccgcagcaattggcagcacggcaaattggactggatcaggtggcgacggcaattcaacagggtaacgtcaatttacctactggcagtctttcgggaaatcataagaattttacagttcagactaacgggcaacttgaagatgcggctgcttatcggcagttgattgtctcttataaagatggaatgcccatctatctcaatcaactgggcaggattattgacagtgtagaaaatgacaaagtagcaagctggtacaacaatacccgcgccattattctcaccattcaaagacagccaggaaccaatacggtacaagttgtagacacgattaagaatttgctgccaaagttacgagagcagattccggcatccgtggaaattgggattctctatgatgcgtctcagtcaattcgagattcagtggatgatgtcagatttaccttgattttgacgatcgctctagttatcttagtaattttcatctttttgcggaacctctcggccacagtgattcctagtttggcattacccgtttcgctgattggcacttttgcagtgatgtatttgctgcactactcactagataacctgtcgctgatggcgttgaccctttctgtgggtttcgtagtagatgatgcgatcgtcatgctagaaaatatcgtccgtcatatcgaaatgggggaacgtccgttagaagcggcgttgaatgggtcgagagaaattggtttcacaattctgtcaatgaccctttccttagttgcagtcttcatccccatgttgttcatgagtgaagtactagggcgattatttcatgaatttgctgtgacgatcgcagttgcaattctggtatctggttttgtgtctttgactctgactccgatgttatgcagccgttttctgcgtcctgtggatcatgctaatcaaagtcggttataccaagcttccgaatatgtcttcgatcgcttcctcggtttgtacgattggagtctcaaaaaagtcttaaaatatcaccgcaccacgatgattttatctgtctttttattggcggtgacagttgggttgttggtgatagttcccaagggctttattcctagcgaagataccggacaaattacaggtattacccaagcagccgaagatgcgtccttcgataatcttgtccaacatcagcagacagttgctaacctgattcgccaagacccaaatgtagatgcagtcaactccaatatcggggcgggagccagtgctagtggcggtggggcagcagttgcagccaattctgggagtttgtttattcggttaaaaccgcgatcgcagcgccaacttggtgctgacgaaattgtgcaaaatttgcgaaccaaactcgccactgttccaggcatccaagtattcttacaaaatcccccagcgattcccattggcgctcaacaaagcacaggactttatcaagttgcactccagagttctgatgtcaaactcttacaggagtatgttccccaacttgttaccaagatgaaggatatgacagaactccaggatgtcaacagcgatttacagtttgcttcccaaattcaaattgacattgaccgcgataaagcctcaacttatgggattaccgccgagcaaatcgaaaataccctcagaagtgcttacggttcctaccaagtgtcaaccatctatgcagcgaccaatgagtatcaagtgattttggaattagcaccgcagtatcaggaggatatcaacgcacttttgacattgtatattaactccagcacaggagtggcagttcctttgaagacattcgccaaactatctcagggagtcagcccgttaatggtcaatcataacggtcggatgaacgccgccaccatttcctttaacctcgcccccggtgtgtccttgggaaatgccaacgaagagattcaaaaactgatcgatcgggtaattcctgccagcattagcaccagctttcagggtgcaagccaggtatttcaaagttcactgccgagtttgggtttattgttagcgatcgccatcctcgtaatttatctgattttgggtattctctatgaggatttcattcacccaattacgattctttccggtttgccttcagcaggttttggggcattattaacgctgataatatttcatgtcgaactaaatgtttattcctttatcggcataattctcttagtgggcattgtgaagaaaaacggcatcatgatggtagattttgcaattgttgcccagcgagaagaattgaaaaaaccgtctgaggcaatctatcaagcctgcttagtgcgcttccgtccgattatgatgacgacgatggcagcattaatgggaaccttgcccatagcgatcggatttggggctggttccgaatcccgccgtcctctagggattgcagttgtgggcggactggtgttttctcagatattgaccttgtatttaacgcctgtgttctatatatatatggaatcatggcggaagaagcttaatcaagttaagttgcgacgggtattttcatag

SEQ ID NO: 2646 - protein, 1034 aa, Nostoc punctiforme PCC 73102
MNLSEPFIRRPIMTTLVMTAILIFGFMSYRLLPISDLPSVDYPTIQVSASRPGASPETMAASVARPLEKQFSSIAGLDSLNSTSTLGQTQITLQFNLSRNIDDAAQDVEAAISGASGQIATDLPNPPTYSKVNPADQPILYLYLDSPTLPLSQVDNYAETYLAQKLSTINGVAQVAVYGSQKYAARIQLDPQQLAARQIGLDQVATAIQQGNVNLPTGSLSGNHKNFTVQTNGQLEDAAAYRQLIVSYKDGMPIYLNQLGRIIDSVENDKVASWYNNTRAIILTIQRQPGTNTVQVVDTIKNLLPKLREQIPASVEIGILYDASQSIRDSVDDVRFTLILTIALVILVIFIFLRNLSATVIPSLALPVSLIGTFAVMYLLHYSLDNLSLMALTLSVGFVVDDAIVMLENIVRHIEMGERPLEAALNGSREIGFTILSMTLSLVAVFIPMLFMSEVLGRLFHEFAVTIAVAILVSGFVSLTLTPMLCSRFLRPVDHANQSRLYQASEYVFDRFLGLYDWSLKKVLKYHRTTMILSVFLLAVTVGLLVIVPKGFIPSEDTGQITGITQAAEDASFDNLVQHQQTVANLIRQDPNVDAVNSNIGAGASASGGGAAVAANSGSLFIRLKPRSQRQLGADEIVQNLRTKLATVPGIQVFLQNPPAIPIGAQQSTGLYQVALQSSDVKLLQEYVPQLVTKMKDMTELQDVNSDLQFASQIQIDIDRDKASTYGITAEQIENTLRSAYGSYQVSTIYAATNEYQVILELAPQYQEDINALLTLYINSSTGVAVPLKTFAKLSQGVSPLMVNHNGRMNAATISFNLAPGVSLGNANEEIQKLIDRVIPASISTSFQGASQVFQSSLPSLGLLLAIAILVIYLILGILYEDFIHPITILSGLPSAGFGALLTLIIFHVELNVYSFIGIILLVGIVKKNGIMMVDFAIVAQREELKKPSEAIYQACLVRFRPIMMTTMAALMGTLPIAIGFGAGSESRRPLGIAVVGGLVFSQILTLYLTPVFYIYMESWRKKLNQVKLRRVFS

SEQ ID NO: 2647 - DNA, 3126 bp, Nostoc punctiforme PCC 73102
  CDS (1)..(3126)
atgaacctttcagaactcttcatccgtcgtccagtcatgaccactttggtaatgatgggtatcctcatcttcggtctcatgagttatctgctattacccattagtgccctacccaatgttgaatatccttttatatctgtctccgctagtctccctggtgccaccccggaaacaatggcatcttcagtcgccgcacccctagaaagacagtttaccgaaattgccggactcaattcattcaattccaccagttccacaggcagcactaacatctccctacaatttgactttagccgccgagtggaagatgccgcaaaagatgtacaggcagccatctcagccgccgccggacaactaccagccggaatgcctcacccgcccacttaccgtaaagtcaacccctctgtctcaccagttctctacctctatatgtattcggagacacagccaatctcgacagtagatgaatacgcagaggtaacagttggtcagccaatttcgatgattaatggtgttgctcaggtacaggtttttggtcaacagcaatatgcagtccgcgtccagcttgacccgcgagagttggcatcgcggggaattggtctaactcaggtaaaaactgcaattcaacaaggaaatgtcaacttgccaaccggcagtctctctggcacttacaaaagttatacgattcaggcgaacggtcaactcaccgatgctgccagctatcgccagctaattgtaacttacaagaatggtgctaccgtgcggctccaagatttggggcagataattgacagcgaacaaaatgtcaaagtctcgaatttatatagcgatcgcaaggtgacaaaccgtcattctgttgttctcgctgtgcagccgcaaccaggtgctaacacggtaaatattgttgatgccatccaggaacttttacctacactccgcgaacaagttcccaaatccattgagatggggattatgtacgatcgctcccaaaccatccgagcctctgtcaacgatgtgaaatttaccttggttctttcggtttgtctagttgtcttggtgattttcttatttttacgtgatataacagctaccctaattcccagtttggcgctacctgtagcgattattggcacttttgctgtaatgtatctgtcgggtttctccctagacaacctttcactcatggcgttgaccctctccgtgggctttgtcgtggatgatgcgatcgttgtgttggaaaatatcgtccgttatcgagaaatgggcgaatctcccctaaatgcggcattgaagggatcgagggaaatcagcttcaccattttgtcaatgaccctttccctagtggcggtgttcatcccgattatgttcatgagtggaataatcgggaaattatttcatgaatttgccgtgacgatcgcagtggcaattttggtttcgggttttgtttccctcagtctcacccccatgttatgcagtcgtttcttaagttcatctcatcagcaaagaccaaatcggctgtatcgagtttcagaacgggcatttgatttactactgcggggatatgattggacgctcaagcctgtcttaaaataccgcttgatgacactgattggttctggcattctgctggtaatgaccgtctatttgttcgtcatcgttcccaaaggatttattcctacagaagacaccggacaactgatggcgaacaccaaaggagcgcaagatatttcttttgatgatatgcggcatcaccagcaaaaggttgttgatctcattcgtcaagaccctaacattgaagcagttgattccattgtgggtgcaagtggcccgaatgcgtcggtcaactctgggcgaattacaattcggctcaagccgcgttctcaacgtaaattgagcgccgacgaaattattcaagagttaacccccaagttgagacgtgtagttggggttaagacattcctccgttctccaccagctattcccatcggtggacaacaaaccaattctacttatcagttcaccttgcagagtttaaatctgcaagacttgcgccaatacgttcctaaacttgtagataaagtcaaaaccctaccaggactccagaacgttgacagtgatttacaactcagcactcctcaaatccaagtcaaatttgaccacaacaaagctgcaacccttggcattaccgctcaacaagttgaacaaaccctcagtaccgcttatggttccagtcaggtgtcaactatttataccccaaatgaccaattttatgtaatcttggaagtaaaaccggagtttcaacgagattctaccgccctatcgatgctctatgtgcaatcgagtactgggaaacttgttccgctaagtgcgatcgctaatatcactcaaaacgtcggtcctctaaccgttactcacgttgctcaactcccctctgcaactatctcttttgacaccctcgcaggaacgtctctaagtcaggctacagatgctatcaagcaagcagcgagtgaggtactaccctcaacaattaccaccagctttcagggttcagcccaaacctttcaacagtctttcaatgatttaggcgtgttgttgttggtgtctattttagtaatctatctgattctcggtattctctatgaggatttcattcacccgattaccattctttccggtttaccttcggcgggttttggcgcattattgacgctactgattttccaggtagatttaaacctttactctttcatcggcataattctcttggtgggtatcgtcaagaaaaatgggattatgttggtggattttgctattgaagcgcaaagaaaggaagggaaaaattcctttgatactatctatgccgcttgcttgattcgcttccgcccgattatgatgacgacgatggcagctttaattggcacacttcccattgctctggggacaggagtcggttcagaagcgcgtcgtcctttggggattgcgatcgttggtggattgctgttttctcagatattgactctctatctaactccagtgttttacatttacatggaggcattgcggaaaaagcttagtatacaacctaagaaagctgaaaaaaagcatctgccagcagttaaaagttaa

SEQ ID NO: 2648 - protein, 1041 aa, Nostoc punctiforme PCC 73102
MNLSELFIRRPVMTTLVMMGILIFGLMSYLLLPISALPNVEYPFISVSASLPGATPETMASSVAAPLERQFTEIAGLNSFNSTSSTGSTNISLQFDFSRRVEDAAKDVQAAISAAAGQLPAGMPHPPTYRKVNPSVSPVLYLYMYSETQPISTVDEYAEVTVGQPISMINGVAQVQVFGQQQYAVRVQLDPRELASRGIGLTQVKTAIQQGNVNLPTGSLSGTYKSYTIQANGQLTDAASYRQLIVTYKNGATVRLQDLGQIIDSEQNVKVSNLYSDRKVTNRHSVVLAVQPQPGANTVNIVDAIQELLPTLREQVPKSIEMGIMYDRSQTIRASVNDVKFTLVLSVCLVVLVIFLFLRDITATLIPSLALPVAIIGTFAVMYLSGFSLDNLSLMALTLSVGFVVDDAIVVLENIVRYREMGESPLNAALKGSREISFTILSMTLSLVAVFIPIMFMSGIIGKLFHEFAVTIAVAILVSGFVSLSLTPMLCSRFLSSSHQQRPNRLYRVSERAFDLLLRGYDWTLKPVLKYRLMTLIGSGILLVMTVYLFVIVPKGFIPTEDTGQLMANTKGAQDISFDDMRHHQQKVVDLIRQDPNIEAVDSIVGASGPNASVNSGRITIRLKPRSQRKLSADEIIQELTPKLRRVVGVKTFLRSPPAIPIGGQQTNSTYQFTLQSLNLQDLRQYVPKLVDKVKTLPGLQNVDSDLQLSTPQIQVKFDHNKAATLGITAQQVEQTLSTAYGSSQVSTIYTPNDQFYVILEVKPEFQRDSTALSMLYVQSSTGKLVPLSAIANITQNVGPLTVTHVAQLPSATISFDTLAGTSLSQATDAIKQAASEVLPSTITTSFQGSAQTFQQSFNDLGVLLLVSILVIYLILGILYEDFIHPITILSGLPSAGFGALLTLLIFQVDLNLYSFIGIILLVGIVKKNGIMLVDFAIEAQRKEGKNSFDTIYAACLIRFRPIMMTTMAALIGTLPIALGTGVGSEARRPLGIAIVGGLLFSQILTLYLTPVFYIYMEALRKKLSIQPKKAEKKHLPAVKS

SEQ ID NO: 2649 - DNA, 3054 bp, Dechloromonas aromatica RCB
  CDS (1)..(3054)
atgaccaccttgatgatggtcgccctgctgattttcggcgttatcggctatcgtgccctgccggtttcggaattaccggccgtcgacttcccgaccatttcagtcaccgccaacctgcccggtgcctcgccggaaaccatggcggcagccgtcgccacgccgctcgaaggtcaattctcgaccatcgcaggactggactcgatgacctcgaccagcgcccaaggctcggccaccatcacgctgcagttctcgctggaccgtaacatcgacgccgcagctcaggacgtccagtcggccatttcggcagccctgcgcaagctgccgccgaacatgccgacgccaccgtcgttccgcaaggtgaacccagccgattcgccgattttctacatcgcgatgtcgtcgccgacgctgcccttgtccctcgtccatgaatatgccgagacccagttggcccaacggctttcgaccgttcccggcgttgcccaggtgcagatttacggttcgcagaaatttgctgtccgcgtccaggccaacccggaccagatggcagcccgcggcatcggcatcgatgaactgcagcaggccatcgctcagggcaacgtcaaccagccggtcggccagctcgatggcagccgccagaccttcgcgctgaaagacaatggccagctcagcaacgccgccgcctaccggcccttgatcgtcacctggcgcaatggcgcaccgattcggctggaagacatcgcgacaccgatcgacagcgtcgagaacacccgcatcgccagctggaacgtcgacaagcgcgccatcgtgctcgccatccagcgccagcccggcgccaacaccatcgaaacggtggatgcgatcaaacgcatcctgccctcgttccaggccaaactgccagccgcggtgacgatgaaagtactgttcgaccgcagcaactcgatccgccacgccatcgatgatgtccagttcacgctgattctgtccggcttcctggtcatcatggtcatcctgctcttcctgcgcaatctgtcggcaacggtcattcccagcctggcactgcccatttcggtggtcggcaccttcgccatgatgtcggtgctcggctacagcctcgacaatctgtcgctgctcgccctgacgctgtcggtcggctttgtcgtggacgacgccattgtcatgctggagaacatcgtccgccacgttgaagccggcgagccgcccttccaggccgcaatcaagggagccaaggaaatcggcttcacgatcatctcgatgaccatctcgctgattgccgtgttcatcccggtgctgttcatgcagggtatcgtcggtcgcctgctgcatgaattcgcagtgaccatctgcgtcgccattctcgtttccggcttcgtctcgctgaccctgacgccgatgctgtgcagccgctacgtcaagcatgccgagccggactcacacggccgcgtcttccagatgttcgaaagcttcttcaacgcagtgctcgccgcctacgaaagaacgctcaaacaggccatggcgcatccgcgcaccatcctcgccagtttctttgtcaccttgctgatgaccggctatctgttcacgctggtgcccaaggacttcattcccagtggcgactccggccagatcatcgcctttaccgaaggcgcacaggatgcctccttcacctcaatggtcgcgcatcaacgcgccgtggctgaaatcgtcggacaggaaccggacatcgcttccttcatgtcgtcggtcggcgccggcggcatccggccaaccgccaacaccggcaccgttttcatgattctcaaaccactcgacgagcgcaaatcgacgccggatcagatcatccagcgcctgcgtccgaaactggcggcggtgcccggcatcaaggtgtacatgcaaaacccgccggtgatccggatcggtggccagcttactgccgcccagtaccaatacaccttgcaggacaccgatctcgatgagttgtaccaatggaccgcaacgctgacccagaagatccgccagttgcccggtttcgtcgacgttgccaataacctgaacaacctcagcccggtcgtcgggctggacatcgaccgtgacaagctatccacgctgggcctgaccttcggccaggtcgaagacgccctgcagagcgccttcagcgcccgccaggtatcgacgatctacggctcgacggcgcaataccaggtgatcctcgaagtttccccggaattccaggctgacccacaggccctgtcgcgcatctatgtgcgcggtaacggcaagctgatcccgctcgacaccgtggcacgcttcacgcgcaagacgcaggccttgaccgtgaaccaccagggccaactgccttcagtcaccatttccttcaacctgctacccggcgtttcactgggcgatgcggtggaccggatcaaggcactggaacaggaaatccgcgttcccgtctcgctgaccaccagcctgcaaggcacggcgcaagccttccagtcctcgctgcaaggccttggcgtcctgttgctggtcgccgtactggtcgtctatctggtactcggcgtgctctacgagagcttcatccacccgctgaccattctttccggcctgccttcggccggtctcggcgccctgatcaccctgctcatcttcaaggttgacctcagtctctacgccttcgttggcgtgatcatgctgatcggtatcgtcaagaaaaacgccatcatgatgatcgactttgccctcgagcggcagcgcaaggatggcatgccgcccggcgaagcgatcttccaggccagcctgatccgtttccggccgatcatgatgaccacaatggccgcgctggtcggcaccctgcccatcgccctgggcatcggcgccggtgccgaggtgcgccagccgctgggtctggccgtcgttggcggcctgatgctgtcacagttgcttaccttgtatctgacaccggtcatctacctctatctcgaccgctttaccgacaagaccgaagcaccgctcgaaacggcggcggcaagctga

SEQ ID NO: 2650 - protein, 1017 aa, Dechloromonas aromatica RCB
MTTLMMVALLIFGVIGYRALPVSELPAVDFPTISVTANLPGASPETMAAAVATPLEGQFSTIAGLDSMTSTSAQGSATITLQFSLDRNIDAAAQDVQSAISAALRKLPPNMPTPPSFRKVNPADSPIFYIAMSSPTLPLSLVHEYAETQLAQRLSTVPGVAQVQIYGSQKFAVRVQANPDQMAARGIGIDELQQAIAQGNVNQPVGQLDGSRQTFALKDNGQLSNAAAYRPLIVTWRNGAPIRLEDIATPIDSVENTRIASWNVDKRAIVLAIQRQPGANTIETVDAIKRILPSFQAKLPAAVTMKVLFDRSNSIRHAIDDVQFTLILSGFLVIMVILLFLRNLSATVIPSLALPISVVGTFAMMSVLGYSLDNLSLLALTLSVGFVVDDAIVMLENIVRHVEAGEPPFQAAIKGAKEIGFTIISMTISLIAVFIPVLFMQGIVGRLLHEFAVTICVAILVSGFVSLTLTPMLCSRYVKHAEPDSHGRVFQMFESFFNAVLAAYERTLKQAMAHPRTILASFFVTLLMTGYLFTLVPKDFIPSGDSGQIIAFTEGAQDASFTSMVAHQRAVAEIVGQEPDIASFMSSVGAGGIRPTANTGTVFMILKPLDERKSTPDQIIQRLRPKLAAVPGIKVYMQNPPVIRIGGQLTAAQYQYTLQDTDLDELYQWTATLTQKIRQLPGFVDVANNLNNLSPVVGLDIDRDKLSTLGLTFGQVEDALQSAFSARQVSTIYGSTAQYQVILEVSPEFQADPQALSRIYVRGNGKLIPLDTVARFTRKTQALTVNHQGQLPSVTISFNLLPGVSLGDAVDRIKALEQEIRVPVSLTTSLQGTAQAFQSSLQGLGVLLLVAVLVVYLVLGVLYESFIHPLTILSGLPSAGLGALITLLIFKVDLSLYAFVGVIMLIGIVKKNAIMMIDFALERQRKDGMPPGEAIFQASLIRFRPIMMTTMAALVGTLPIALGIGAGAEVRQPLGLAVVGGLMLSQLLTLYLTPVIYLYLDRFTDKTEAPLETAAAS

SEQ ID NO: 2651 - DNA, 3087 bp, Rubrivivax gelatinosus PM1
  CDS (1)..(3087)
atgaacctgtcggagctgttcatccgccgtccggtgatgacggtgctgctgaacctggccatggtggtggccggcgtcatcgcctaccggcagatcccgatcgccgcactgccgagctacaacaccccggtgatcaacgtcacggcctcgctgcccggtgccagccccgagaccatggccacctcggtggcgctgcagttggagaagcagttctcgacgatcccctcgctcagcatgatcagctcgaccagcacgctgggcaccacctcgctgacgctggagttcgacgagggccgcgacatcgacgcggcggcggtcgacgtgcaggcggcgctgctgcgtgccgaacgcacgttgccgcaggacatgaccgcgccgccgtcctatcgcaaggtcaacccggccgacgcgccggtgctgctgatggcgatgacctcgccctcgctgaacctgtcggacctgaacgactacgccgagcacctgatctcgcccgcgctgtccacgctgcctggcgtggcgcaggtcaacatcttcggccagcgacgcttcgcggtgcgggtgagggtgcacccgcaggcgctggccgcgcgcgacatcgcgatcgaggagctgagtgcggcgctcgccaccgccaatgccaacacgccggtcggcacgctcgagggcgaccgccagacgctgacggtgcaggccaaccggcagctgcgcaacgcggccgagttctccgacctgatcgtcagcagcaagaacggcaacacggtgcggctgcgcgacgtggcgaccgtggaggacagctacgagagcgtcaagacctcggccaacttcaacggcgaggcgtcgatcacgctggccgtgcagcgccagcccgacgccaacaccgtggcggtggtggatgcggtcaaggccgcgctgccgggcttcaccgcacagctgccgcagtcgatccagctgagcctgctgaacgaccgctccacctcgatccgcgaggcactgcacgacgtgaacctcacgctgctcggcaccatcgtgctggtggtgctggtgatctttctcttcctgcggagagcggtcgcgacggtgatcccgacgctgtcgctgccggtgtcgctgatcggtgcggtggcgctgctgtgggccggcggctacagcctcgacaacatctcgctgctgggcctgacgctggccgtgggcctggtggtggacgacgcgatcgtgatgctcgagaacatcatgcaccacgtcgagcagggcatggacccgttcgaggcggcgttgaagggctcgcgcgaggtcggcttcaccatcatctcgatctcgacctcgctggtcgcggtgttcatcccgatcttcttcatgcccggcgtgatcggcctgctgttccacgaattcgcggtgatcgtctcgctggccatcctggtgtcggccttcgtctcgctgaccctggtgcccatgctggccggacgctacctgaagcccgaggccacgcagcgcccgccgggtgcgctggtgcgcggcttcgagcgcggcttcgaggccgtcacgcgctggtacacgcgctcgctcgacctcgcgctgcggcaccgccgtctgatgctgggtgtgggcgtgctgaccttcgcgctgaccgcgctgatgttcgtcaccattcccaagggattcttcccggaggaggacatcggccagatccgcgcctccaccgaagccgccgaggacacctcgttcgcggcgatggtgaagctgcaggaccaggcggtgcaggtgatgctggccgacccgaacgtgctgagcgtgaactcggtcaacggcggcagcggcacgcagaacacgggccgcatgttcatcaacctcaagccgcgcggcgagcgcctgcccatgaagcaggtggtggaagggctgcgcaagaagttgagtcaggtggccggtatcaccgtctacctgcagccggtgcagaacctgcagctcggcgggcgccccagcaagagccgctaccagtacatcctgcagagcgtgaaggccgatgagctgaacgactgggcggccaggctgcaggagaagctgcgcgccgatccgcgcttccgcgacgtcacctccgactcacagctcaagggactgcaagcctcgctgaagatcgaccgcgacaaggccaacacgctgggcgtgtcggtcgactcgatccgcaacgcgctgttcagcgccttcggcgagcgccaggtcgccaccatttacaccaccgccgacagctaccaggtgatcatggaagtggcgcccgacgccaagcgcgacgagagcgccttcgacggcatctacctgcgcagcagcaacggtgcactggtgccgctgaacagcttcgcgacggtcgagcgcacgctggggccgacctcggtgaaccacgtcgggcagctgcaggcggtgacggtgtcgttcaacctcgcgccgggcgtgccgctcggcgatgccacccggcagctcgaggcctacgggcaggagatccgcctgccggcatcggtgatcaccagctacggcggtgacgcagcggtgttcaagacctcgcagggcagccaggccatcctcatcgttgcggcgttgctggtgatctacgtgctgctgggcgtgctgtacgagagctacatccacccgctgaccatcctggccggcctgccatcggccgcggtgggggccttgctgatgctggagttcttcgggcaggacctgacgctgatcgcgaccatcggcatcctgctgctgatcggcatcgtgaagaagaacgcgatcatgatgatcgacttcgcgctcgacgcgcagcgccatcagggcatggcgcccgaggcagcgattcgcgaagcctgcgtgcggcgcttccggccgatcacgatgaccacgctggccgcgctgatgggcgcgctgcccatcgcgctgggcatcggcgccggcgccgagctgcggcagccgctgggtctggcggtggtgggcggcctgctgttctcgcaggcgatcacgctctacctcacgccggtgatctacctctacctcgaccgctacagcggtcgtgggccgatccagacgccggaggtcgtggaagcccgctga

SEQ ID NO: 2652 - protein, 1028 aa, Rubrivivax gelatinosus PM1
MNLSELFIRRPVMTVLLNLAMVVAGVIAYRQIPIAALPSYNTPVINVTASLPGASPETMATSVALQLEKQFSTIPSLSMISSTSTLGTTSLTLEFDEGRDIDAAAVDVQAALLRAERTLPQDMTAPPSYRKVNPADAPVLLMAMTSPSLNLSDLNDYAEHLISPALSTLPGVAQVNIFGQRRFAVRVRVHPQALAARDIAIEELSAALATANANTPVGTLEGDRQTLTVQANRQLRNAAEFSDLIVSSKNGNTVRLRDVATVEDSYESVKTSANFNGEASITLAVQRQPDANTVAVVDAVKAALPGFTAQLPQSIQLSLLNDRSTSIREALHDVNLTLLGTIVLVVLVIFLFLRRAVATVIPTLSLPVSLIGAVALLWAGGYSLDNISLLGLTLAVGLVVDDAIVMLENIMHHVEQGMDPFEAALKGSREVGFTIISISTSLVAVFIPIFFMPGVIGLLFHEFAVIVSLAILVSAFVSLTLVPMLAGRYLKPEATQRPPGALVRGFERGFEAVTRWYTRSLDLALRHRRLMLGVGVLTFALTALMFVTIPKGFFPEEDIGQIRASTEAAEDTSFAAMVKLQDQAVQVMLADPNVLSVNSVNGGSGTQNTGRMFINLKPRGERLPMKQVVEGLRKKLSQVAGITVYLQPVQNLQLGGRPSKSRYQYILQSVKADELNDWAARLQEKLRADPRFRDVTSDSQLKGLQASLKIDRDKANTLGVSVDSIRNALFSAFGERQVATIYTTADSYQVIMEVAPDAKRDESAFDGIYLRSSNGALVPLNSFATVERTLGPTSVNHVGQLQAVTVSFNLAPGVPLGDATRQLEAYGQEIRLPASVITSYGGDAAVFKTSQGSQAILIVAALLVIYVLLGVLYESYIHPLTILAGLPSAAVGALLMLEFFGQDLTLIATIGILLLIGIVKKNAIMMIDFALDAQRHQGMAPEAAIREACVRRFRPITMTTLAALMGALPIALGIGAGAELRQPLGLAVVGGLLFSQAITLYLTPVIYLYLDRYSGRGPIQTPEVVEAR

SEQ ID NO: 2653 - DNA, 3114 bp, Geobacter metallireducens GS-15
  CDS (1)..(3114)
atgagcatcgccgaggttttcatccggcggccggtcatgacgagcctcgtcatgctggctgtcatgctcttcggtctcctcgcctacagcaagctgccggtcaacgaccttcccaccgtcgactatccgaccatccaggtttccgccagccttcccggcgccaaccccgacaccatggccgcgtcggtggcgctccccctggagcgggagttctcaaccatagccggcgtggactccatgaactccaccaacggtctcggaacgtcccgcatcaccatcaaattcaccctggagcgcgacatcgacgccgccgcccaggatgtccaggcagccatctcccgggcccaacgccagctcccccaagacatgccggctccaccgtcgttccagaaggttaacccggcggaccaggcagttctctatctggccctcagctcgccgacgcttcccctgtcaacggtcaatgactatgccgaagccatgatcgcccagcggatttccatggttaacggcgtggcctcggtgcaggtcaacggttcccagaagtacgcggtgcgggtccaggtggaccccaaggcgcttgcggcccgcaagatcggcatcgacgaggtggcccaggccctggagcgcggaaacgtgaacctccccaccggcaccctccagggaaagcacgaggccctaacgatccagaccagcggccagctctatagcgccaaggagtatgagccgctcatcgttgcctaccgcaacggttcgccggtccgcctcggggagatcggcaaggtcatcgacagtgtggagaacgacaaggttgccggctggtacaagcagacccgcgccatcatcctcgccatccagcgccagcccggcaccaacaccatcgaggtggtgaaccgtatcaaggagctgattccccacttccgctcgcaactccccgcctcggtggacctgaacatccttttcgaccggaccggggggatcaaggagtcggtggccgacgtgaagttcaccatgatgctcaccatctgtctcgtcatcctggtgattttcctctttctgcgcaacctccccgccacactgattccgagcctcgccctgccactctccatcgtcggagccttttcagccatgtacctgatggggttctcggtcaacaacataaccctcatggccctgaccctttcggtgggcttcgtggtggacgacgccattgtcatgctggagaacatcgttcgacacctggagaagggagaggaccccagggaggcgtcgttgcgcggctcccgggagatcggcttcaccattgtctccatgaccatttcgctggtggcggtcttcattccggttctcttcatgcaggggatgctcggtcggctcctccacgaattcgccgtcaccatcagcctagcgatcctcatctccggtttcgtttccctctcgctcacccccatgctctgcagccgcttcctccgtccccatggcgagcagcgccacggccggttctacaatttcatggagcgcttcttcaacggcatgtaccgcttctatgaagtgaccctggcgcgagtcctgaggcttcgccggacggtgctggccggcacgctggtcttgacgctcctcaccatctggctctttaccaaggtacccacgggcctgttgccgagcgacgacatcggtgccatcttcgccatgaccgaaggggcccagggaatctccttcgaggagatgaaggccaagcagcagcaactggcggccatcgtgctccaggacccgaacgtggaggcgttcatgtcgacggcgggcgccagcgggagccgtgtgtcgtccaactcgggtttcatgttcatccgcctcaagccccgccaggagcggaagctgaacgccgatcaggtgattcagcagttgcgtcccaaggtaatgggggtgccggggattgtcatgttcctccagaacccgccgccgatccgcctggaggcccggctggcgaaaagccagtaccagttcgtgctccagagccccgacaccgaggatctctacgcgcgcgcggccgaactggaggcaaagctgaagcaggtgccgttgctgctggacgtgacgagcgaccttcagcttcagaatccacaggttcagctggacatcgaccgggacaaggcatcggccctcggggtcaccgcccatcaggtagaggacgcactgtactacgcctacggtgcacggcaggtcaccaccatcttcgcccccgacaatcagtataaggtgattctggaactggagccccaatatcagaccgatcctacagccctctccatgctctacatccgctcccagaagggggatctggtccccctgaatacgctggcaaacctgcggcgcaccctcggccccctgtcggtgaaccatctggggcagatcccggcggtgaccatctccttcaacctgcggcccgacacccccctgagcgaggcggtgtcagccatcgaaaaggtgagccgcgagacgcttcccgccaccttcaccacaagcttccagggggttgcccaggcctatcagcagtcaaccacggggctcacggttctgattatcatggcgattgttgttatctacatcgttctcggcatcctctacgagagctacatccatccgatcaccatcctgtcgggattgccttcagccggtttcggggcgctgatcaccctcatgattttcggcaaggagctgaacctctatggtttcgtgggccttatcatgctgatcggcatcgtcaagaagaacgccatcatgatgatcgacttcgcgctggaggcccagcgcagtgaagggatgccccccctggaggcgatccaccaaggcgcccttgtccgttttcgtcccattatgatgaccaccatggcggctctcatgggaacccttcccattgccctcggcatcggggcaggggccgaggcccggcgcaccctcgggctttcagtcgtgggggggcttgtcgtgtcgcagctgctgaccctctacatcacgccggtcatctactactatatggatcgcatgcaggagtgggtaaagacgcgtttcgggatcgggcagagttcccgaaaggagcgacagtcggcagggtag

SEQ ID NO: 2654 - protein, 1037 aa, Geobacter metallireducens GS-15
MSIAEVFIRRPVMTSLVMLAVMLFGLLAYSKLPVNDLPTVDYPTIQVSASLPGANPDTMAASVALPLEREFSTIAGVDSMNSTNGLGTSRITIKFTLERDIDAAAQDVQAAISRAQRQLPQDMPAPPSFQKVNPADQAVLYLALSSPTLPLSTVNDYAEAMIAQRISMVNGVASVQVNGSQKYAVRVQVDPKALAARKIGIDEVAQALERGNVNLPTGTLQGKHEALTIQTSGQLYSAKEYEPLIVAYRNGSPVRLGEIGKVIDSVENDKVAGWYKQTRAIILAIQRQPGTNTIEVVNRIKELIPHFRSQLPASVDLNILFDRTGGIKESVADVKFTMMLTICLVILVIFLFLRNLPATLIPSLALPLSIVGAFSAMYLMGFSVNNITLMALTLSVGFVVDDAIVMLENIVRHLEKGEDPREASLRGSREIGFTIVSMTISLVAVFIPVLFMQGMLGRLLHEFAVTISLAILISGFVSLSLTPMLCSRFLRPHGEQRHGRFYNFMERFFNGMYRFYEVTLARVLRLRRTVLAGTLVLTLLTIWLFTKVPTGLLPSDDIGAIFAMTEGAQGISFEEMKAKQQQLAAIVLQDPNVEAFMSTAGASGSRVSSNSGFMFIRLKPRQERKLNADQVIQQLRPKVMGVPGIVMFLQNPPPIRLEARLAKSQYQFVLQSPDTEDLYARAAELEAKLKQVPLLLDVTSDLQLQNPQVQLDIDRDKASALGVTAHQVEDALYYAYGARQVTTIFAPDNQYKVILELEPQYQTDPTALSMLYIRSQKGDLVPLNTLANLRRTLGPLSVNHLGQIPAVTISFNLRPDTPLSEAVSAIEKVSRETLPATFTTSFQGVAQAYQQSTTGLTVLIIMAIVVIYIVLGILYESYIHPITILSGLPSAGFGALITLMIFGKELNLYGFVGLIMLIGIVKKNAIMMIDFALEAQRSEGMPPLEAIHQGALVRFRPIMMTTMAALMGTLPIALGIGAGAEARRTLGLSVVGGLVVSQLLTLYITPVIYYYMDRMQEWVKTRFGIGQSSRKERQSAG

SEQ ID NO: 2655 - DNA, 3072 bp, Thiobacillus denitrificans ATCC 25259
  CDS (1)..(3072)
atgaacctgtcgcggcgcttcatcgagcggccggtcgccacgctcatgctggcgctggcgatggccttgttcggcgcgctcgcctacacccagctgccgattaacgacctgccgcaggtcgatttcccgaccttgcgcgtgagcgccgcgttgcccggcgcgaaccccgagacgatggccaacacggtcgcgacgccgctcgaacggcagctcgcgaccgtcgccgggatcgagtcgatgagttcgcagtcgagtcagggatcgaccagcatcacgctgcagttcgagctcggtcgcgacatcgacgccgcggcgcaggacgtgcagaccgccgtggcgcaggcggcgcgcaatctgccccagggcatggacccgccacagctgcggaagatcaacccggccgattcaccgatcctctatctcgcgctctcgtccgagcgcctgccgctgaccgagctcgacgcgctcgccgattcgcgcgtcgcgcagcgcctgtcgagcctctccggggttgcccaggtgctcgtgttcggctcgcagaaatacgcattgcggatctacctcgacccggcgaagctgcaggcgcgcggcctcaccttcgccgacgtcatcgagaaggtacaggccgccaacgccaacctgccggccggaacgctagacggcgcgtcgcgcgcctataccgtgaaagcgccagtcgcgctcgccgatgcgcgcgacttcggcgaaatcatcgtcgcctaccgcgacggcaccgcgctcagggtgaaggatctcggacgcgccgaggacagcgtcgaggacgacaagcgccgcacctggtacaacggcacgcgcgcgatcgtcctcgccatccagcgccagcccggcgcgaacacggtcgaggtcgtcgagcgcatccgcgcgatgctgccgcagatcgaggccgagctgcccgacggcgtgcgcctgcaggtgcattccgaccgttcgcgcttcgtcaaggattcgctgcacgaagtgaatttcacgctcttgctcgcgctcgtgctggtgatcctcgtcatcttcgccttcctgcacaacctgcgcgcgacgctgatcgccgcgctggtgctgccgagctcgctgctcggcaccttcgccttcatgcatctgcttggctacagcctcaacaacctctcgctgatggcgatcacgctcgccatcggtttcgtcgtcgacgacgccgtcgtcgtgatcgagaacatcacgcgccacctcgacatgggcaagccgcgcatgcaggccgcgctcgatggcgcccaggagatcggcttcacggtgctgtcgatgacgatttcgctcgccgcggtcttcctgcccatcctgttcatgggcggcatggtcggccggctgttccaggaattcgccgtcagcatcggcgtcgccgtgctgctctcgggcgtcgtcgcgctgacgctgacgccgatgctgtgcgcgcgcgcgctcgttcgcgaatcgccgacgaaccggctctcgcgcgcgttcgacgccggattcacgcgcttccagcgcttttacggcgacagtctgcgcgcgtcgatgcgccatcgcggcgccatgcttctgttgtcgctcgtcctgctcgtcgcgatgctgtggctcgccggccaggtgaagcagggattcattccgcgcgtcgactcgggaatgattttcgcgagcgtgcagtatccggaaggcatccctttcgacgagctgtcccgccgccagcagcaactcgcggcacgcgtgcagcggcacccggccgtcgagggcctgatgtcgtcggccgggcagggcggcggcggggtcagcggcggcaacgtcggccgcctcgtgatccgcctcgcgccgcgcggggaccggccgggcgccgacgaggtcatcgaccagctgcgcgcagagacgcgcggtctcgccggcgtcaacgtgagcttccagaatccggcgtcgatcaacgtcggcgcgctcgcgtcgagcagcgattaccagctgacgctgacctcgggcgacttcgaggcgctcaaggccgccgccagcgaggtcgagacacggctcgccagcgtcgcgcagatcgacgaggtcacgagcaacctcgagttgcgcaaccccgagctgcgcgtgaacctcgacccggtcgcggcggcgcgcctcggcgtgaccacgcaacaggtccagcaggcgctctacgacgccttcggcgggcgccgcatcagcgaaatctacggcgccagcgaccaatacgtcgtgagcgtcaaggcgcttcccgaggcgcaacagaatccagccgtcatcggcgagttgccgctgaagaccgcgtcgggcacgctgatccggctcgacgccgtcgcgaccgtcgaggccggggtcgggccggtggcggtgcatcactacggccagcagcccgccgtcacgctgtcgttcgacctcgcaccgggcgtctcgctcgacgccgccctggccgcggcgcatacggccgccgccgaagttgtcccggccgacgtcgcgctggcgttcaccggggcggcggaaaaattccaggaatcgaccgtgcaactgccgctgctgctgctgttcacggtcgtcgtcatctacatggtgctcgcggtgctgtacgaacacctcggccatccgctcacgatcctgaccgccttgccgctcgccggcttcggcgcgctgctcgtgctgctgctcgccgagcaggaactcaacatcttcagcttcgtcggcatcatcctgctcgtcggcctggtcaagaagaacggcatcatgatgatcgacttcgcactggcccggcagcgcgccggcatgagcgccgaggacgcgatcgtcgaggcgagcctcgtgcgcctgcggccgatcatgatgacgaccttcgccgcgatcctcgccacgctgccgatcgcgatcggcttcggcgcgggcggcgaggcgcgccgcccgctcggcatcgccgtcgtcggcgggctcgcgttctcgcagttcctcacgctctacatcacgccgaccttctacgtcagcatggccagcgccggcgccgcgctgacgcgctggcgcgcgcgccacgcctga

SEQ ID NO: 2656 - protein, 1023 aa, Thiobacillus denitrificans ATCC 25259
MNLSRRFIERPVATLMLALAMALFGALAYTQLPINDLPQVDFPTLRVSAALPGANPETMANTVATPLERQLATVAGIESMSSQSSQGSTSITLQFELGRDIDAAAQDVQTAVAQAARNLPQGMDPPQLRKINPADSPILYLALSSERLPLTELDALADSRVAQRLSSLSGVAQVLVFGSQKYALRIYLDPAKLQARGLTFADVIEKVQAANANLPAGTLDGASRAYTVKAPVALADARDFGEIIVAYRDGTALRVKDLGRAEDSVEDDKRRTWYNGTRAIVLAIQRQPGANTVEVVERIRAMLPQIEAELPDGVRLQVHSDRSRFVKDSLHEVNFTLLLALVLVILVIFAFLHNLRATLIAALVLPSSLLGTFAFMHLLGYSLNNLSLMAITLAIGFVVDDAVVVIENITRHLDMGKPRMQAALDGAQEIGFTVLSMTISLAAVFLPILFMGGMVGRLFQEFAVSIGVAVLLSGVVALTLTPMLCARALVRESPTNRLSRAFDAGFTRFQRFYGDSLRASMRHRGAMLLLSLVLLVAMLWLAGQVKQGFIPRVDSGMIFASVQYPEGIPFDELSRRQQQLAARVQRHPAVEGLMSSAGQGGGGVSGGNVGRLVIRLAPRGDRPGADEVIDQLRAETRGLAGVNVSFQNPASINVGALASSSDYQLTLTSGDFEALKAAASEVETRLASVAQIDEVTSNLELRNPELRVNLDPVAAARLGVTTQQVQQALYDAFGGRRISEIYGASDQYVVSVKALPEAQQNPAVIGELPLKTASGTLIRLDAVATVEAGVGPVAVHHYGQQPAVTLSFDLAPGVSLDAALAAAHTAAAEVVPADVALAFTGAAEKFQESTVQLPLLLLFTVVVIYMVLAVLYEHLGHPLTILTALPLAGFGALLVLLLAEQELNIFSFVGIILLVGLVKKNGIMMIDFALARQRAGMSAEDAIVEASLVRLRPIMMTTFAAILATLPIAIGFGAGGEARRPLGIAVVGGLAFSQFLTLYITPTFYVSMASAGAALTRWRARHA

SEQ ID NO: 2657 - DNA, 3156 bp, Methylobacillus flagellatus KT
  CDS (1)..(3156)
atgaagcgcatcatttcctggtccaggctcaggcccgatgagcgcggacctgcctccctgttcatcctgcggccagtgatgaccctgctggtgtcgctgggcatgatgcttgcgggctggctggcttttggcctgttgccggttgcgccgttgccgcaggtggatttcccgacgatcaatgttaccgcctcgctggccggtgcgaacccggagaccatggcctcttcggtggcgacaccgctagagcgtagcctgggccggatatcgggcatcagcgaaattacgtcatccagttcccaggggagcacgtcgattaccttgcagttcaacctggacaaggatatcgatgtcgctgcacgggaagtgcaggccgcaatcaatgcggctgcgagcatgttgcccagcggcatgccgaatcgacccagctatcgcaagatcaatccggcggatatgccgagcatggtgcttaccatgacttccagaaccaagagcatgggtgagctgtacgacctggctaccaacatggtgtcgcgcaagatttcgcaagtacagggggtgagccaggtcaatgtcgcaggcagctccctgccggcagtacgcgtggatatcaatcccgatgccttggttcagcaaggactgtcgctggatgcagtacgcaatgccatcagcgctgctaatggcaacggccccaagggatatctgcagaatgacgaataccgttggcagctggatgcggatgaccgcctgctgcgtgccaaggattaccgctcactcatcatcgccaccaatcaaggtgcggtgacgcgcctgagcgacgtggccagggtgtatgactcggtggaggatatccgcaacgtgggcttccacaataaccagcgtgccatcctgctgatggtcagccgcgagccgggcgccaacatcatcgagatgattgagcgtatccatgcagagctgcccagcatccagagtagcctgggcgaggatatcaagctcaccgttgtggaagaccgcagcccgaatatccgtgcttccctgcacgaagccgagctgacactggtgattgcggtggcgcttgtgatcctggtagtgtttcttttcctgcgaaatagtcgcgcgacgctgattcctgcgttggccgtgccggtgtcgctgatatcaacctttgccgtcatgtatctttgtgggtattcactgaataacctgaccttgatggcgctgatcatcgccacgggttttgtcgtggatgatgccatcgtggtggttgagcatatcagcaagcgcatcgagcagggtgaagcgccgctccgggcttcgttgcgcggtgcccgtgaagtcggctttaccgtggtgtccatgagcttttcgctggtggcggtgttcatcccgctgctgttcatgggagatatcactggccgcctgttccgggagtttgcagtgacgctgtctgtcgcgatcctggtctcgctgttcgtctcgctgacgctgacgcccatgctgtgcgcctatctgctcaggcgtcaagatgctgcgaccattgagggagaaagcgccccggagagacgcagagcaggcttgttcatccgcatacagcgccgctaccgccagagcctggcctgggctttggatcatgctgcggggatgatggtgatcctgctgttcgcagttgcggtcaatgtctacctctatattgccatccccaaggggatgtttccggagcaggatactggccggctgtttggcaatgcccgcgcggaccaaggcgtgtcgttcaatgagctacagagaaagctggaagcattccgcagcatcctgctggcagatcccgcagtagaccaggtcatggggatgtcgggtagtggacgcgggccgggtgcctccaccaattccggcaactttatcattatcctcaagaacattcgcgagcgtgagtcggcacaagccgtcattgcacgcttgcggcccaagctggcgcaagtgccgggggcctccatgttcctggtcaatatgcaggatttgcgcatcggcggccgatctaccgattccagctaccagatgacactgaagagcgatgatgtcaaagacctacgcaaatgggagaacaaggtattggagactctgcaatccttgcccgatatcacggatgttggcggcggcggccgcagccgttcaatacaggttttcctcgatatagaccgcgaggcggccaaacgcctgggtatcgacgttgagatggtgattgcgctgctgaacaactcctacgcccagcgccagatttccacgatttacgaagaccagaaccagtaccgcgtggtcatgggtgtggacgaaaaatacatgcagggccccgatatcttgtctagcctttatgtgctgactgccagcggcaaccgtgtaccgctgtccaacctcgtgagcctgagttacaacaatgcaccgccaaggatagagcacgaggggcagttcgcctccgtgacctattccttcaatctgccagagggcggtaatctcgaatatgcgaagcagaagatcaggagtgcccttgccgatctcaaaatgccgctcaacgtgcaggcgaccttttccggtacggccagcgcccaaagcaaagtgctcaagcaaatgccatggctgatcctggctgcgctggtttcggtctatattgtcctgggcatgctgtacgagagttacgtccatccactcaccatcctctcgacactgccttctgcaggtgtgggtgcgttgctcgccttgatcctgttcgatacgccgctcaccctcatcgccttgatcggcatcatcctcctgattggcatcgtcaagaaaaacgccattctcatgatcgatttcgcactggtggcggagcgcgaacgtggcttgtcttccagggatgccatcatggatgcctgccagcagcgtctgcgccccattctcatgacgaccatggcggcgttgctgggcgcattgccattgatattcggcaccgacggcgatgcgccattgcgtcggcctctgggtatcgcgatcgtcggcggcctgctgctgagtcagttgcttaccttatacaccacacccgtggtctatctttaccttgatcgtttacgcctgtgggtcttgcgtcgcaagccgcaggccgcaatgatggagaaaacggaatga

SEQ ID NO: 2658 - protein, 1051 aa, Methylobacillus flagellatus KT
MKRIISWSRLRPDERGPASLFILRPVMTLLVSLGMMLAGWLAFGLLPVAPLPQVDFPTINVTASLAGANPETMASSVATPLERSLGRISGISEITSSSSQGSTSITLQFNLDKDIDVAAREVQAAINAAASMLPSGMPNRPSYRKINPADMPSMVLTMTSRTKSMGELYDLATNMVSRKISQVQGVSQVNVAGSSLPAVRVDINPDALVQQGLSLDAVRNAISAANGNGPKGYLQNDEYRWQLDADDRLLRAKDYRSLIIATNQGAVTRLSDVARVYDSVEDIRNVGFHNNQRAILLMVSREPGANIIEMIERIHAELPSIQSSLGEDIKLTVVEDRSPNIRASLHEAELTLVIAVALVILVVFLFLRNSRATLIPALAVPVSLISTFAVMYLCGYSLNNLTLMALIIATGFVVDDAIVVVEHISKRIEQGEAPLRASLRGAREVGFTVVSMSFSLVAVFIPLLFMGDITGRLFREFAVTLSVAILVSLFVSLTLTPMLCAYLLRRQDAATIEGESAPERRRAGLFIRIQRRYRQSLAWALDHAAGMMVILLFAVAVNVYLYIAIPKGMFPEQDTGRLFGNARADQGVSFNELQRKLEAFRSILLADPAVDQVMGMSGSGRGPGASTNSGNFIIILKNIRERESAQAVIARLRPKLAQVPGASMFLVNMQDLRIGGRSTDSSYQMTLKSDDVKDLRKWENKVLETLQSLPDITDVGGGGRSRSIQVFLDIDREAAKRLGIDVEMVIALLNNSYAQRQISTIYEDQNQYRVVMGVDEKYMQGPDILSSLYVLTASGNRVPLSNLVSLSYNNAPPRIEHEGQFASVTYSFNLPEGGNLEYAKQKIRSALADLKMPLNVQATFSGTASAQSKVLKQMPWLILAALVSVYIVLGMLYESYVHPLTILSTLPSAGVGALLALILFDTPLTLIALIGIILLIGIVKKNAILMIDFALVAERERGLSSRDAIMDACQQRLRPILMTTMAALLGALPLIFGTDGDAPLRRPLGIAIVGGLLLSQLLTLYTTPVVYLYLDRLRLWVLRRKPQAAMMEKTE

SEQ ID NO: 2659 - DNA, 3111 bp, Pseudomonas aeruginosa
  CDS (1)..(3111)
atgagtctgtccacgcccttcatccgccgcccggtcgccaccacgctgctgaccctggcgttgctgctggccggcaccctgtcgttcggcctgctgccggtggcgccgctgcccaacgtcgattttccggccatcgtggtcagcgccagcctgccgggcgccagcccggaaaccatggcctcgtcggtggccacgccgctggagcgctcgctgggacggatcgccgggatcagcgagatgacctccagcagttcgctgggctcgaccaccgtggtgctcgtgttcgacctggagaaggacatcgacggcgccgcccgcgaggtgcaggcggcgatcaacggcgcgatgagcctgctgcccagcggtatgccgaacaatcccagctaccgcaaggccaacccctcggacatgccgatcatggtcctcaccctgacctcggagacccagagtcgcggcgagatgtacgacctcgcctcgaccgtgctggcgcccaagctgtcgcaggtgcagggggtagggcaggtgagcatcggcggcagctcgctgccggcggtgcgggtcgacctcaacccggatgccatgagccagtacgggctgtccctggacagcgtgcgcacggccatcgccgcggccaacagcaacggccccaagggcgccgtcgagaaggacgacaagcactggcaggtggacgccaacgaccagttgcgcaaggcccgcgagtacgagccgctggtgatccactacaacgccgacaacggcgccgcggtgcgcctcggcgacgtggccaaggtcagcgactcggtggaggacgtgcgcaacgccggcttttccgacgacctgccggctgtgctgctaatcgtcacccgccagcccggcgccaacatcatcgaggccaccgacgccatccacgcgcaactgccggtgttgcaggaactgctcgggccgcaggtcaagctgaacgtgatggacgatcgcagcccgtcgatccgtgcgtcgctggaagaggccgagctgaccctgctgatctcggtggcgctggtgatcctggtggtcttcctgttcctgcgcaacggccgcgccacgctgatccccagcctggcggtgccggtctcgctgatcggcaccttcgcggtcatgtacctgtgcgacttcagcctgaacaacctgtcgctgatggcgctgatcatcgccaccggcttcgtggtggatgacgccatagtggtggtggagaacatcgcccgacgcatcgaggagggcgatccgccgatccaggcggcgatcaccggcgcccgccaggtcggtttcaccgtgctgtcgatgacgctctcgctggtcgcggtgttcatcccgctgctgctcatgggtggcctcaccggacggctgttccgcgagttcgcggtgactctctcggcggcgatcctggtgtccctggtggtatccctgaccctcacgccgatgctctgcgcgcgtctgctgcgtccgctgaaacggcccgaaggcgcttccctggcgcggcgcagcgatcgcttcttcgccgccttcatgctgcgctaccgcgccagcctgggctgggcgctggagcactcgcggctgatggtggtgatcatgctggcctgcatcgccatgaacctctggttgttcgtggtggtgcccaagggcttcctcccgcagcaggactccgggcgcctgcgcggctacgcggtggccgaccagagcatctcgttccagtccctgagcgcgaagatgggcgagtaccgcaagatcctctcttccgatccggcggtggaaaacgtggtcggcttcatcggtggcggccgttggcagtcgagcaacaccggttcgttcttcgtcactctcaagccgatcggcgagcgcgacccggtggagaaggtcctcacccggctgcgcgagcggatcgccaaggtgcccggcgcggcgctctatctcaacgccggccaggacgtgcgcctgggcggccgcgacagcaacgcgcagtacgaattcaccctgcgcagcgacgacctgaccctgctccgcgaatgggcgccgaaggtcgaggcggcgatgcgcaagctgccgcagctggtggacgtcaacagcgactcccaggacaagggcgtgcagacccgcctggtgatcgaccgcgaccgcgcggcgaccctggggatcaacgtggaaatggtcgacgcggtgctcaacgactctttcggccagcgccaggtgtcgaccatcttcaacccgctgaaccagtaccgggtggtgatggaggtcgaccagcagtaccagcagagcccggagatcctccgccaggtccaggtgatcggcaacgacggccagcgcgtgccgctgtccgcgttcagccactacgaaccgagccgggcaccgctggaggtcaaccaccagggccagttcgccgccaccacgctgtccttcaacctggcaccgggcgcgcagatcggcccgacccgcgaggccatcatgcaggccctggagccgctgcacatcccggtggacgtgcagaccagcttcgagggcaacgccggcgcggtgcaggacacgcagaaccagatgccctggctgatcctcctggcgctgctggcggtgtacatcgtcctcggcatcctctacgagagctacgtgcacccgctgaccatcctctcgaccctgccttcggccggggtcggcgcgctgctcgcgctgatcctctgccgcagcgagctgagcctgatcgcgctgatcggcatcatcctgctgatcggcatcgtcaagaagaacgcgatcatgatgatcgacttcgccctggaggccgagcgcaaccacggcctgagcccgcgcgaggcgatcctcgaggcctgcatgatgcgcttccggccgatcatgatgaccaccctggccgccttgctcggcgccttgccgctgatcttcggcatcggcggcgacgccgcgctgcgccggccgctgggcatcaccatcgtcggcgggctgatcggcagccagttgctgaccctgtacaccaccccggtggtctacctctatctcgaccgcctgcgccactgggtcaaccagaaacgcggcgtacgcacggacggtgcgctggagacacccctatga

SEQ ID NO: 2660 - protein, 1036 aa, Pseudomonas aeruginosa
MSLSTPFIRRPVATTLLTLALLLAGTLSFGLLPVAPLPNVDFPAIVVSASLPGASPETMASSVATPLERSLGRIAGISEMTSSSSLGSTTVVLVFDLEKDIDGAAREVQAAINGAMSLLPSGMPNNPSYRKANPSDMPIMVLTLTSETQSRGEMYDLASTVLAPKLSQVQGVGQVSIGGSSLPAVRVDLNPDAMSQYGLSLDSVRTAIAAANSNGPKGAVEKDDKHWQVDANDQLRKAREYEPLVIHYNADNGAAVRLGDVAKVSDSVEDVRNAGFSDDLPAVLLIVTRQPGANIIEATDAIHAQLPVLQELLGPQVKLNVMDDRSPSIRASLEEAELTLLISVALVILVVFLFLRNGRATLIPSLAVPVSLIGTFAVMYLCDFSLNNLSLMALIIATGFVVDDAIVVVENIARRIEEGDPPIQAAITGARQVGFTVLSMTLSLVAVFIPLLLMGGLTGRLFREFAVTLSAAILVSLVVSLTLTPMLCARLLRPLKRPEGASLARRSDRFFAAFMLRYRASLGWALEHSRLMVVIMLACIAMNLWLFVVVPKGFLPQQDSGRLRGYAVADQSISFQSLSAKMGEYRKILSSDPAVENVVGFIGGGRWQSSNTGSFFVTLKPIGERDPVEKVLTRLRERIAKVPGAALYLNAGQDVRLGGRDSNAQYEFTLRSDDLTLLREWAPKVEAAMRKLPQLVDVNSDSQDKGVQTRLVIDRDRAATLGINVEMVDAVLNDSFGQRQVSTIFNPLNQYRVVMEVDQQYQQSPEILRQVQVIGNDGQRVPLSAFSHYEPSRAPLEVNHQGQFAATTLSFNLAPGAQIGPTREAIMQALEPLHIPVDVQTSFEGNAGAVQDTQNQMPWLILLALLAVYIVLGILYESYVHPLTILSTLPSAGVGALLALILCRSELSLIALIGIILLIGIVKKNAIMMIDFALEAERNHGLSPREAILEACMMRFRPIMMTTLAALLGALPLIFGIGGDAALRRPLGITIVGGLIGSQLLTLYTTPVVYLYLDRLRHWVNQKRGVRTDGALETPL

SEQ ID NO: 2661 - DNA, 3081 bp, Salmomella typhimurium
  CDS (1)..(3081)
atgcgctttttcgcccttttcatctaccgcccggtcgccaccattttgattgccgccgccattacgctgtgcggcattctgggctttcgtctgctgccggtcgccccgctgccgcaggtcgatttcccggtgattatggttagcgcctcgctgccgggcgcctcgccggaaaccatggcttcgtcggtggcgacgccgttggaacgctctttgggacgcattgcaggcgtcaatgaaatgacctccagcagctcgctcggcagtacacgcattattctcgaatttaatttcgatcgtgatattaacggcgcggcgcgcgacgtgcaggccgccattaacgccgcgcaaagcttgttgccaggcggaatgcccagccgcccgacttatcgcaaggccaacccgtccgacgcgccgattatgattttaacgcttacctcggagagctggtcacagggcaaactgtatgatttcgcctctacccaactggcgcaaaccatcgcgcaaattgacggcgtcggcgatgttgacgtcggcggcagctccctgcccgcagtacgtgtaggcttaaacccgcaggcgctctttaaccagggcgtctcgctggatgaggtccgcgaagcgatcgacagcgccaacgtacgccgaccgcaaggcgcaattgaagatagcgtccaccgctggcaaatccagaccaacgacgaactgaaaaccgccgccgaatatcagccgctgattattcactataacaacggcgcggcggtacgcctgggcgacgtcgccagcgtcaccgactcggtgcaggatgtccgtaacgccgggatgacgaacgctaaacccgctattttgttgatgatccgcaagctgccggaggccaatattattcagacggtcgacggcatccgggcaaaactgccggaactgcgggcaatgatccccgccgctatcgatttacaaatcgcccaggatcgttcgccgacgattcgcgcatcgctgcaagaggtagaagagacactggctatctctgttgcgctggtgatcctggtggtgtttttattcctgcgctccgggcgcgccacgctaattcccgccgtcgccgttcccgtttcgctcatcggcaccttcgccgccatgtatctgtgcggcttcagcctcaacaatctgtcgctgatggcgctgactatcgcgaccggatttgtcgttgatgatgccattgtggtgctggaaaatatcgcccgccatctggaggcgggaatgaaacctttgcaggcggcattacagggtacgcgagaagttgggtttacggtcatctccatgagtctgtcgctggtggcggtatttctgccgctgctgttaatgggcggcctgccaggacgattattacgggaattcgccgttaccctctcggtggcgattggcatttcgctggtggtctcgctcacgctgacgccgatgatgtgcggctggatgcttaaatcaagcaaaccgcgcacccaaccgcgtaaacggggcgttggccgtctgctggtcgccttgcaacagggttacggcacgtcattaaaatgggtgcttaaccatacgcgtcttgtcggtgtggtttttcttggcaccgttgcgctgaacatctggctttatatcgccatccctaaaacattctttccggagcaggacaccggcgtgttgatgggcggtattcaggctgaccaaagcatctctttccaggccatgcgcggcaagctgcaggattttatgaaaattattcgcgacgatccggcggtgaataatgtcactggttttaccggcggatcgagggtgaatagcggcatgatgtttattacgctgaagccgcgcggcgaacgcaaagagacggcgcagcaaatcattgatcgactgcgggtcaaactggcaaaagaacctggcgccaggctgtttctgatggcggtacaggatattcgcgtcggcgggcggcaggctaacgccagttaccaatatacgttgctgtctgactctctggcggcgctgcgcgaatgggagccgaaaatacgcaaagcgctctcggccctgccgcaactggcggacgtaaactccgaccagcaggataacggcgcggagatgaaccttatctacgaccgcgacaccatgtcacggctgggtattgatgttcaggccgcaaacagtctgttaaataatgctttcggccagcggcaaatttccaccatttatcagccgatgaaccagtataaagtggtgatggaagtcgatccgcgctatagccaggatatcagcgcgctggagaaaatgttcgttatcaaccgtgacggaaaagcgattcccctctcttatttcgcccaatggcggcccgccaatgcgccgctgtcggtgaaccatcagggactttccgcggcgtccacgattgcctttaacctgccgaccggcacatcgttatcgcaggcgacagaggccattaatcgcaccatgacgcagcttggcgtcccctcgacggtacgcggcagtttttccggaacggcgcaagtcttccagcagaccatgaattcacagcttattttgatagtggcggcgatcgctaccgtctacattgtgctggggatactgtacgaaagctacgtccatccactgaccattctctctactctgccatcggcgggcgttggggcgcttctggcgctggaactcttcaatgcccctttcagcctaatcgccctgatagggatcatgctattaattggcattgtgaagaaaaacgccattatgatggtcgattttgcgcttgaagcgcaacgaagcggcggcctgacgccggaacaagccattttccaggcctgcttgttacgcttccgtccaataatgatgaccacgctggcggcgctgttcggcgcactgccattggtgttatctggcggagacggttcggaattacggcagccgctggggataaccattgtcggcggtttggtcatgagccagctcctgacgctctataccacgccggtggtgtacctctttttcgatcgtctgcggctacgtttttcgcgtaaaaatagcaaaccggtagtagagatatga

SEQ ID NO: 2662 - protein, 1026 aa, Salmomella typhimurium
MRFFALFIYRPVATILIAAAITLCGILGFRLLPVAPLPQVDFPVIMVSASLPGASPETMASSVATPLERSLGRIAGVNEMTSSSSLGSTRIILEFNFDRDINGAARDVQAAINAAQSLLPGGMPSRPTYRKANPSDAPIMILTLTSESWSQGKLYDFASTQLAQTIAQIDGVGDVDVGGSSLPAVRVGLNPQALFNQGVSLDEVREAIDSANVRRPQGAIEDSVHRWQIQTNDELKTAAEYQPLIIHYNNGAAVRLGDVASVTDSVQDVRNAGMTNAKPAILLMIRKLPEANIIQTVDGIRAKLPELRAMIPAAIDLQIAQDRSPTIRASLQEVEETLAISVALVILVVFLFLRSGRATLIPAVAVPVSLIGTFAAMYLCGFSLNNLSLMALTIATGFVVDDAIVVLENIARHLEAGMKPLQAALQGTREVGFTVISMSLSLVAVFLPLLLMGGLPGRLLREFAVTLSVAIGISLVVSLTLTPMMCGWMLKSSKPRTQPRKRGVGRLLVALQQGYGTSLKWVLNHTRLVGVVFLGTVALNIWLYIAIPKTFFPEQDTGVLMGGIQADQSISFQAMRGKLQDFMKIIRDDPAVNNVTGFTGGSRVNSGMMFITLKPRGERKETAQQIIDRLRVKLAKEPGARLFLMAVQDIRVGGRQANASYQYTLLSDSLAALREWEPKIRKALSALPQLADVNSDQQDNGAEMNLIYDRDTMSRLGIDVQAANSLLNNAFGQRQISTIYQPMNQYKVVMEVDPRYSQDISALEKMFVINRDGKAIPLSYFAQWRPANAPLSVNHQGLSAASTIAFNLPTGTSLSQATEAINRTMTQLGVPSTVRGSFSGTAQVFQQTMNSQLILIVAAIATVYIVLGILYESYVHPLTILSTLPSAGVGALLALELFNAPFSLIALIGIMLLIGIVKKNAIMMVDFALEAQRSGGLTPEQAIFQACLLRFRPIMMTTLAALFGALPLVLSGGDGSELRQPLGITIVGGLVMSQLLTLYTTPVVYLFFDRLRLRFSRKNSKPVVEI

SEQ ID NO: 2663 - DNA, 3081 bp, Salmomella typhi
  CDS (1)..(3081)
atgcgctttttcgcccttttcatctaccgcccggtcgccaccattttgattgccgccgccattacgctgtgcggcattctgggctttcgtctgctgccggtcgccccgctgccgcaggtcgatttcccagtgattatggttagcgcctcgctgccgggcgcctcgccggaaaccatggcttcgtcggtggcgacgccgttggaacgttctttgggacgcattgcaggcgtcaatgaaatgacttccagcagctcgctcggcagtacgcgcattattctcgaatttaatttcgatcgcgatattaacggcgcggcgcgcgacgtgcaggccgccattaacgccgcgcaaagcttgttgccaggcggaatgcccagccgcccgacttatcgcaaggccaacccgtccgacgcgccgattatgattttaacgctcacctcagagagctggtcacagggcaaactgtatgatttcgcctctacccaactggcgcaaaccatcgcgcaaattgacggcgttggcgacgttgacgtcggcggcagctccctgcccgcagtacgtgtaggcttaaacccgcaggcgctctttaaccagggcgtctcgctggatgaggtccgcgaagcgatcgacagcgccaacgtacgccgaccgcaaggcgcaattgaagatagcgtccaccgctggcaaatccagaccaacgacgaactgaaaaccgccgccgaatatcagccgctgattattcactataacaacggcgcggcggtacgcctgggtgacgtcgccagcgtcaccgactcggtgcaggatgtccgtaacgccgggatgacgaacgctaaacccgctattttgttgatgatccgcaagctgccggaggccaacattattcagacggtcgacggcatccgggcaaaactgccggaactgcgggcaatgatccccgccgctatcgatttacaaatcgcccaggatcgttcgccgacgattcgcgcatcgctgcaagaggtagaagagacgctggctatctctgtcgcgctggtgatcctggtggtgtttttattcctgcgttccgggcgcgccacgctaatccccgccgtcgccgttcccgtttcgctcatcggcaccttcgccgccatgtatctgtgcggcttcagcctcaacaatctgtcgctgatggcgctgactatcgcgaccggatttgtcgttgatgatgccattgtggtgctggaaaatatcgcccgccatctggaggcgagaatgaaacctttgcaggcggcattacagggtacgcgggaagtcgggtttacggtcatctccatgagtctgtcgctggtggcggtatttctgccgctgctgttaatgggcggcctgccaggacgattattacgggaattcgccgttaccctctcggtggcgattggcatttcgctggtggtctcgctcacactgacgccgatgatgtgcggctggatgcttaaatcaagcaaaccgcgcacccaaccgcgtaaacggggcgttggccgtttgctggtcgccttgcaacagggttacggcacgtcgttaaaatgggtgcttaaccatacgcgtcttgtcggtgtggtttttcttggcaccgttgcgctgaacatctggctttatatcgccatccctaaaacattctttccggagcaggacaccggcgtgttgatgggcggtattcaggctgaccagagcatctctttccaagccatgcgcggcaagctgcaggattttatgaaaattattcgcgacgatccggcggtgaataatgtcactggttttaccggcggatcgagggtgaatagcggcatgatgtttattacgctgaagccgcgcggcgaacgcaaagagacggcgcagcaagtcattgaccgactgcgggtcaaactggcaaaagaacccggcgccaagctgtttctgatggcggtacaggatattcgcgtcggcgggcggcaggctaacgccagttaccaatatacgttgctgtctgactccctgccggcgctgcgcgagtgggagccgaaaatacgcaaagcgctctcggccctgccgcaactggcggacgtaaactccgaccagcaggataacggcgcggagatgaaccttatctacgaccgcgacaccatgtcacggctgggtattgatgttcaggccgcaaacagcctgttaaataacgctttcggccagcggcaaatttccaccatttatcagccgatgaaccagtataaagtggtgatggaagtcgatccgcgctatagccaggatatcagcgcgctggagaaaatgttcgttatcaaccgcgacggaaaagcgattcctctctcttatttcgcccaatggcggcccgccaatgcgccgctgtcggtaaaccatcagggactttccgcagcgtccacgattgcctttaacttgccgaccggcacatcgttatcgcaggcgacggaggccattgatcgcaccatgacgcagcttggcgtcccctcgacggtacgcggcagtttttccggaacggcgcaagtcttccagcagaccatgaattcacagcttattttgatagtggcggcgatcgctaccgtctacattgtgctggggatactgtacgaaagctacgtccatccgctgaccattctctctactctgccatcggcgggcgttggggcgcttctggcgctggaactcttcaatgcccctttcagcctaatcgccctgatagggatcatgctattaattggcattgtgaagaaaaacgccattatgatggtcgattttgcgcttgaagcgcaacgaagcggcggcctgacaccggaacaagccattttccaggcctgcttgttacgcttccgtccaataatgatgaccacgctggcggcgctgttcggcgcactgccattggtgttatctggcggagacggttcggaattacggcagccgctggggataaccattgtcggcggtttggtcatgagccagctcctgacgctctataccacgccggtggtgtacctctttttcgaccgtctgcggctgcgtttttcgcgtaaaaatagcaaaccggtagtagagatatga

SEQ ID NO: 2664 - protein, 1026 aa, Salmomella typhi
MRFFALFIYRPVATILIAAAITLCGILGFRLLPVAPLPQVDFPVIMVSASLPGASPETMASSVATPLERSLGRIAGVNEMTSSSSLGSTRIILEFNFDRDINGAARDVQAAINAAQSLLPGGMPSRPTYRKANPSDAPIMILTLTSESWSQGKLYDFASTQLAQTIAQIDGVGDVDVGGSSLPAVRVGLNPQALFNQGVSLDEVREAIDSANVRRPQGAIEDSVHRWQIQTNDELKTAAEYQPLIIHYNNGAAVRLGDVASVTDSVQDVRNAGMTNAKPAILLMIRKLPEANIIQTVDGIRAKLPELRAMIPAAIDLQIAQDRSPTIRASLQEVEETLAISVALVILVVFLFLRSGRATLIPAVAVPVSLIGTFAAMYLCGFSLNNLSLMALTIATGFVVDDAIVVLENIARHLEARMKPLQAALQGTREVGFTVISMSLSLVAVFLPLLLMGGLPGRLLREFAVTLSVAIGISLVVSLTLTPMMCGWMLKSSKPRTQPRKRGVGRLLVALQQGYGTSLKWVLNHTRLVGVVFLGTVALNIWLYIAIPKTFFPEQDTGVLMGGIQADQSISFQAMRGKLQDFMKIIRDDPAVNNVTGFTGGSRVNSGMMFITLKPRGERKETAQQVIDRLRVKLAKEPGAKLFLMAVQDIRVGGRQANASYQYTLLSDSLPALREWEPKIRKALSALPQLADVNSDQQDNGAEMNLIYDRDTMSRLGIDVQAANSLLNNAFGQRQISTIYQPMNQYKVVMEVDPRYSQDISALEKMFVINRDGKAIPLSYFAQWRPANAPLSVNHQGLSAASTIAFNLPTGTSLSQATEAIDRTMTQLGVPSTVRGSFSGTAQVFQQTMNSQLILIVAAIATVYIVLGILYESYVHPLTILSTLPSAGVGALLALELFNAPFSLIALIGIMLLIGIVKKNAIMMVDFALEAQRSGGLTPEQAIFQACLLRFRPIMMTTLAALFGALPLVLSGGDGSELRQPLGITIVGGLVMSQLLTLYTTPVVYLFFDRLRLRFSRKNSKPVVEI

SEQ ID NO: 2665 - DNA, 3186 bp, Mesorhizobium loti MAFF303099
  CDS (1)..(3186): transl_table=11
atgtgtgtcgtggtaaacttcttcattcaccgtccgatcttcgcctcggcgatcgccatcatcatggtgctcgccgggacgatttgttatttcctgctgccggtctcgcagtttcccgacatcacgccgccccaggtcgtggtcagcgcccattatcccggcgccagcgcgcaagtcgtggccgacacggtgacgacgccgctggagcagcagatcaacggcgtgcagggcatgacctacatgtcgtcgacgagctccaatgacggctcctcgaccatcaccatcaccttcgatgtcggctactccctgagcaccgccgccgtcgacgtccagaaccgcgtctcgcaggcggcctcgtcgctgccggcgatcgtcaaccagggcggcgtgacgatcaagaagcagaacccgaacttcgtgctcatcgtcaacctcacctcgcccgacaagtcggtcgatccggtggcgctgtcgaacctcgcctacctgcaggtcgtcgatccgctgaagcggctgcaaggcgtcggcgacgtgcagatcttcggcgagcggcgctattcgatgcgcatctggctcgatccggacaagcttgccaatctcggcatcaccgccgtcgacgtgcagaatgccatcgccgagcagaatgtccaggtggcggccggcaagatcggccagtcgccggcgcccgccggcaccgccttcgagatgcaggtcaacgccgtcggccgcctgagcgacccgaaggagttcggcgacatcgtggtgcgcgccaacaccgacacgggctcgctggtgcggctgcgcgacgttgcgcgtatcgagctcggcgcgctgcaatattcgtcgtcggccttcttcggcaaggacccgaccgtcgttctcgcggtctaccagatgcccggttccaacgcgctcgaccttcagcagcgcgtcaaggacaagatgcaggagttgtcggcgcggttccccaagggcgtatcctatgccatgcactacgacaccacgcgcttcgtctcggcatcgatgcatgatgtgctgatcacgctcggcgaagcgctggttctggtcgtcgccgtggtgttcatcttcctgcagagctggcgcacgaccatcatcccgaccatcgccattccggtgtcgctggtggcgacgctggtcgtcatggagatgctgggcttctcgctcaacatgctctccctgctcggcatggtgctggcgatcggccttgtcgtcgacgacgccatcgtggtggtcgagaatgtcgaacgacaattagaggccgggttgaagccactcgcggcgaccaaggccgccatggccgaagtcaccggtccgatcatcgccaccaccgcggtgctgatggccgtgttcgtgccggtcgccttcattccgggcgtctcggggcggctctacaaccagttcgcgctgacggtggcgatttcggtcggcatctcggccttcaattcgctgacgctgagccctgcgctcagtgccgctttcctgcgtcatcggcatgggccgcagttcttcctgttccgttggttcaacaccggcttcgacaagatatcccacgcctacgctcatggtgtgcgcttcctcattcgcctgcgctggatcatgctcggccttttcgcggccgggttggtcgccacctatttcgtctggcagaagctgccctcgaccttccttccggtcgaggaccagggctatttcttcgtcgtcatccagttgcccgacggcgcctcgctcgagcgcaccgacgcggtggcccagaaggcgcgcgatatcctgcaggcgacgccgggcgtcgacattgtcggctcgatcagcggcctgaacttcctgaccagtgcggcgcagtcgaactcggcggtcgagttcgccatcctgaagccctgggaagaacgtggccccgaccagagcgcgtcgaaactcgtcgccgacgtgcgcggcaagctgatgcagattccggaagctttcgcgctctccttcgatccgccttcgatcccgggtatcggcacgaccggcggcttcgaattcgtcgtcgaggacctcaccggccgcggcagcacggccctcaatgacgcgacgcaagccgtgatcgccgaggcgcgcaagcagccggaaatcaatccgcagcagctgttctcgccgttctcgacctcgacgccgcagttcaactacgacctcgaccgcagcaaggccaagcttctcggcctcaacctgcccgacgtcttcaacacactgcagatctatctcggctcgctctatgtgaacgacttcaacctgttcggccgcaccttccgggtgaccatccaggccgacaaggatgcacgtgcgggcgccgccgacatttccaggctctatgtgcgcaacgcgtcgggcggcatggtgccgctctcgacgctgggcaagctcgtgccgttcgtcgggccggaaaccgtgccgcactacaacaacaacgcctcggcctcgatcaatggcggcgccgcaccgggcttctcttcgggccaggcggtcgccgccatggaacgggcggcggccaccgcgctccccagggatttcggtttcgaatggaccggcatcaccttccaggagctcaaggcaggatcgatcgcgtccgtcgtcttcggcctcgccatcgtcttcgtcttcctgatcctggcggcgcagtatgagagctgggcgatgccgttcatggtgctgctggcggtgccgctcgctctgtttggcgcgttcgcggccctgtcggtgcgcggcatgcagatcgacgtctactcgcagatcggcttcgtcatgctgatcggcctggcagcgaagaacgcgatcctgatcgtcgagttcgccaggcggcggcgcgaggaaggcttgagcattgtcgaggcggccatggaagccgcgcgcctcaggctgcggccgatcctgatgacggccttcgccttcatcctcggcgtgctgccgctgatgttcgccaccggcgccggtgccgcaagccgccagtcgatcggcaccacggtgtttggcggcatggtcgccgcgaccattctgtcgctggtgttcgtgccggtcttctacgcggtcatcgaacagctgcgggagcgccgcggaagcggcgaacccgcctccaagcatactgaaccaactgccgaacccgccttccctcccctggcggaagcggccgaataa

SEQ ID NO: 2666 - protein, 1061 aa, Mesorhizobium loti MAFF303099
MCVVVNFFIHRPIFASAIAIIMVLAGTICYFLLPVSQFPDITPPQVVVSAHYPGASAQVVADTVTTPLEQQINGVQGMTYMSSTSSNDGSSTITITFDVGYSLSTAAVDVQNRVSQAASSLPAIVNQGGVTIKKQNPNFVLIVNLTSPDKSVDPVALSNLAYLQVVDPLKRLQGVGDVQIFGERRYSMRIWLDPDKLANLGITAVDVQNAIAEQNVQVAAGKIGQSPAPAGTAFEMQVNAVGRLSDPKEFGDIVVRANTDTGSLVRLRDVARIELGALQYSSSAFFGKDPTVVLAVYQMPGSNALDLQQRVKDKMQELSARFPKGVSYAMHYDTTRFVSASMHDVLITLGEALVLVVAVVFIFLQSWRTTIIPTIAIPVSLVATLVVMEMLGFSLNMLSLLGMVLAIGLVVDDAIVVVENVERQLEAGLKPLAATKAAMAEVTGPIIATTAVLMAVFVPVAFIPGVSGRLYNQFALTVAISVGISAFNSLTLSPALSAAFLRHRHGPQFFLFRWFNTGFDKISHAYAHGVRFLIRLRWIMLGLFAAGLVATYFVWQKLPSTFLPVEDQGYFFVVIQLPDGASLERTDAVAQKARDILQATPGVDIVGSISGLNFLTSAAQSNSAVEFAILKPWEERGPDQSASKLVADVRGKLMQIPEAFALSFDPPSIPGIGTTGGFEFVVEDLTGRGSTALNDATQAVIAEARKQPEINPQQLFSPFSTSTPQFNYDLDRSKAKLLGLNLPDVFNTLQIYLGSLYVNDFNLFGRTFRVTIQADKDARAGAADISRLYVRNASGGMVPLSTLGKLVPFVGPETVPHYNNNASASINGGAAPGFSSGQAVAAMERAAATALPRDFGFEWTGITFQELKAGSIASVVFGLAIVFVFLILAAQYESWAMPFMVLLAVPLALFGAFAALSVRGMQIDVYSQIGFVMLIGLAAKNAILIVEFARRRREEGLSIVEAAMEAARLRLRPILMTAFAFILGVLPLMFATGAGAASRQSIGTTVFGGMVAATILSLVFVPVFYAVIEQLRERRGSGEPASKHTEPTAEPAFPPLAEAAE

SEQ ID NO: 2667 - DNA, 3189 bp, Pseudomonas aeruginosa PAO1
  CDS (1)..(3189): transl_table=11
atgaatttctcccaattcttcatccagcggccgatcttcgccgcggtgctgtcgctgctgatcctgattggcggcgccatctccctgttccagctacccatcagcgaatacccggaagtggtgccgccgaccgtcgtggtccgcgccaacttccccggcgccaacccgaaagtcatcggcgagaccgtcgcctctccccttgaacaggcgatcaccggggtggagaacatgctctacatgtcctcccagtcgacctccgacggcaagctgaccctgaccatcaccttcgccctcggcaccgacctggacaacgcccaggtgcaggtgcagaaccgcgtcacccggaccgagccgaagctcccggaagaagtgacccggctcggcatcaccgtcgacaaggcctcgcccgacctgaccatggtcgtgcacctgacctcgccggataaccgctacgacatgctctacctgtcgaactacgcggtgctcaacgtgaaggacgaactggcccgcctcgacggcgtcggcgacgtccagttgttcggcctcggcgactattcgctgcgcgtctggctggacccgaacaaggtcgcctcgcgcaacctcaccgccaccgacgtggtcaacgccatccgcgagcagaaccgccaggtcgccgccggcaccctgggcgcgccgccggcgccgagcgataccagcttccagttgtcgatcaacacccagggtcgcctggtcaccgaggaagagttcgagaacatcatcatccgcgccggcgccaacggcgagatcacccgtctgcgcgacatcgcccgggtcgagctgggctccaaccagtacgccctgcgttcgctgctgaacaacaagccggcggtggcgatcccgatcttccagcgtcccggctcgaacgccatcgagatctccaacctggtgcgggagaagatggccgagctgaagcacagcttcccgcaaggcatggactactccatcgtctacgacccgaccatcttcgtccgcggctccatcgaggcggtggtgcacaccctgttcgaagccctggtgctggtggtgctggtggtgatcctgttcctgcagacctggcgcgcctcgatcatcccgctggccgcggtgccggtgtcgctgatcggcaccttcgcggtgatgcacatgctcggcttctcgctcaacgcgctgtcgctgttcggcctggtgctggccatcggcatcgtggtggacgacgccatcgtggtggtggagaacgtcgagcgcaacatcggcctcggcctcaagccggtggaagccaccaagcgtgccatgcgcgaggtgaccgggccgatcatcgccacggcgctggtgctctgcgcggtgttcatcccgaccgcgttcatctccggcctcaccgggcagttctaccgccagttcgccctgaccatcgcgatctccacggtgatctcggcgttcaactcgctgaccctgtcgccagcgctggcggcggtcctgctcaagggccaccacgagccgaaggaccgcttctcggtgttcctcgacaagctcctcggcagttggctgttccgtccgttcaaccgtttcttcgaccgcgccagccatggctacgtcggcacggtgaaccgggtcctgcgcggcagctcgatcgccctgctggtctacggcggactgatggtgctgacctacttcggcttctccagcacgccgaccggtttcgtcccgcagcaggacaagcagtacctggtggccttcgcccagttgcccgacgcggccagcctggaccgtaccgaggcggtgatcaagcagatgtccgagatcgccctggcgcagcccggcgtggcggactcggtggccttccccggcctgtcgatcaacggcttcaccaacagcccgaacagcggcatcgtgttcaccccgctgaagccgttcgacgagcgcaaggacccgagccagtcggccggggccatcgccgccgcgctgaacgccaagtacgccgacattcaggacgcctacatcgcgatcttcccgccgccgccggtacaggggctggggaccatcggcggcttccgcctgcagatcgaggaccgtggcaaccagggctacgaggagctgttcaagcagacccagaacatcatcaccaaggcccgtgcgctgcctgagctggaacccagctcggtgttctccagctaccaggtcaacgtgccgcagatcgacgccgacatcgaccgcgagaaggccaagacccacggcgtggcgatcagcgacatcttcgacaccctgcaggtctacctcggctcgctgtacgcgaacgacttcaaccgcttcggccgtacctatcaggtcaacgtccaggccgagcagcagttccgcctcgaacccgagcagatcggccagctgaaggtgcgcaacaacctcggcgagatggtcccgctggcgtccttcatcaaggtcagcgacacctccggtccggaccgtgtgatgcactacaacggcttcatcaccgccgaactcaacggcgccccggccgcgggctacagctccggccaggcgcaggcggcgatcgagaagctgctgaaggaggaactgcccaacggcatgacctacgagtggaccgagctgacctaccagcagatcctcgccggcaataccgcgctgttcgtcttcccgctctgcgtgctgctggccttcctcgtgctggccgcccagtacgagagctggagcctaccgctggcggtgatcctgatcgtgccgatgaccctgctgtcggcgatcaccggggtgatcctggccggcagcgacaacaacatctttacccagatcggcctgatcgttctggtggggctggcgtgcaagaacgcgatcctgatcgtcgagttcgccaaggacaagcaggaggaaggcatggaccgcgtcgccgcggtgctggaagcctgccgcctgcgcctgcggccgatcctgatgacgtccatcgccttcatcatgggtgtggtgccgctggtgatctccaccggcgccggcgccgagatgcgccatgcgatgggcgtggcggtgttctccgggatgatcggggtgaccttcttcggcctgctgctgacgccggtgttctacgtcctcatccgccgcttcgtggagaaccgcgaagcgcgccgcgccgccaacgacaaaggcctgccagaggtgcatgcatga

SEQ ID NO: 2668 - protein, 1062 aa, Pseudomonas aeruginosa PAO1
MNFSQFFIQRPIFAAVLSLLILIGGAISLFQLPISEYPEVVPPTVVVRANFPGANPKVIGETVASPLEQAITGVENMLYMSSQSTSDGKLTLTITFALGTDLDNAQVQVQNRVTRTEPKLPEEVTRLGITVDKASPDLTMVVHLTSPDNRYDMLYLSNYAVLNVKDELARLDGVGDVQLFGLGDYSLRVWLDPNKVASRNLTATDVVNAIREQNRQVAAGTLGAPPAPSDTSFQLSINTQGRLVTEEEFENIIIRAGANGEITRLRDIARVELGSNQYALRSLLNNKPAVAIPIFQRPGSNAIEISNLVREKMAELKHSFPQGMDYSIVYDPTIFVRGSIEAVVHTLFEALVLVVLVVILFLQTWRASIIPLAAVPVSLIGTFAVMHMLGFSLNALSLFGLVLAIGIVVDDAIVVVENVERNIGLGLKPVEATKRAMREVTGPIIATALVLCAVFIPTAFISGLTGQFYRQFALTIAISTVISAFNSLTLSPALAAVLLKGHHEPKDRFSVFLDKLLGSWLFRPFNRFFDRASHGYVGTVNRVLRGSSIALLVYGGLMVLTYFGFSSTPTGFVPQQDKQYLVAFAQLPDAASLDRTEAVIKQMSEIALAQPGVADSVAFPGLSINGFTNSPNSGIVFTPLKPFDERKDPSQSAGAIAAALNAKYADIQDAYIAIFPPPPVQGLGTIGGFRLQIEDRGNQGYEELFKQTQNIITKARALPELEPSSVFSSYQVNVPQIDADIDREKAKTHGVAISDIFDTLQVYLGSLYANDFNRFGRTYQVNVQAEQQFRLEPEQIGQLKVRNNLGEMVPLASFIKVSDTSGPDRVMHYNGFITAELNGAPAAGYSSGQAQAAIEKLLKEELPNGMTYEWTELTYQQILAGNTALFVFPLCVLLAFLVLAAQYESWSLPLAVILIVPMTLLSAITGVILAGSDNNIFTQIGLIVLVGLACKNAILIVEFAKDKQEEGMDRVAAVLEACRLRLRPILMTSIAFIMGVVPLVISTGAGAEMRHAMGVAVFSGMIGVTFFGLLLTPVFYVLIRRFVENREARRAANDKGLPEVHA

SEQ ID NO: 2669 - DNA, 3132 bp, Pseudomonas aeruginosa PAO1
  CDS (1)..(3132): transl_table=11
atgaacccgtcccgcccgttcatcctgcggccggtcgcgaccaccctgctgatggtggcgatcctgctctcgggcctgatcgcctaccgcttcctgccgatctcggcgttgccggaagtggactacccgaccatccaggtggtcaccctgtaccccggcgccagcccggagatcatgacctcgtcgatcaccgcgccgctggagaaccagctcgggcagattccggggctcaacgagatgtcttccagcagttccggcggcgcctcggtgatcaccctgcaattcagcctgcagagcaacctcgatgtcgccgagcaggaagtccaggcggcgatcaacgccgcgcagagcctgctgcccaacgacctgccgaaccagccggtgttcagcaaggtgaatccggcggacgcaccgatcctgaccctggcggtgatgtccgacggcatgccgctgccgcagatccaggacctggtggatacccgcctggcacagaagatctcgcagatctccggggtcggcctggtcagcatcagcggcggccagcgcccggcggtgcgggtgcgcgccaacccgacggcgctggcggcggcggggctgagcctggaggacctgcgcagcacggtgaccagcaacaacctcaacggccccaagggcagcttcgacggcccgacccgtgcctcgaccctggacgccaacgaccagttgcgctcggccgacgcctaccgcgacctgatcatcgcctacaagaacggctcgccgctgcgcatccgcgacgtcgccagcgtcgaggacgacgccgagaacgtgcgcctggccgcctgggccaacaacctgccggcggtggtgctgaacatccagcgccagccgggggccaacgtgatcgaggtggtcgaccggatcaaggcgctgctgccgcagctgcaatcgaccctgccgggcaatctcgacgtgcaggtgctgaccgaccgcaccaccaccatccgcgcctcggtcaaggacgtgcagttcgagctggcgctggcggtggcgctggtggtgatggtcaccttcctgttcctgcgcaacgtctacgccaccctgattcccagcttcgccgtgccgctgtcgctgatcggtaccttcggcgtgatgtacctgtccggcttctcgatcaacaacctgaccctgatggcgctgaccatcgccaccggcttcgtggtcgacgacgcgatcgtcatggtggagaacatcgcccgctacctggagcagggcgactcgccgctggaagcggcgctcaagggctcgaagcagatcggcttcaccatcatctcgctgactttctcgctgatcgccgtgctgatcccgctgctgttcatgggcgacgtcgccgggcggctgttccgcgagttcgccatcaccctggcggtggcgatcctgatttccggcttcgtctccctgacccttacgccgatgctcagcgccaagctgctgcgccacatcgacgaggaccagcagggccgcttcgcgcgcgccgcggggcgggtcatcgatggcctgatcgcacagtacgccaaggccctgcgggtggtcctgcggcaccagccgctgaccctgctggtggccatcgccaccctggcgctgaccgcgctactctacctggccatgcccaagggcttcttcccggtgcaggacaccggggtgatccagggcgtcgccgaagcgccgcagtcgatctccttccaggccatgtccgagcgccagcgcgcccttgccgaggtggtgctgaaggacccggcggtggccagcctgtcctcctacatcggcgtcgacggcagcaacccgaccctcaacaccggccgcctgctgatcaacctcaagccgcacagcgagcgcgacgtcaccgccagcgaagtgatccagcgcctgcagcccgaactcgaccacctgcccgggatcaagctgtacatgcagccggtgcaggacctgaccatcgaggaccgggtcgcccgcacccagtaccagttcaccttgcaggacgccgacccggacgtgctcgccgagtgggtgccgaagctggtggcgcggctgcaggagttgccgcagctcgccgacgtcgccagcgactggcaggacaagggcttgcaggcctacctgaacatcgaccgcgacaccgcctcgcgcctcggcgtgaagctctccgacatcgacagcgtgctctacaacgccttcggccagcggctgatctcgaccatcttcacccaggccacccagtaccgcgtggtgctggaggtggcgccgcagttccagctcggcccgcaggccctggagcagctctacgtgccgtccagcgacggcacccaggtgcgcctgtcgagcctggcgaaggtggaggagcggcataccctgctggcgatcaaccatatcgcccagttcccctcggcgaccctgtcgttcaacctggccaagggttactccctgggcgaggcggtcgaggcgatccgtggcgtcgaggccagcctggagctgccgctgagcatgcagggcagcttccgcggcgcggcgctggccttcgaggcctcgctgtcgaacacgctgctgctgatcctcgcctcggtggtgaccatgtacatcgtcctgggcatcctctacgagagcttcatccatccggtgaccatcctctcgaccctgccctcggccggggtcggcgcgctgctggcgctgatgctggcggggcaggagatcggcatcgtggcgatcatcggcatcatcctgctgatcggcatcgtcaagaagaacgcgatcatgatgatcgatttcgccctcgacgccgagcgcaacgaaggcaagccgccccatgaggcgatctaccaggcctgcctgctgcgcttccggccgatcctgatgaccaccatggccgcgctgctcggcgcgctgccgctgatgctcgccggcggcgccggcgccgagctgcgccagccgctgggcatcaccatggtcggtggcctgctgctgagccaggtcctgaccctgttcaccaccccggtgatctatctctacttcgaccgcctggcccgtcgctgggcggcctggcgcaagcagcgcgggctggacctgaacaccgaggccgggttcgacggggacgccgggcgatga

SEQ ID NO: 2670 - protein, 1043 aa, Pseudomonas aeruginosa PAO1
MNPSRPFILRPVATTLLMVAILLSGLIAYRFLPISALPEVDYPTIQVVTLYPGASPEIMTSSITAPLENQLGQIPGLNEMSSSSSGGASVITLQFSLQSNLDVAEQEVQAAINAAQSLLPNDLPNQPVFSKVNPADAPILTLAVMSDGMPLPQIQDLVDTRLAQKISQISGVGLVSISGGQRPAVRVRANPTALAAAGLSLEDLRSTVTSNNLNGPKGSFDGPTRASTLDANDQLRSADAYRDLIIAYKNGSPLRIRDVASVEDDAENVRLAAWANNLPAVVLNIQRQPGANVIEVVDRIKALLPQLQSTLPGNLDVQVLTDRTTTIRASVKDVQFELALAVALVVMVTFLFLRNVYATLIPSFAVPLSLIGTFGVMYLSGFSINNLTLMALTIATGFVVDDAIVMVENIARYLEQGDSPLEAALKGSKQIGFTIISLTFSLIAVLIPLLFMGDVAGRLFREFAITLAVAILISGFVSLTLTPMLSAKLLRHIDEDQQGRFARAAGRVIDGLIAQYAKALRVVLRHQPLTLLVAIATLALTALLYLAMPKGFFPVQDTGVIQGVAEAPQSISFQAMSERQRALAEVVLKDPAVASLSSYIGVDGSNPTLNTGRLLINLKPHSERDVTASEVIQRLQPELDHLPGIKLYMQPVQDLTIEDRVARTQYQFTLQDADPDVLAEWVPKLVARLQELPQLADVASDWQDKGLQAYLNIDRDTASRLGVKLSDIDSVLYNAFGQRLISTIFTQATQYRVVLEVAPQFQLGPQALEQLYVPSSDGTQVRLSSLAKVEERHTLLAINHIAQFPSATLSFNLAKGYSLGEAVEAIRGVEASLELPLSMQGSFRGAALAFEASLSNTLLLILASVVTMYIVLGILYESFIHPVTILSTLPSAGVGALLALMLAGQEIGIVAIIGIILLIGIVKKNAIMMIDFALDAERNEGKPPHEAIYQACLLRFRPILMTTMAALLGALPLMLAGGAGAELRQPLGITMVGGLLLSQVLTLFTTPVIYLYFDRLARRWAAWRKQRGLDLNTEAGFDGDAGR

SEQ ID NO: 2671 - DNA, 3234 bp, Xylella fastidiosa 9a5c
  CDS (1)..(3234): transl_table=11
ttgtcaaggacacaccacgtgggcttttcgacgatctttatccgccgcccaatcgccacttcactgctgatgttcggcgtactcctacttgggatcctgggctacaagaaattaccgatgtcggcactccctgaggtcgatgcacctagcctggtcgtcaccacccagtatccgggtgccaacgccaagacaatggccgcactggtgaccaccccattagaacatcagctcgggcagatttctggcttggacatcatgagttctgattcctctgccggcttatcaacgatcaccctgcaattctcaacacacaaaaatctcgacatcgccgcacaagacgtacaagcagcgatccatcaagccatactgccctcagcattacctcaccagccgatctacaaccgggtgaatccagctgatgcggccatcatcaccctcaaactcacctctgatactctgccactacgcgaactcaatacatacgcagacgctatcttggcgcaacgcctctcacaaatatcaggcgtcggcctggtctcgattgctggcaacgtccgaccagcggtgcggatccaagtgaatccggcgcagctatccaacatgggcctgaccatggagtcgctgcgcaatacgctaacccaggccaacgtcaacgcacctaaaggctcgctcaatggcaagagccagtcttacagcatcggtaccaacgatcagctgaaagatgcttcgcaatatcgggacaccatcatccattaccaaaatggacatccggtccgcctctcagaggtcgccgatgtggtggacggcgtcgaaaatgaccagatctccgcttgggccaacgcaaaaccagccgtgctactggagattcgccgccagcccggtgccaacattattcagaccgtcgaacaaatccgcgcgatcctgccgcagttgcgtgcggtgctgcccactgatgtacatcttgacgtcttttccgaccgcaccgaaaccatccgcgcttccgtgcatgaagtgaaattcaccctgctactgaccattggtctggtggtcgcggtgatatttgtattcctgcgccgactatgggccacactcattccatcggtagcggtccccctatcactggccggcaccttcagcgtgatggcatttaacgggatgtcactagacaacctctccctgatggcactggtcgtcgccaccggctttgtcgttgatgacgcgattgtgatgatcgaaaacatcgtccgctacattgaacaaggcaagagcggacgcgaagcggcggagattggagcacgtcaaattggtttcaccatactctcgctcaccatttcgctggtcgccgtgtttctccccctgctgttgatgcctggcgtcaccggtcgactgttccacgagttcgcctgggtcctgtcgaccgccgtcgtcatctcgatgctggtatcactgaccctgacaccgatgatgtgtgcctacctactcaaacccgatactctgcccgaaagtgatagcccaacaccaagcaccaagatcaccctgtggacacgcactgtcgcactatacgaacgcaccttagactgggtgctgatgcaccaacaactgaccttagttgtagcgctagtgacagtagcactcaccatcgtgctgtatgtaacgatccccaaggggctactgccagaacaagacactggactcatcattggcgttgtgcaagccgaccaggacatcgcattctcacagatggaacagcgtacccgggccgtggccgatgcactgcgcaaggaccccgccgtgacaggcgtctccgcatttatcggtgccggcaccatcaaccccacactcaatcatggccaactgtcgatcgttctcaagccacgcaaccaacgtgaggggctgaacaccatacgcccacgactgcaacgcgccgcagccggcatcccaggcatcgtcctctatctaaagccggtacaggatgtgactctggatacccacgtcgctgcaaccgaataccaatactcactctcgaacgtcgacgcaacggaactggctacctgggccacacgcatgaccgaggcgatgcgccagattccggcactgaccgacgtagacaacaacttggccgaccaaggccgtgccttacagatcactgttgatcgtgataaagccagcctccttggcgtaccgatgcagacgatcaacgacaccctatatgacgcattcggccagcgccaaatctccacgattttcaccgaactcaaccaatatcgggtcgtcctggaagtggccccacacttccgcaccagcaccgcactgacgcagcaactgggagtcgccagcaacggcagcggcgcactgactggcagcaatgccacgagcttcggccaagccgtctcatcaaattcctccacagccacaggtattggcaaccggaacaccggaatgaccgtcggtactggccgtatcatcccgctgtcagcccttgccgatgctaaggtcaccaacgcccctcgcgttatcagccatcagcagcaacttcccgccgtaacgatctcattcaacctggcccaggggtattccctctcccatgccgtgaaagccatcgaacaggcacgtacccaactacagatacctccccaggtacgcgtccagttcatcggtaaagccgtcgaattcaccagtagccagagtgacatcgtgtggttgctgctcgcttcgattgtggtgatctacatcgtgctgggggtgctatacgaaagttatatccatccgctgacgatcatctccaccctaccgtcggcaggcgttggcgcattgctggcactgatgctctgcggactgagcctatcggtggatagtattgtcggcatcgtactgctgattggtatcgtcaagaaaaacgcaatcatgatgattgacttcgccatcgaagcacgcagcaccgggagcagcgcccacgatgcgatccgccgcgcctgtctgttgcgcttccgtccgatcatcatgaccactgccgccgcactgctcggcgcattaccgctggcactgggcgacggcatcggcgcagagttgcgccgtccactgggcattactattgtcggtggcttgctgctatcgcagttgatcacactgtacaccacgcctgtcatctacctgttcttcgaacggttatccgagcgcctacgcctctggcgcgcacaccgcacctcggtccaagccacaccacagcgcgtatga

SEQ ID NO: 2672 - protein, 1077 aa, Xylella fastidiosa 9a5c
MSRTHHVGFSTIFIRRPIATSLLMFGVLLLGILGYKKLPMSALPEVDAPSLVVTTQYPGANAKTMAALVTTPLEHQLGQISGLDIMSSDSSAGLSTITLQFSTHKNLDIAAQDVQAAIHQAILPSALPHQPIYNRVNPADAAIITLKLTSDTLPLRELNTYADAILAQRLSQISGVGLVSIAGNVRPAVRIQVNPAQLSNMGLTMESLRNTLTQANVNAPKGSLNGKSQSYSIGTNDQLKDASQYRDTIIHYQNGHPVRLSEVADVVDGVENDQISAWANAKPAVLLEIRRQPGANIIQTVEQIRAILPQLRAVLPTDVHLDVFSDRTETIRASVHEVKFTLLLTIGLVVAVIFVFLRRLWATLIPSVAVPLSLAGTFSVMAFNGMSLDNLSLMALVVATGFVVDDAIVMIENIVRYIEQGKSGREAAEIGARQIGFTILSLTISLVAVFLPLLLMPGVTGRLFHEFAWVLSTAVVISMLVSLTLTPMMCAYLLKPDTLPESDSPTPSTKITLWTRTVALYERTLDWVLMHQQLTLVVALVTVALTIVLYVTIPKGLLPEQDTGLIIGVVQADQDIAFSQMEQRTRAVADALRKDPAVTGVSAFIGAGTINPTLNHGQLSIVLKPRNQREGLNTIRPRLQRAAAGIPGIVLYLKPVQDVTLDTHVAATEYQYSLSNVDATELATWATRMTEAMRQIPALTDVDNNLADQGRALQITVDRDKASLLGVPMQTINDTLYDAFGQRQISTIFTELNQYRVVLEVAPHFRTSTALTQQLGVASNGSGALTGSNATSFGQAVSSNSSTATGIGNRNTGMTVGTGRIIPLSALADAKVTNAPRVISHQQQLPAVTISFNLAQGYSLSHAVKAIEQARTQLQIPPQVRVQFIGKAVEFTSSQSDIVWLLLASIVVIYIVLGVLYESYIHPLTIISTLPSAGVGALLALMLCGLSLSVDSIVGIVLLIGIVKKNAIMMIDFAIEARSTGSSAHDAIRRACLLRFRPIIMTTAAALLGALPLALGDGIGAELRRPLGITIVGGLLLSQLITLYTTPVIYLFFERLSERLRLWRAHRTSVQATPQRV

SEQ ID NO: 2673 - DNA, 3135 bp, Sinorhizobium meliloti 1021
  CDS (1)..(3135): transl_table=11
atgaatatcggtatgggaggccatcaaccgggtggagggcagggcggaaagacgggtttcaccgcgcttttcatccgccggccgatcttcgccctggtcgtcaacacattgatcgtcgtggctggtcttgccgcctggaatggcgtcgagatccgcgaactgccgcaggtcgaccagccggtggtctcggtcacgaccgagttcgacggcgcctcgccggagacgatcgaccgtgaagtgacctcggtcatcgaaggtgccgtctcgcgcgtgcagggcatcaagggcatttcgtcgtcctcttcgttcgggcgcagccgggtcacgctcgaattctccgacacgaccgatatcggccaggcagccaacgacgttcgcgatgcgctcggccggatcaccggccaattgcctgatgatgccgacgagccgcgcatcgtgaaggcggattccgacagccagccgatcatgcgcctggcattgacctccgacacgatgagcatggacgacatgacgctgctcgtcgagaacgagatcagcgaccgactggcggcggtcgaaggcgttgccgacgtcaccgtctacggcgaccaggagaagattttccgtatcgacctcaaccaggcgaagctcgccggacgcggcgtcaccgtggccaatcttcgcgaggcgctttccgacgcctcctacgatgtgcctgcaggctcgctgacgagcgcaagtcaggacatttccgttcgggcgacggccgatcttcagacgcccgagcaattcgaaaacctcatgctcggcaacaatgtccggcttcgcgacgtggcgaccgtgaccctcggcccggatacgggcacctcggcgctgcgctccaacggccgcgagggtatcggcctcggcatcatccgtcaggcccagtcgaacacggtcgatatttccgaaggcgtgcgcagcgttgtggacgcgatctcctcggatatcctcccgacgggaaccgagctcaagatcaccagcgacgacgcggtgttcatcaacggcgccatccacgaggtggagatcgcactcttcgtcgccgttttcatcgtcaccctcgtcatctatctgttcctgctcgactggcgcgcgacgctcatcccgaccatcaccatgccgatcgcgctgatcggaacggtggccgcgatctatcttgcgggcttctcgatcaacatcctgacgcttctggcgatcgtgcttgcgaccgggctcgtcgtcgatgacgcgatcgtggtgctcgaaaatatcgtgcggcgccgggcggagggcctcggtccgcgcgccgccgccgtgcacggtacgctcgaggtcttcttcgccgtgctcgcaaccacggccacgctggcggccgtgttcgttcctctctccttcctgccggggcagaccgggggcctcttccgtgaattcggcttcgtgctcgccttctcgatcctcctgtcgtccttcgtctcgctgacgctctgtccgatgctcgcctcgcgcatgctgacgaaagagccgcatgagcatgacggggtgatgcagcgcttcggacggcgcgcttccgccttctaccgcgtgacgcttcgcgcctgcctcaatgcgccgctcatcgtcttcgcggtggccgctttctttaccgccgccggcgctctgggcttcctgacgctcaagtcggagctgacgccgaacgaggaccgttcgcaggtcatgctgcggatcaacgcgccgcagggcgtctcgctggaatacacgcaggcacagctacgccgcatcgaagagggcctgcagccgctgctcaaatccggcgagatcagcaatgtgttctcgatttccggccagggcggctcggccaatagcggcttcatggtcctgacgcttgccccgtgggaagagcgcgagcgtacgcagggccagatcgtcgccgacatcaacagggcgacctcgaagatcccgtcggttcgcgccttcaccatccaggcgaacagcctcggtatccggggtgccggcagcggccttcaggtcgcgcttgtcggcaacgattacacgaagctgggcgacgcggcggcgaagctcgtcagggcaatggaggataccggccgtttcgagaatgtgaggctcaactacgaggccaatcaggcgcaattgtcggtgacgatcgaccgcgagcgcgcctccgacctcggcgtggacataggtggcctctcctgggcgctgcaggcgatgctcgacggcagcagcgtcgtcgacatcttcgtggaaggagaagcctatccggtcaagctgctctcttccaccgagccgctcaacgacccgacggacctgcagaacatcttcgtcaaggccggcgacggccgcatcgtgccgatgtcgtcgatcgcaacggtcgaggagaaggcagtggcgccgcagctttcccgcgaatcgcaactgcgcgccgtttcgctctcggcggggctgaaatccgatctcgcactcggcgaggcgctgtcgatggtcgaagagatggccgaaccccttctgccgccgggatcgcgggtcatgccgcttgccgaggccgcgacactggacgagaacgccaacggcctgttcgttaccttcggcttcgcgctcgtcatcatcttcctggtgcttgcggcgcaattcgaaagcttcgtgagcggcctcatcatcatgtcgaccgtgccgctcggtctcgcctgcgccgtcttcgcaatgatcgtgaccggcaacacgctgaacatctacagtcagatcgggctcgtcatgcttgtcggcatcatggccaagaacggcatcctgatcgtagagttcgccaaccagctccgcgaccgggggcaggacgtccgcagtgccatcgagaatgccgccaatatccgtcttagaccggtgatgatgacgatgatcgcgaccgtcgtgggcgcggtaccgctggtgctggcaagcggtgccggcgccgaagcgcgcatcgcgctcggctgggtcctcgtcggcgggttgggcctggcggtggtcgtgacgctctacctgacgccggtcgcctatctggtcattgcccgctttaccaagccgcatgccgacgaggagcggaagctgcaggaggagatgaacgcggccgaggtgctcaagatctga

SEQ ID NO: 2674 - protein, 1044 aa, Sinorhizobium meliloti 1021
MNIGMGGHQPGGGQGGKTGFTALFIRRPIFALVVNTLIVVAGLAAWNGVEIRELPQVDQPVVSVTTEFDGASPETIDREVTSVIEGAVSRVQGIKGISSSSSFGRSRVTLEFSDTTDIGQAANDVRDALGRITGQLPDDADEPRIVKADSDSQPIMRLALTSDTMSMDDMTLLVENEISDRLAAVEGVADVTVYGDQEKIFRIDLNQAKLAGRGVTVANLREALSDASYDVPAGSLTSASQDISVRATADLQTPEQFENLMLGNNVRLRDVATVTLGPDTGTSALRSNGREGIGLGIIRQAQSNTVDISEGVRSVVDAISSDILPTGTELKITSDDAVFINGAIHEVEIALFVAVFIVTLVIYLFLLDWRATLIPTITMPIALIGTVAAIYLAGFSINILTLLAIVLATGLVVDDAIVVLENIVRRRAEGLGPRAAAVHGTLEVFFAVLATTATLAAVFVPLSFLPGQTGGLFREFGFVLAFSILLSSFVSLTLCPMLASRMLTKEPHEHDGVMQRFGRRASAFYRVTLRACLNAPLIVFAVAAFFTAAGALGFLTLKSELTPNEDRSQVMLRINAPQGVSLEYTQAQLRRIEEGLQPLLKSGEISNVFSISGQGGSANSGFMVLTLAPWEERERTQGQIVADINRATSKIPSVRAFTIQANSLGIRGAGSGLQVALVGNDYTKLGDAAAKLVRAMEDTGRFENVRLNYEANQAQLSVTIDRERASDLGVDIGGLSWALQAMLDGSSVVDIFVEGEAYPVKLLSSTEPLNDPTDLQNIFVKAGDGRIVPMSSIATVEEKAVAPQLSRESQLRAVSLSAGLKSDLALGEALSMVEEMAEPLLPPGSRVMPLAEAATLDENANGLFVTFGFALVIIFLVLAAQFESFVSGLIIMSTVPLGLACAVFAMIVTGNTLNIYSQIGLVMLVGIMAKNGILIVEFANQLRDRGQDVRSAIENAANIRLRPVMMTMIATVVGAVPLVLASGAGAEARIALGWVLVGGLGLAVVVTLYLTPVAYLVIARFTKPHADEERKLQEEMNAAEVLKI

SEQ ID NO: 2675 - DNA, 3144 bp, Caulobacter crescentus CB15
  CDS (1)..(3144): transl_table=11
atgctgtccgacctttccgtccgtcgccctgtattcgccgccgtcgcggcgatcatcctctgtgtcattggtctggcggcctacacctcgctgccgatccgtgagttgccgagcgtcgatccgccggtggtctcggtctcgaccagctatcgcggcgcctcggctgaagtcatcgaagagcgcatcacccaggtgatcgagcgccaggtcgccggcatccagggcatcgaccgggtcaacagctcttcgcgcgacggccgctcgaacatcagcatcacgttcaacctggaccgcgatctggacgcggcggccaatgacgtgcgcgacgccgtcagccgtgtaaccagcaacctgcccgatcaggccgacccgccgcagatcgccaaggccaacgccgacgctgcgccgatcatcatcctgaacctgacctcgacgacgctgaacccgctgcagttggccgactacgccgaccgctatctggtcgagcggatgtcgacggtcgacggcgtggcccaggccaacctgttcggcgccaagatctacgcgatgcggatctggctggacgccaacgagatggccgcgcgcggcgtcacggtggacgatgtcgagagcgcgctcaacgcccagaacctggagttgcccgccggctcgttggaaagcgcggccaaggacttcaccatccgcgtggcgcgcagctacgccacgcctgaagagtttgcgcgcctgccgctacgggccgccaacagctcgggctacgttctgcgtctgggcgacgtggcccggatcgaggaggggcccgatgaacgtcgtcgcctcttccgcggtaacggcatcgatcaggtcggcatcggcctgacccgccagtcgcaggccaatgacgtggccatctccaaggccgtccgcgccgaggttgaggcgatcaaccagaccctgccgcccggcaccaagatggtgatcgccgtcgacaactcggtgttcaccgctgaggccattcacgaggtctggatcaccatgggcctggcgatcggtctggtggtcatggtcaacctgctgttcctgggcagctggcgatcggccctgatcccttcgatcgtcgcgccgatctgcatcctgtcgaccttcatcatcctggcgccgctgggcttctcgctgaacctgctgaccctgctggcgctggtgctggcggtgggtctggtggtcgacgacgccattgtggtggtcgagaacatccagcgccgcgtcgacgatggcgagccgccgctggtcgccgccgagcgcggcacgcgtcaggtgttcttcgccgtcgtggccaccaccgtcgtgctggtgtcggtcttcgcgccgctgatgttcctgcccggttacatcggacgcctgttcgtcgagctggccgtggccatcgccgccgccgtcgccttctcggccctgctggcgctgtcgctgtcgccgatgatggcctcgaagctgctgcggcccgcccatggcgaaggctggctggcgcgacgcgtcaacaagaccatgggcgccttgagcgcgtcctatcgcgcctcgctggagcagatcctcggcggatggtcggcggccgcttccggcgtgctggtggtcttgctggcgggtttcgccgcggtgctgttcgtcagcctgcccaaggaactggtgccggccgaagaccggggccgggtggatgtctcgatctctgcggcggaaggcgcgggctatgactacacgtcggccatcgcgctgaagatcgaaaaggtgctcgacaagtaccgtgaggccggggtttccgagcgcaccatcatgaccatcccgcgctttggcggaaattcgttcaacagcgccaacggcgtcgttgcgctgaagccctggggcgagcgcgacaagaccgccgacgaggtcgcggccgagctgaacaaggagctttccaggttcaccagcgttcgcgccgtggccagcgtgcgtggtcccttccagcggggcggcggcgggggcggcggaggcggcaccaatgtcgacttcatcgcggtcggtaacgactatgtccagctggccaactggctgaagccgatcctggccgaggcgcaggacaatccgggcctggcgcgtccgcgtctggactatgagccgaccgcgccgcgcctgttggtgcagatcgatctcgacaaggccgcgacgctcggggtctcggcccagtcggtcggccgcgcgctggaaaccatgttcggctcgcgccgggcgacgacctacatcaagagcggccaggagtacgatgtcatcctgcagaccaacctggatcagcgtcggagcatcgaggatctgaaccgcctgaacgtgcgcaccaacacgggcgcgatcgtgccgctgtccaccgtggtgaccacggaactgcggggcgacacgccggatcgtccgcgtgtcgaccggctgcgctcggtgaccctgaccgcccagctgaaccccggctacacggtcgaggacgccgtcgcgttcttcaaggatcaggcggcccagcatcccgcgccgggcgtcagcgtcaagtggggcggccaggccaaggactatctggaaggctccggcggcatcgcgatcgccttcggcctcgcgctcctgctggtgttcctggtgctggccgctcagttcgagagctggatccacccggcggtcatcatgctgaccgtacccctagcggcgctgggcgggctgttcggcctgctgatgacgggctcgaccatcaacacctacagccagatcggcctgatcattctgatcggcatcgccaccaagaacggcatcctgatcgtcgagttcgccaaccagttgcgcgacgagggtttgagcgtgcgtgaggcggtgatcgaggcggcggccctgcgtctgcgtccgatcatcatgacctcggtctcggccgcgatgggcgccttgccgctgatgctgtgggcgggcgcaggcgcgggcagccgccagacgatcggggcggtgatcttcaccggcgcgatcttcgccaccctgctgacgctgttcatcgttccggtcttctacgacctcctggcgcgcttcacgaagtcgccggagtggacggcgcgccagatcgaagcgtatgaagcccaggaaaagtcgggtgaggggcaaacctcacccgcataa

SEQ ID NO: 2676 - protein, 1047 aa, Caulobacter crescentus CB15
MLSDLSVRRPVFAAVAAIILCVIGLAAYTSLPIRELPSVDPPVVSVSTSYRGASAEVIEERITQVIERQVAGIQGIDRVNSSSRDGRSNISITFNLDRDLDAAANDVRDAVSRVTSNLPDQADPPQIAKANADAAPIIILNLTSTTLNPLQLADYADRYLVERMSTVDGVAQANLFGAKIYAMRIWLDANEMAARGVTVDDVESALNAQNLELPAGSLESAAKDFTIRVARSYATPEEFARLPLRAANSSGYVLRLGDVARIEEGPDERRRLFRGNGIDQVGIGLTRQSQANDVAISKAVRAEVEAINQTLPPGTKMVIAVDNSVFTAEAIHEVWITMGLAIGLVVMVNLLFLGSWRSALIPSIVAPICILSTFIILAPLGFSLNLLTLLALVLAVGLVVDDAIVVVENIQRRVDDGEPPLVAAERGTRQVFFAVVATTVVLVSVFAPLMFLPGYIGRLFVELAVAIAAAVAFSALLALSLSPMMASKLLRPAHGEGWLARRVNKTMGALSASYRASLEQILGGWSAAASGVLVVLLAGFAAVLFVSLPKELVPAEDRGRVDVSISAAEGAGYDYTSAIALKIEKVLDKYREAGVSERTIMTIPRFGGNSFNSANGVVALKPWGERDKTADEVAAELNKELSRFTSVRAVASVRGPFQRGGGGGGGGGTNVDFIAVGNDYVQLANWLKPILAEAQDNPGLARPRLDYEPTAPRLLVQIDLDKAATLGVSAQSVGRALETMFGSRRATTYIKSGQEYDVILQTNLDQRRSIEDLNRLNVRTNTGAIVPLSTVVTTELRGDTPDRPRVDRLRSVTLTAQLNPGYTVEDAVAFFKDQAAQHPAPGVSVKWGGQAKDYLEGSGGIAIAFGLALLLVFLVLAAQFESWIHPAVIMLTVPLAALGGLFGLLMTGSTINTYSQIGLIILIGIATKNGILIVEFANQLRDEGLSVREAVIEAAALRLRPIIMTSVSAAMGALPLMLWAGAGAGSRQTIGAVIFTGAIFATLLTLFIVPVFYDLLARFTKSPEWTARQIEAYEAQEKSGEGQTSPA

SEQ ID NO: 2677 - DNA, 3168 bp, Salmonella typhimurium LT2
  CDS (1)..(3168): transl_table=11
atgaaattcacccactttttcattgcacgccccatcttcgccatcgtcctgtcgctgttaatgctgctggctggcgctatcgcctttttaaaactgccgctgagtgaatatccggccgttacgccgcccacggtacaggttagcgccagctaccccggcgctaacccgcaagtgattgccgatacggtagccgcgccgctggaacaggtgatcaacggcgttgacggcatgttgtatatgaatacccagatggccattgatggtcgcatggttatctctatcgccttcgaacagggaaccgatcctgatatggcgcaaattcaggtgcaaaaccgggtatcccgcgcgctgcctcgcctgcccgaagaagtccagcgaattggcgttgtaacggagaaaacgtcccccgatatgttgatggtggttcatcttgtctcgccgcaaaaacgctatgactcgctttacctgtctaacttcgccatccggcaggttcgcgacgaactggcccgtttacccggcgtcggcgatgttctcgtctggggcgcgggcgagtacgccatgcgcgtctggctggacccggcgaaaatcgccaaccgcggtcttaccgccagtgatatcgttacggcgttgcgggaacaaaacgtacaggtcgccgccggttccgtcgggcaacagccggaggcctccgccgcttttcagatgacggtaaacacgctgggccgcctgaccagcgaagaacagttcggcgagattgtggtaaaaatcggcgctgacggcgaggtgacgcgtctgcgtgatgtcgcccgcgtcacgctgggcgcagatgcctatacgctgcgcagtttactgaatggcgaagcggcgccagcgttacagattattcaaagtccgggcgccaatgcgattgacgtttctaacgcgattcgcggcaaaatggatgagttgcagcaaaacttcccgcaggatatcgaataccggattgcctatgatcctacggtcttcgtgcgcgcatcgctacaatcggtggcgattacgttgctggaagccctcgtgctggtcgtccttgtcgtggtgatgttcctgcaaacctggcgggcgtccattattcctctggtggcggttcccgtttcgctggtcggcacctttgccttgatgcacctgtttggcttttcgctgaatacgctttcgctgtttggtttggtcctgtcgataggtatcgttgtcgatgacgccatcgttgtggtcgaaaacgtggaacggcatatctcgcagggcaaaagtcccggagaggcggcaaagaaggcgatggatgaagtcactggtcccattctttctattacctcggtgctaacggcggtctttatcccttccgcattcctggcgggcctgcagggtgagttttatcgtcagttcgcgttgaccatcgctatttcgaccatcctttcggccattaactcgctgacgctctcccctgcgctggctgccattttgctaagaccgcaccacgatactgcgaaggctgactggctaacgcggttgatgggcacggtcactggcggttttttccatcgctttaaccgtttcttcgacagcgcgtcgaaccgctatgttagcgccgtccgtcgggccgtgcgcggcagcgtcattgtgatggtgctctatgctggctttgtggggctgacctggcttggcttccatcaggtgccgaacgggtttgtgcctgcgcaggataaatactatctcgtcggcatcgcccagctcccaagcggcgcatcgttggatcgcacagaggcggtcgtgaaacagatgtccgctatcgcgctggcggaacccggcgttgaaagcgtcgtcgtcttccccggtctgtcggttaacggcccggtaaatgtgccaaattcggcgctgatgttcgccatgctgaaaccctttgacgagcgtgaagatccttcgctttccgctaacgctatcgccggaaagctaatgcacaaatttagccacattcccgacggatttattggcatcttcccgccaccgccggttccagggcttggcgcgacgggcggctttaaattgcagattgaagatcgtgcggaactgggatttgaagcgatgacaaaggtgcaaagcgagattatgtctaaggcgatgcagacgcccgaactggccaatatgctggccagtttccagacaaacgccccgcaattacaggtggatatcgaccgggtaaaggcgaaatcaatgggggtatcgctcaccgacatctttgaaacgttgcaaattaacctcggctcgctttacgtcaacgatttcaaccgatttggccgtgcctggcgggtgatggcgcaggccgatgcgccattccgtatgcagcaagaggatatcggcctgcttaaagtccgcaatgcgaagggcgagatgatcccgcttagcgctttcgtcacgattatgcgccagtcggggccggacagaatcatccattacaacggcttcccctcggtagatattagcggtggaccggctccgggcttctcctccggacaggcgacggacgcgattgaaaagatcgtgcgtgaaacgttaccggaagggatggtcttcgaatggaccgatctggtttatcaggaaaaacaggccggcaactctgcgcttgctatctttgcgctggcggtgctgctggccttcctgatcctggcggcgcagtacaacagttggtcgctgcccttcgccgtcctgcttattgcgcctatgtcattactctcagccattgtcggcgtgtgggtatctggcggagataacaatatctttacgcagattggtttcgtggtgctggtcggcctggcggccaagaacgccattttgattgtcgagtttgcccgcgccaaagaacacgacggcgcagacccgctgaccgccgtactggaagcgtcccgcctgcgtctgcgtcctatcctgatgacctcattcgcctttatcgcaggtgtagtaccactggtactcgcgacgggtgccggcgcggaaatgcgacatgcgatgggcatcgccgtgtttgccggcatgttgggcgtcacgctcttcggcctgttattgacgcctgtattttacgtggtggttcgcaggatggcattaaagcgtgagaaccgcgttgattcgcatgatcagcaagcataa

SEQ ID NO: 2678 - protein, 1055 aa, Salmonella typhimurium LT2
MKFTHFFIARPIFAIVLSLLMLLAGAIAFLKLPLSEYPAVTPPTVQVSASYPGANPQVIADTVAAPLEQVINGVDGMLYMNTQMAIDGRMVISIAFEQGTDPDMAQIQVQNRVSRALPRLPEEVQRIGVVTEKTSPDMLMVVHLVSPQKRYDSLYLSNFAIRQVRDELARLPGVGDVLVWGAGEYAMRVWLDPAKIANRGLTASDIVTALREQNVQVAAGSVGQQPEASAAFQMTVNTLGRLTSEEQFGEIVVKIGADGEVTRLRDVARVTLGADAYTLRSLLNGEAAPALQIIQSPGANAIDVSNAIRGKMDELQQNFPQDIEYRIAYDPTVFVRASLQSVAITLLEALVLVVLVVVMFLQTWRASIIPLVAVPVSLVGTFALMHLFGFSLNTLSLFGLVLSIGIVVDDAIVVVENVERHISQGKSPGEAAKKAMDEVTGPILSITSVLTAVFIPSAFLAGLQGEFYRQFALTIAISTILSAINSLTLSPALAAILLRPHHDTAKADWLTRLMGTVTGGFFHRFNRFFDSASNRYVSAVRRAVRGSVIVMVLYAGFVGLTWLGFHQVPNGFVPAQDKYYLVGIAQLPSGASLDRTEAVVKQMSAIALAEPGVESVVVFPGLSVNGPVNVPNSALMFAMLKPFDEREDPSLSANAIAGKLMHKFSHIPDGFIGIFPPPPVPGLGATGGFKLQIEDRAELGFEAMTKVQSEIMSKAMQTPELANMLASFQTNAPQLQVDIDRVKAKSMGVSLTDIFETLQINLGSLYVNDFNRFGRAWRVMAQADAPFRMQQEDIGLLKVRNAKGEMIPLSAFVTIMRQSGPDRIIHYNGFPSVDISGGPAPGFSSGQATDAIEKIVRETLPEGMVFEWTDLVYQEKQAGNSALAIFALAVLLAFLILAAQYNSWSLPFAVLLIAPMSLLSAIVGVWVSGGDNNIFTQIGFVVLVGLAAKNAILIVEFARAKEHDGADPLTAVLEASRLRLRPILMTSFAFIAGVVPLVLATGAGAEMRHAMGIAVFAGMLGVTLFGLLLTPVFYVVVRRMALKRENRVDSHDQQA

SEQ ID NO: 2679 - DNA, 3126 bp, Ralstonia solanacearum GMI1000
  CDS (1)..(3126): transl_table=11
atgaatccctcccgaatcttcatcctgcggcccgtggcgacgaccctgctgatggtcgccatcctgctgtcgggcctggtggcgtaccggatgctgccgctgtccgcgctgccggaggtggactaccccaccatccaggtgacgacgctctacccgggcgccagccccgacgtgatgacctcgtcgatcaccgcgccgctggagcgccagttcggccagatgccgggcctcaagcagatgacctccgccagctcgggcggcgcgtccgtcatcacgctgcagttcgacctgtcgctgtcgctcgacatcgccgagcaggaggtgcaggcggccatcaacgcggccggcaacctgctgccgaccgacctgccgatgccgccgatctacagcaaggtcaacccggccgatgcgccgatcctgacgctggccatcacctccaggacgctgccgctgcccaagctggaagacatcgtcgacacgcgcgtcgcgcagaagctgtcgcagctgccgggcatcggcctggtgagcatcagcggcgggcagcggccggcggtgcgcatccaggccaacacgcaggcgctggcggcgctcgggctgtcgatcgacgacatccgcaccgccatcggcaacgccaacgtcaacggcgccaagggcagcttcgacgggccgatgcgcgcctccaccatcgacgccaacgaccagctgcgctcggccgccgaatacggcacgatgatcgtcgcctacaagaacggcgcgccgatccgcctgaccgacgtggcgcagatcatcgatggcgccgagaacagcaagctggccgcctgggccaacaccacgccggcgatcatcctcaacgtgcagcgccagccgggcgccaacgtgatcgacgtggtcaaccgcgccaaggccctgctgccgcagctcaaggacaccctgcccgccaacatcgacgtggcggtgctgaccgaccgcaccaccaccatccgcgcctccgtggccgacgtgcagttcgagctgctgctggcggtggcgctggtggtgatggtgatcttcctgttcctgcgcaacataccggccaccatcatcccggcggtggcggtgccgctgtcgctggtgggcaccttcggcgtgatgtacctggccggcttctcggtcaacaacctcacgctgatggcgctgaccatcgccaccggcttcgtggtggacgacgccatcgtcatgatcgagaacatcgcccgctacatcgaagacggcgacccgcccatggaagccgcgctcaagggcgccaggcagatcggcttcaccatcatctcgctgacgttctcgctgatcgccgtgctgatcccgctgctgttcatgagcgatgtggtggggcggctgttccgcgagttcgccatcacgctggcggtgtcgatcctgatttccgcggtggtctcgctcacgctcacgccgatgatgtgcgcgcgcctgctgcggcacattcccgagcccgagcagacccgcttctatcacgccgccggccagttcttcgacaacgtgatcgcgcaatacggccgcatgctgcaatgggtgctggaccgccagcgcaccacgctgctggtcgccatcggcacgctggcgctgacggggctgctgtacgtctacgtgcccaagggcttcttcccggtgcaggacacgggcgtgatccagggcatctcggatgcgacgcagtcgatctcgttcccggccatggccgagcggcagcagaagctggccgaggtgatcctcaaggacccggcggtggagagcctgtcgtcgttcatcggcgtggacggcaccaacaccacgctcaacagcggccgcatgctgatcaacctcaagcccaaggacgcgcgcgacgccgatgccaccgagatcatccagcgcctgcagccggagctggccaaggtgggcggcatctcgctgttcatgcagccggtgcaggacctgaccatcgaagaccgcgtcagccgcacgcagtaccagttcacggtggaagaccccgacccgaacaacctgtccaagtgggtgcccaggctggtggagcgcctgcagcagaccggtgagctgcgcgacgtcgccagcgacctgcaggacaacggcctgcgcgcctacgtgcagatcgaccgcgacaaggccgccgtctacggcgtcaccacggcggcggtggacagcgcgctgtacagcgcgtacggccagcgcctgatatcgaccatcttcacccagtcgaaccagtaccgcgtggtgctggaggccgctccgcagctgcagaaggggccgcagtcgctgtacgacctgcgcgtggcgtccaccggcggccagcaggtgccgctgggcgccttcgccacggtggtggagcagccgggctcgctggtggtcaaccaccagggccagttcccgtcggccaccatctcgttcaacctggcgcgcggagcgtcgctgggcgcggcggtcgacgcgatcaacgccgccgagcaggcgatcggcctgccggccagcatgcagaccagcttccagggcgcggcgctggcgttccagtcgtcgctgtccaacgagctgtggctgatcctggccgccatcatcaccatgtacatcgtgctgggcgtgctgtacgagagcacgatccacccggtgacgatcctgtcgacgctgccctcggcgggcgtgggcgcgctgctgtcgctgctggtctccggcaaggacatgggcatcatcgccatcatcggcatcatcctgctgatcggcatcgtcaagaagaacgcgatcatgatgatcgacttcgcgctggaggccgagcgcgagcagggcatggccccgcgcgatgccatctaccaggcgtgcctgctgcgcttccggccgatcctgatgacgaccatggcggccctgctgggcgccctgcccctgatgctgggcaccggcgtgggctccgagctgcgccagccgctgggcatcaccatggtgggcgggctgctggtcagccaggtgctgacgctgttcaccacgccggtcatctacctggccttcgacagcctgggccaccgcctgcgcgactggcgcgagcgccgcgccgcccgccgcaccggcgctgaccagtccggcagccagccatga

SEQ ID NO: 2680 - protein, 1041 aa, Ralstonia solanacearum GMI1000
MNPSRIFILRPVATTLLMVAILLSGLVAYRMLPLSALPEVDYPTIQVTTLYPGASPDVMTSSITAPLERQFGQMPGLKQMTSASSGGASVITLQFDLSLSLDIAEQEVQAAINAAGNLLPTDLPMPPIYSKVNPADAPILTLAITSRTLPLPKLEDIVDTRVAQKLSQLPGIGLVSISGGQRPAVRIQANTQALAALGLSIDDIRTAIGNANVNGAKGSFDGPMRASTIDANDQLRSAAEYGTMIVAYKNGAPIRLTDVAQIIDGAENSKLAAWANTTPAIILNVQRQPGANVIDVVNRAKALLPQLKDTLPANIDVAVLTDRTTTIRASVADVQFELLLAVALVVMVIFLFLRNIPATIIPAVAVPLSLVGTFGVMYLAGFSVNNLTLMALTIATGFVVDDAIVMIENIARYIEDGDPPMEAALKGARQIGFTIISLTFSLIAVLIPLLFMSDVVGRLFREFAITLAVSILISAVVSLTLTPMMCARLLRHIPEPEQTRFYHAAGQFFDNVIAQYGRMLQWVLDRQRTTLLVAIGTLALTGLLYVYVPKGFFPVQDTGVIQGISDATQSISFPAMAERQQKLAEVILKDPAVESLSSFIGVDGTNTTLNSGRMLINLKPKDARDADATEIIQRLQPELAKVGGISLFMQPVQDLTIEDRVSRTQYQFTVEDPDPNNLSKWVPRLVERLQQTGELRDVASDLQDNGLRAYVQIDRDKAAVYGVTTAAVDSALYSAYGQRLISTIFTQSNQYRVVLEAAPQLQKGPQSLYDLRVASTGGQQVPLGAFATVVEQPGSLVVNHQGQFPSATISFNLARGASLGAAVDAINAAEQAIGLPASMQTSFQGAALAFQSSLSNELWLILAAIITMYIVLGVLYESTIHPVTILSTLPSAGVGALLSLLVSGKDMGIIAIIGIILLIGIVKKNAIMMIDFALEAEREQGMAPRDAIYQACLLRFRPILMTTMAALLGALPLMLGTGVGSELRQPLGITMVGGLLVSQVLTLFTTPVIYLAFDSLGHRLRDWRERRAARRTGADQSGSQP

SEQ ID NO: 2681 - DNA, 3102 bp, Ralstonia solanacearum GMI1000
  CDS (1)..(3102): transl_table=11
atgaacctgtccgccaccttcatcgcccggccggtcgccaccgcgctgctgaccatcggcgtggcgctggccggcatcgcggcgttcaacctgctgccggtgtcgccgctgccgcaggtggacttccccaccatctcggtcaacgcatcgctgcccggcgccagccccgagaccatggccgccaccgtggcgacgccgctggagcgctcgctcggccgcatcgccggcatcaccgagatgacctcgcagagcgcgctgggctcgacgcgcgtgacgctgcagttcgacctgtcgcgcgacatcgacggcgcggcgcgcgacgtgcaggccgccatcaacgcctcgcgcagcctgctgccctcgggcctgccgagcaacccgacctaccgcaaggtcaacccggccgacgcgccgatcatgatcctggggctgacctccgacaccaagtcgcgcggcgagctgtacgacgcggcctcgaccatcctggcgcagaagctgtcgcagatcacgggcgtggggcaggtcaacatcggcggcgcatcgctgccggcggtgcgggtggagctgaacccgacggcactgaacaagtacggcatctcgaccgagaccgtgcgcaccgtcatcaccgccaccaacgccaacaagcccaagggcatgctggaagccggcaaccgcgtctggacgctctacgccaacgaccaggccaggcacgccgaggagtacaagccgctcatcatcgcctaccgcaacggcgcgcccgtgcgcctgtcggacgtggccgaggtgaccgacagcgtgcaggacatccgcaactacggctcggccaacggcaagccctcggtgctgctgatcatcaaccggcagccgggcgccaacatcatcgacacggtcgaccgcatcaacgccatcctgccctacctgcgcaacaccatccccgcccagatcaacctggacgtgatgatggaccgcacgcccaccatccgcgcctcgctgcgggacgtcgagcgcacgctgatgctgtcgatcgggctggtcatcatggtggtctacctgttcctgcgcaacctgcgcgccacgctcatccccagcgtggcggtgccggtgtcgctgatcggcaccttcggcgtgatgtacctgtgcggctacagcctcgacaacctctcgctgatggcgctgacggtggccaccggcttcgtggtcgacgacgccatcgtggtgctggagaacgtctcgcgccacatcgagaacggcatgcgaccgatgcaggccgcgctcaagggtgcgcgcgaggtcggcttcacagtggtgtcgatgagcttttcgctgatcgccgtgttcattccgctactgatgatgggcggcatcgtggggcggctgttccgggagttcgcggtcacgctgtcggtggcgatcctggtgtcgctggcgatctcgctgaccaccacgccgatgatgtgcgcacgcctgctcaagcccgccagcgaggaagagcccggctggttccaccgcaagaccgagggcttcttcaacctcctgctcgacggctatcgccattcgctggcgtgggcgctgcgccacagctggctgacgctgctgatcctgctggccacggtgtgcctgaacggctacctgtacgtcgtggtgcccaagggcttcttcccgcagcaggacgtgggccgcctgatgggcttcatccaggccgaccaggcgatctcgttccaggccatgcggaccaagctggtcgatttcatccacatcgtccagcaggacccggcggtggagaacgtggtcggcttcaccggcggcagccagatcaacagcgggcagatgttcatccagctcaagccgctggccgagcgcaagctgtcggccgaccaggtcatcaaccgcctgcgcggcaagctcgcgcgcgagcccggcgccaacctgttcctgcaggccgtgcaggacatccgcatcggcggccgccccagcaacgcgcagtaccagtacacgctgcaggccgacaacctcgaagagctgcgcgcctgggagccgaagatccggcaggcgctcacgcagatcaagtcgctggtggacgtcaacaccgacgcgcaggacaagggccagcagaccgcgctggtgttcgaccgcgacaaggcgatggcgctgggcatcacgcccaaggacatcgacaacgcgctcaacaacgccttcggccagcgccaggtgtcgaccatctacaacccgctcaaccagtaccgggtcgtgatggaggccgcgccgcagtactggcagaacccggaggggctgcgcgacatctacctgatcaccgcgtcgggcgcccaggtgccgctgtccaccttctcgcactacgggccgaccaacacgccgctggcggtcaaccaccagggccagttcgccgccagcacgctctcgttcaacctggcgcccggcgcctcgctgtcggccgccacgcagcagatccaggacgccatgaaccgcatcggcgtaccgaccacggtgcacggcagcttccagggcacggcgcgggcgttccaggattcgctctccagtcagccggtgctgatcctgtttgcgctgatcaccatctacatcgtgctgggcgtgctgtacgagagctacgtgcacccgatcacgatcctgtcgacgctgccgtcggcgggcgtgggcgcgctgctggcgctgatcgtcacggacaccgacttctcggtcatcgcgctgatcggcgtgatcctgctgatcggcatcgtcaagaagaacgcgatcatgatgatcgacttcgcactggaggccgagcgcagccagggcatgagcccggcggacgccatcttccacgcctgcgtgctgcgcttccgcccgatcctgatgacgaccatggccgcgctgctgggcgcgctgccgctcgcgctcggccacggcgacggcgcggagctgcgccagccgctggggatctccatcgtcggcgggctgctggtcagccagatcctgacgctctacaccacgccggtggtctacctggcgctcgaccggctgcgcctgcgccgcggcggccgcgtcaaggacgcaccgctgcccgcactggattcgcaaggaagctga

SEQ ID NO: 2682 - protein, 1033 aa, Ralstonia solanacearum GMI1000
MNLSATFIARPVATALLTIGVALAGIAAFNLLPVSPLPQVDFPTISVNASLPGASPETMAATVATPLERSLGRIAGITEMTSQSALGSTRVTLQFDLSRDIDGAARDVQAAINASRSLLPSGLPSNPTYRKVNPADAPIMILGLTSDTKSRGELYDAASTILAQKLSQITGVGQVNIGGASLPAVRVELNPTALNKYGISTETVRTVITATNANKPKGMLEAGNRVWTLYANDQARHAEEYKPLIIAYRNGAPVRLSDVAEVTDSVQDIRNYGSANGKPSVLLIINRQPGANIIDTVDRINAILPYLRNTIPAQINLDVMMDRTPTIRASLRDVERTLMLSIGLVIMVVYLFLRNLRATLIPSVAVPVSLIGTFGVMYLCGYSLDNLSLMALTVATGFVVDDAIVVLENVSRHIENGMRPMQAALKGAREVGFTVVSMSFSLIAVFIPLLMMGGIVGRLFREFAVTLSVAILVSLAISLTTTPMMCARLLKPASEEEPGWFHRKTEGFFNLLLDGYRHSLAWALRHSWLTLLILLATVCLNGYLYVVVPKGFFPQQDVGRLMGFIQADQAISFQAMRTKLVDFIHIVQQDPAVENVVGFTGGSQINSGQMFIQLKPLAERKLSADQVINRLRGKLAREPGANLFLQAVQDIRIGGRPSNAQYQYTLQADNLEELRAWEPKIRQALTQIKSLVDVNTDAQDKGQQTALVFDRDKAMALGITPKDIDNALNNAFGQRQVSTIYNPLNQYRVVMEAAPQYWQNPEGLRDIYLITASGAQVPLSTFSHYGPTNTPLAVNHQGQFAASTLSFNLAPGASLSAATQQIQDAMNRIGVPTTVHGSFQGTARAFQDSLSSQPVLILFALITIYIVLGVLYESYVHPITILSTLPSAGVGALLALIVTDTDFSVIALIGVILLIGIVKKNAIMMIDFALEAERSQGMSPADAIFHACVLRFRPILMTTMAALLGALPLALGHGDGAELRQPLGISIVGGLLVSQILTLYTTPVVYLALDRLRLRRGGRVKDAPLPALDSQGS

SEQ ID NO: 2683 - DNA, 3147 bp, Agrobacterium tumefaciens str. C58
  CDS (1)..(3147): transl_table=11
atgacgcaaccgtcttccggtcaggattccaaactcgcctttaccgcgctcttcgtgcgcaggcctattctggcggcggttctcaacacgctgctggtcgttgccggtcttgcagcgctggttggcgtcgaagtgcgcgaattgcccgatgtcgaccgtccgtcgatcagcgtcaggaccacctatgagggggcggcaccggaaacgattgaccaggaagtaacgcagaccatcgaaggcgccgtggcgcgtgtcagcggcatcaaatccatcgcttcgagctcgcaattcggaaccagccgcgtgacgatggagttcagcgacaatgtcgacatggccgttgccgccaatgacgtgcgcgacgccatcggccgcgtcaccaaccagctgcctgacgatgccgacgaaccccagatcatcaaggcggattccgacagccagccgatcatgcgccttgccgtcacatcctccacgctcagcatggaagatctgaccaagctggtggatgacgagatcatcgaccgcctggccgctgtcgatggtgtggcggatgtcgagctttacggcgatcaggaaaaggtttttcgcgtcgatctcaatcaggctgctcttgccagccgtggtctgaccgtcaccgatgtttccaatgcgcttgccagcgccgcactcgacgtgccggcgggatcgctgaaaagcacgacgcaggacattgtcgtgcgcgccacggccagtctgacgaagccggaggatttttccaaccttctcatcaaggacaatatccgcctgcgggatgtggcgaccgtcatgctcggcgctgacgatcaatccacctcgttgcgctccaatggggtgcagggtgtcggtctcggcgtcatccgtcaggcgcagtccaacacgctcaatatttcaacgggtgtgaaggccgccgtcgatgccatgtccgccaatctgcctgagggcacgcgtattgtcgtcaccagcgatgacgccgtcttcatcgaaggcgcgctgcatgaggtcgaactggcgctggggctctccgcgctcatcgtggtcgttgtgctctatctctttttccgcgactggcgggcgaccctcattccggcgatcaccatgccggtggcgctgatcggcaccatcgtcgccatctatatggtcggcttctcggtcaatatcctgacgctgcttgccatcgttctggcgacgggtctggttgtcgatgacgccatcgtggtgctggaaaacatcgtgcgccgccgggcggaaggcatgggaccgcgcgccgccgccgttctcggcacgcaggaagtgttcttcgccgtcatcgcaacgacggcgacgcttgccgccgtgttcattccgctgtcgttcctgccgggccagcttggcggcctgttccgtgaattcggcttcgtgctcgccttcgccgtcggcctgtcgtcaataacggcgctgacgctgtgcccgatgctggcctcgcgcatgctgaaacaggggctgaaggaaccgacggggccgctcatgtggttcggcaatgtctttgcctccacctacaagacgacgcttgccgcctgcctcaacaatccgctgatcgtcatcgttgttgcgctgatcttctcgggcctgtcctggatcgccttcggcatgatccagaacgagctgacgccgcgcgaggaccgcgcctcggtcatgatgcgggtcaccgcgccgcagggcgtcagccttgaatatacgcgtgaccagttgcaacggatcgaggaaaatctgcagccgctgcgcgatagtggcgaaatccgcaatgtctattccatcaccggcatgaacggttcttccaataccggcttcatggtgctgacgctcgccccttgggcggatcgcgaacgcacccagaaccagatcgcggctgacgtcacctccgctgccaacaaggttccggctttgcgcggtaatgccatgcagccgaacagtctgcgcattcgcggcgccggcaacggcctgcagatggcgatggtcggcagcaactatccggcgctgacagaggcgacgcagaaactgctgctttccatggaggaaggcggcctgttcgatacgccgcgtttggacaacgagccaaatcaggcccagctttccgtctccatcgaccgcgagcgcgcctccgatctcggtatcgacatcaccggcctctcgcgttcgatgcagtcgctgctggaaggtcgctcgatcgttgatgtcttcgtggatggcgatgctatcccggtcaggctcctgtcttctacccggccgatcaacgatccgaccgatctggaaaatgtcttcctgaaaacgggtgacggtaagatcgtgccgatgtcggtcatcgccacgctcaaggaaaatgcggttgcgccgcagttgaaccgcgagcagcagcttccttccgtcggtttcaccgccaacctcaaagacggtgtgtcgctcggtcaggccatggagaaggtgaacgaactggcgcaatccgtgatgccatcaggcgcgcgtctgctgccgctgggtgaagcggcgacgctggaagaaaattcgagcggcatgttgctgaccttcggtttcgccatcgccatcatcttccttgtgctggccgcgcagtttgaaagcgtgctgagttcggtcatcatcatgtcgacggtgccgctcggtctcgcctgcgccgtcatcgcgctgctggtcacgggctcgagcctcaacgtctatagccagatcgggcttgtgctgcttgtcggcgtcatggccaagaatggtattttgattgtcgagttcgccaatcatctgcgcgatcagggtgcgaccgtgcgtgaggcgatcgaaaaggccaccagcatccgcctgcgccctgtcatgatgacgatgatcgccaccattctcggcggcgtgccgctggtgctggcgcagggggcgggtgcggaagcgcgcatcgcactcggctgggtcatcgtcggcggtctcggttttgcgacgctggtgacgctttacatcaccccggtgtcttacctgctgatcgcccgcttcgccaaaccgcaggcagatgaagaaattcgccttcaccgcgaactcgaacttgccgcccgccgcaaagcgctggaggaagacaagccgttgctcgcagcggaatag

SEQ ID NO: 2684 - protein, 1048 aa, Agrobacterium tumefaciens str. C58
MTQPSSGQDSKLAFTALFVRRPILAAVLNTLLVVAGLAALVGVEVRELPDVDRPSISVRTTYEGAAPETIDQEVTQTIEGAVARVSGIKSIASSSQFGTSRVTMEFSDNVDMAVAANDVRDAIGRVTNQLPDDADEPQIIKADSDSQPIMRLAVTSSTLSMEDLTKLVDDEIIDRLAAVDGVADVELYGDQEKVFRVDLNQAALASRGLTVTDVSNALASAALDVPAGSLKSTTQDIVVRATASLTKPEDFSNLLIKDNIRLRDVATVMLGADDQSTSLRSNGVQGVGLGVIRQAQSNTLNISTGVKAAVDAMSANLPEGTRIVVTSDDAVFIEGALHEVELALGLSALIVVVVLYLFFRDWRATLIPAITMPVALIGTIVAIYMVGFSVNILTLLAIVLATGLVVDDAIVVLENIVRRRAEGMGPRAAAVLGTQEVFFAVIATTATLAAVFIPLSFLPGQLGGLFREFGFVLAFAVGLSSITALTLCPMLASRMLKQGLKEPTGPLMWFGNVFASTYKTTLAACLNNPLIVIVVALIFSGLSWIAFGMIQNELTPREDRASVMMRVTAPQGVSLEYTRDQLQRIEENLQPLRDSGEIRNVYSITGMNGSSNTGFMVLTLAPWADRERTQNQIAADVTSAANKVPALRGNAMQPNSLRIRGAGNGLQMAMVGSNYPALTEATQKLLLSMEEGGLFDTPRLDNEPNQAQLSVSIDRERASDLGIDITGLSRSMQSLLEGRSIVDVFVDGDAIPVRLLSSTRPINDPTDLENVFLKTGDGKIVPMSVIATLKENAVAPQLNREQQLPSVGFTANLKDGVSLGQAMEKVNELAQSVMPSGARLLPLGEAATLEENSSGMLLTFGFAIAIIFLVLAAQFESVLSSVIIMSTVPLGLACAVIALLVTGSSLNVYSQIGLVLLVGVMAKNGILIVEFANHLRDQGATVREAIEKATSIRLRPVMMTMIATILGGVPLVLAQGAGAEARIALGWVIVGGLGFATLVTLYITPVSYLLIARFAKPQADEEIRLHRELELAARRKALEEDKPLLAAE

SEQ ID NO: 2685 - DNA, 3078 bp, Brucella melitensis 16M
  CDS (1)..(3078): transl_table=11
atgaatatttccgaagtcttcattcgccgtccggttgcgacaatcctgctggtgataggcgggttgattggcgggattgcagcttataaccagcttccggtggcggcactgccggaagcggattttccgaccatcaatgtctccgcccagcttgcaggcgcttcgcccgatacgatggcctcctcggtcgcaacgccccttatcaagcaattcgagaccattgcaggcatcgatacgatcagtgccagatcatcccttggcaatacatcgattacgctgcaattcgacttgaagcgcaatatcgatgcggcggcggctgatgtgcaggcagccatcatgcgtgcgcagcggcggctgccggataatctgacgacgccgccgagttatcgcaagacaaatcccgccgatgcgccggttgtcattctggctttgacaggcgacggcgcccgcctgacccagatggatgacattgcgcagaatgtcatctcgccagccctgtccactatttcgggtgtggcgcaggcgctggtctatggctcaaagacctatgcggttcgcgttgaggtggaccctgacaaactggacagccgcaacctgtcgctatcgggccttggcgagaccattgctgcggcaaataaccagaccccggttggaacgctgcaaaacaggtcacaggcccttacagtcgatgcgcaaacccagcgcacgaatgccggggagttcaggaatctgatcgtcgcgggtagcggcaatcgcattgtccgcctgtccgatgtggcaacggtgctggacagtgtggataatgtcaatcaggatagctggctggatggaaagcagacgattgcactggcggttcagcgccagcccggttcaaatacggtggctgttgtggatgcgatccgcgccaagcttcctgaaatcgaggcagcattgcctgcgcatatgcatatcgccgtcgtcaacgatgcttccgtttccatccgtgcagcggtggcggatgttcaaaggatgcttgccatcaccgtgtgcctcgtggtgctggtgattttcctgtttctggggcagttctgggcaacgatgatcccgggattggcggttccgctttctctggtcgcaacatttgcggcgatgtatgcctgcgggttttccatcgacaatatatcgcttctggcgctgacattggccgtggggctggtggtcgatgatgctatcgtgatgctcgaaaatattgtccgtcatgtggaggaggggcttgcgccatttcaggccgctattgtcggcagccaggaagtgaccacaatcatttccatgtcgctgtcactggtcgccgttttcctgccgatcctgttgatgggcggtattgtcgggcgggttctgaacgaattcggcatggtggtaacgctcgcaatcctgtcctcggccgtcgtctcgctgacggtcacacccatgcttgctgctcgcctgccgcacaaacaggcaaaacccggacgcattgcgcaaatgttcaaccgggtaacggaaagctatgggcgcgctgtcgggtggtgtctgcgccaccggcttctggtgatgctgcttttcgtgctgagttttctggggtctgtatggtcgttcatgacattgccacgcagcttcttcccgcaggaagatacgggcctggtgatgatttcgacgcaagccaggcaagacatttcctatcagggaatgagtgaattgcagaaacaggcagcagccatcgtttccgctaatccagcggttgaacacgttacggcgacgctggggagcggccccggcggggcgacattcaatacaggttcgatgtttgtgcagttgaaaccgcggcaggcgcgcccaccgctcaaccagacactcagcgaactgcgaaagaaacttgccggtcttcccggcttgacggcatatttgaccccggtgcaaagcctgcgctttggcgggcgcagtacgcaaagccagtatcagatcgttttgcaatcgcttgatgccgatgaagcgcgcttctggtcgcaaaagcttgccgaagcgacgaaggctgagccggagactttcgtggatgttgcctccgatttgcagggcaatgcacttcaggcccatatcgctatcgacaacgacaaggcaggcagtctgggtattacatcgcaggcaattcgcaaaacgcttgaagccgcatatggaacactgacggtgtcgcagatacaggccactggcaacagttatgatgtaatcattgaacttgaccagagccagcagtgggatgagaccaggcttggcgcacttcgtgccccgactatgtcgggcgtgcttgttccgctggcaagtttcgcgacgattacccggacaaacgggccggtcacggtcaaccagacaggccagctcgcatccgtcacgctttcctataatctgcctgcgggtgtttcgctcggaacggcaacggatcgcctggaaagcctgcgcaatgaaatcgacatgcctgtttcggttgcaatgcgccccgccggtgcggcacagattttcgctcaatcaaccgggaatatggggcttttgatctttgcggcgattgcaacgatctatatcgttctgggtgtgctttatgaaagttttgcccatccgctgacaatcctgtccggcctgccatcggcggctttcggcgcgctggcaacgctacagcttttcggcttcgatttttcgattatcgccctcataggtctcctcatgctgatcggcatcgtgaagaaaaacgccatcatgatggtggatgtggccctgacattgaaacgggatgaaaaccgcaaaccggatgaagctatccatcttgcggcggttcggcggtttcgcccgatcatgatgacgacattttgcgcattgctggcagcggtccccgttgcgctcggtcatgggcaggggtctgaattgcgccagccgcttggtgtagcagtcgtgggcggcctgattttaagccaggcgctgacgctgtttatcacgcctgtgattttcgttgaaatcgaccggctggcaaatcatcgctggttttcacgcaggaaagtctcccgtgcggatttatag

SEQ ID NO: 2686 - protein, 1025 aa, Brucella melitensis 16M
MNISEVFIRRPVATILLVIGGLIGGIAAYNQLPVAALPEADFPTINVSAQLAGASPDTMASSVATPLIKQFETIAGIDTISARSSLGNTSITLQFDLKRNIDAAAADVQAAIMRAQRRLPDNLTTPPSYRKTNPADAPVVILALTGDGARLTQMDDIAQNVISPALSTISGVAQALVYGSKTYAVRVEVDPDKLDSRNLSLSGLGETIAAANNQTPVGTLQNRSQALTVDAQTQRTNAGEFRNLIVAGSGNRIVRLSDVATVLDSVDNVNQDSWLDGKQTIALAVQRQPGSNTVAVVDAIRAKLPEIEAALPAHMHIAVVNDASVSIRAAVADVQRMLAITVCLVVLVIFLFLGQFWATMIPGLAVPLSLVATFAAMYACGFSIDNISLLALTLAVGLVVDDAIVMLENIVRHVEEGLAPFQAAIVGSQEVTTIISMSLSLVAVFLPILLMGGIVGRVLNEFGMVVTLAILSSAVVSLTVTPMLAARLPHKQAKPGRIAQMFNRVTESYGRAVGWCLRHRLLVMLLFVLSFLGSVWSFMTLPRSFFPQEDTGLVMISTQARQDISYQGMSELQKQAAAIVSANPAVEHVTATLGSGPGGATFNTGSMFVQLKPRQARPPLNQTLSELRKKLAGLPGLTAYLTPVQSLRFGGRSTQSQYQIVLQSLDADEARFWSQKLAEATKAEPETFVDVASDLQGNALQAHIAIDNDKAGSLGITSQAIRKTLEAAYGTLTVSQIQATGNSYDVIIELDQSQQWDETRLGALRAPTMSGVLVPLASFATITRTNGPVTVNQTGQLASVTLSYNLPAGVSLGTATDRLESLRNEIDMPVSVAMRPAGAAQIFAQSTGNMGLLIFAAIATIYIVLGVLYESFAHPLTILSGLPSAAFGALATLQLFGFDFSIIALIGLLMLIGIVKKNAIMMVDVALTLKRDENRKPDEAIHLAAVRRFRPIMMTTFCALLAAVPVALGHGQGSELRQPLGVAVVGGLILSQALTLFITPVIFVEIDRLANHRWFSRRKVSRADL

(The sequence listing continues in the following parts.)

1. A method for producing a transgenic plant cell, a plant or a part thereof with increased tolerance and/or resistance to environmental stress and increased biomass production as compared to a corresponding non-transformed wild type plant cell, a plant or a part thereof comprising increasing or generating one or more activities selected from the group consisting of: 2,3-dihydroxy-2,3-dihydrophenylpropionatedehydrogenase, 3-deoxy-D-arabino-heptulosonate-7-phosphate (DAHP) synthase, 3-deoxy-D-arabino-heptulosonate-7-phosphatesynthase, 3-oxoacyl-(acyl carrier protein) synthase, acid shock protein precursor, aspartate ammonia-lyase, b0081-protein, b0482-protein, b0631-protein, b0753-protein, b0866-protein, b1052-protein, b 1161-protein, b1423-protein, b 1878-protein, b2226-protein, b2475-protein, cellobiose/arbutin/salicin-specific PTS enzyme (IIB component/IC component), Checkpoint protein, CP4-57 prophage/RNase LS, Dihydrouridine synthase, DNA-binding transcriptional dual regulator protein, D-xylose transporter subunit, gamma-Glu-putrescine synthase, gluconate transporter, glucose-1-phosphate thymidylyltransferase, Glutamine tRNA synthetase, glutathione-dependent oxidoreductase, glycine betaine transporter subunit protein, glycogen synthase, GTP cyclohydrolase I, heat shock protein, heat shock protein HtpX, heme lyase (CcmH subunit), hexuronate transporter, histidine/lysine/arginine/ornithine transporter subunit protein, HyaA/HyaB-processing protein, inner membrane protein, L-arabinose transporter subunit, Lsm (Like Sm) protein, L-threonine 3-dehydrogenase, methylglyoxal synthase, multidrug efflux system (subunit B), N,N′-diacetylchitobiose-specific enzyme IIA component of PTS, NADH dehydrogenase (subunit N), neutral amino-acid efflux system, nicotinamide-nucleotide adenylyltransferase, ornithine decarboxylase, pantothenate kinase, peptidyl-prolyl cis-trans isomerase A (rotamase A), phosphate transporter, phosphatidylglycerophosphate synthetase, polyphosphate kinase, potassium-transporting ATPase (subunit B), predicted antimicrobial peptide transporter subunit, predicted arginine/ornithine transporter, predicted hydrolase, predicted kinase, predicted ligase, predicted outer membrane lipoprotein, predicted oxidoreductase (flavin:NADH component), predicted porin, predicted PTS enzymes (IIB component/IIC component), predicted serine transporter protein, predicted transporter protein, Protein component of the small (40S) ribosomal subunit, regulator of length of O-antigen component of lipopolysaccharide chains, ribonuclease activity regulator protein RraA, sensory histidine kinase in two-component regulatory system with NarP (NarL), sodium/proton antiporter, Splicing factor, threonine and homoserine efflux system, transcriptional regulator protein, transcriptional repressor protein MetJ, transporter subunit/periplasmic-binding component of ABC superfamily, tRNA pseudouridine synthase, tRNA-specific adenosine deaminase, universal stress protein UP12, Ya1049c-protein, YCR059C-protein, YEL005C-protein, YER156C-protein, Yfr042w-protein, YGL045W-protein, and YOR024w-protein.

2. The method according to claim 1 wherein the activity of at least one polypeptide comprising a polypeptide selected from the group consisting of:
(i) a polypeptide comprising a polypeptide, a consensus sequence or at least one polypeptide motif as depicted in column 5 or 7 of Table II or of Table IV, respectively; or
(ii) an expression product of a nucleic acid molecule comprising a polynucleotide as depicted in column 5 or 7 of Table I, or
(iii) or a functional equivalent of (i) or (ii);
is increased or generated.

3. The method of claim 1, wherein the expression of at least one nucleic acid molecule comprising a nucleic acid molecule selected from the group consisting of:
a) a nucleic acid molecule encoding the polypeptide shown in column 5 or 7 of Table II;
b) a nucleic acid molecule shown in column 5 or 7 of Table 1;
c) a nucleic acid molecule, which, as a result of the degeneracy of the genetic code, can be derived from a polypeptide sequence depicted in column 5 or 7 of Table II and confers an increased tolerance and/or resistance to environmental stress and increased biomass production as compared to a corresponding non-transformed wild type plant cell, a plant or a part thereof;
d) a nucleic acid molecule having at least 30% identity with the nucleic acid molecule sequence of a polynucleotide comprising the nucleic acid molecule shown in column 5 or 7 of Table I and confers an increased tolerance and/or resistance to environmental stress and increased biomass production as compared to a corresponding non-transformed wild type plant cell, a plant or a part thereof;
e) a nucleic acid molecule encoding a polypeptide having at least 30% identity with the amino acid sequence of the polypeptide encoded by the nucleic acid molecule of (a) to (c) and having the activity represented by a nucleic acid molecule comprising a polynucleotide as depicted in column 5 of Table I and confers an increased tolerance and/or resistance to environmental stress and increased biomass production as compared to a corresponding non-transformed wild type plant cell, a plant or a part thereof;
f) a nucleic acid molecule which hybridizes with a nucleic acid molecule of (a) to (c) under stringent hybridization conditions and confers an increased tolerance and/or resistance to environmental stress and increased biomass production as compared to a corresponding non-transformed wild type plant cell, a plant or a part thereof;
g) a nucleic acid molecule encoding a polypeptide which can be isolated with the aid of monoclonal or polyclonal antibodies made against a polypeptide encoded by one of the nucleic acid molecules of (a) to (e) and having the activity represented by the nucleic acid molecule comprising a polynucleotide as depicted in column 5 of Table I;
h) a nucleic acid molecule encoding a polypeptide comprising the consensus sequence or one or more polypeptide motifs as shown in column 7 of Table IV and having the activity represented by a nucleic acid molecule comprising a polynucleotide as depicted in column 5 of Table II or IV;
h) a nucleic acid molecule encoding a polypeptide having the activity represented by a protein as depicted in column 5 of Table II and confers an increased tolerance and/or resistance to environmental stress and increased biomass production as compared to a corresponding non-transformed wild type plant cell, a plant or a part thereof;
i) a nucleic acid molecule which comprises a polynucleotide, which is obtained by amplifying a cDNA library or a genomic library using the primers in column 7 of Table III which do not start at their 5′-end with the nucleotides ATA and having the activity represented by a nucleic acid molecule comprising a polynucleotide as depicted in column 5 of Table II or IV;
and
j) a nucleic acid molecule which is obtainable by screening a suitable nucleic acid library under stringent hybridization conditions with a probe comprising a complementary sequence of a nucleic acid molecule of (a) or (b) or with a fragment thereof, having at least 15 nt of a nucleic acid molecule complementary to a nucleic acid molecule sequence characterized in (a) to (e) and encoding a polypeptide having the activity represented by a protein comprising a polypeptide as depicted in column 5 of Table II;
is increased or generated.

4. A trangenic plant cell, a plant or a part thereof with increased tolerance and/or resistance to environmental stress and increased biomass production as compared to a corresponding non-transformed wild type plant cell, a plant or a part thereof produced by the method according to claim 1.

5. The transgenic plant cell, a plant or a part thereof of claim 4 derived from a monocotyledonous plant.

6. The transgenic plant cell, a plant or a part thereof of claim 4 derived from a dicotyledonous plant.

7. The transgenic plant cell, a plant or a part thereof of claim 4, wherein the plant is selected from the group consisting of maize, wheat, rye, oat, triticale, rice, barley, soybean, peanut, cotton, oil seed rape, including canola and winter oil seed rape, corn, manihot, pepper, sunflower, flax, borage, safflower, linseed, primrose, rapeseed, turnip rape, tagetes, solanaceous plants, potato, tobacco, eggplant, tomato, Vicia species, pea, alfalfa, coffee, cacao, tea, Salix species, oil palm, coconut, perennial grass, forage crops and Arabidopsis thaliana.

8. The transgenic plant cell, a plant or a part thereof of claim 4, derived from a gymnosperm plant.

9. A seed produced by the transgenic plant of claim 4, wherein the seed is genetically homozygous for a transgene conferring increased tolerance and/or resistance to environmental stress and increased biomass production as compared to a corresponding non-transformed wild type plant cell, a plant or a part thereof resulting in an increased tolerance to environmental stress and increased biomass production as compared to a corresponding non-transformed wild type plant.

10. An isolated nucleic acid molecule comprising a nucleic acid molecule selected from the group consisting of:
a) a nucleic acid molecule encoding the polypeptide shown in column 5 or 7 of Table II B;
b) a nucleic acid molecule shown in column 5 or 7 of Table I B;
c) a nucleic acid molecule, which, as a result of the degeneracy of the genetic code, can be derived from a polypeptide sequence depicted in column 5 or 7 of Table II and confers an increased tolerance and/or resistance to environmental stress and increased biomass production as compared to a corresponding non-transformed wild type plant cell, a plant or a part thereof;
d) a nucleic acid molecule having at least 30% identity with the nucleic acid molecule sequence of a polynucleotide comprising the nucleic acid molecule shown in column 5 or 7 of Table I and confers an increased tolerance and/or resistance to environmental stress and increased biomass production as compared to a corresponding non-transformed wild type plant cell, a plant or a part thereof;
e) a nucleic acid molecule encoding a polypeptide having at least 30% identity with the amino acid sequence of the polypeptide encoded by the nucleic acid molecule of (a) to (c) and having the activity represented by a nucleic acid molecule comprising a polynucleotide as depicted in column 5 of Table I and confers an increased tolerance and/or resistance to environmental stress and increased biomass production as compared to a corresponding non-transformed wild type plant cell, a plant or a part thereof;
f) a nucleic acid molecule which hybridizes with a nucleic acid molecule of (a) to (c) under stringent hybridization conditions and confers an increased tolerance and/or resistance to environmental stress and increased biomass production as compared to a corresponding non-transformed wild type plant cell, a plant or a part thereof;
g) a nucleic acid molecule encoding a polypeptide which can be isolated with the aid of monoclonal or polyclonal antibodies made against a polypeptide encoded by one of the nucleic acid molecules of (a) to (e) and having the activity represented by the nucleic acid molecule comprising a polynucleotide as depicted in column 5 of Table I;
h) a nucleic acid molecule encoding a polypeptide comprising the consensus sequence or one or more polypeptide motifs as shown in column 7 of Table IV and having the activity represented by a nucleic acid molecule comprising a polynucleotide as depicted in column 5 of Table II or IV;
h) a nucleic acid molecule encoding a polypeptide having the activity represented by a protein as depicted in column 5 of Table II and confers an increased tolerance and/or resistance to environmental stress and increased biomass production as compared to a corresponding non-transformed wild type plant cell, a plant or a part thereof;
i) a nucleic acid molecule which comprises a polynucleotide, which is obtained by amplifying a cDNA library or a genomic library using the primers in column 7 of Table III which do not start at their 5′-end with the nucleotides ATA and having the activity represented by a nucleic acid molecule comprising a polynucleotide as depicted in column 5 of Table II or IV;
and
j) a nucleic acid molecule which is obtainable by screening a suitable nucleic acid library under stringent hybridization conditions with a probe comprising a complementary sequence of a nucleic acid molecule of (a) or (b) or with a fragment thereof, having at least 15 nt of a nucleic acid molecule complementary to a nucleic acid molecule sequence characterized in (a) to (e) and encoding a polypeptide having the activity represented by a protein comprising a polypeptide as depicted in column 5 of Table II;
whereby the nucleic acid molecule according to (a) to (j) is at least in one or more nucleotides different from the sequence depicted in column 5 or 7 of Table I A and which encodes a protein which differs at least in one or more amino acids from the protein sequences depicted in column 5 or 7 of Table II A.

11. A nucleic acid construct which confers the expression of said nucleic acid molecule of claim 10, comprising one or more regulatory elements, whereby expression of the nucleic acid in a host cell results in increased tolerance and/or resistance to environmental stress and increased biomass production as compared to a corresponding non-transformed wild type plant cell, a plant or a part thereof.

12. A vector comprising the nucleic acid molecule as claimed in claim 10 or a nucleic acid construct which confers the expression of the nucleic acid molecule comprising one or more regulatory elements, whereby expression of said nucleic acid in a host cell results in increased tolerance and/or resistance to environmental stress and increased biomass production as compared to a corresponding non-transformed wild type plant cell, a plant or a part thereof.

13. A host cell, which has been transformed stably or transiently with the nucleic acid molecule as claimed in claim 10, with a nucleic acid construct which confers the expression of the nucleic acid molecule comprising one or more regulatory elements, or with a vector comprising the nucleic acid molecule or the nucleic acid construct and which shows due to the transformation an increased tolerance and/or resistance to environmental stress and increased biomass production as compared to a corresponding non-transformed wild type plant cell, a plant or a part thereof.

14. A process for producing a polypeptide, comprising expressing the polypeptide in the host cell as claimed in claim 13.

15. A polypeptide encoded by the nucleic acid molecule as claimed in claim 10 whereby the polypeptide distinguishes over the sequence as shown in table II by one or more amino acids

16. An antibody, which binds specifically to the polypeptide as claimed in claim 15.

17. A plant tissue, propagation material, harvested material or a plant comprising the host cell as claimed in claim 13.

18. A process for the identification of a compound conferring an increased tolerance and/or resistance to environmental stress and increased biomass production as compared to a corresponding non-transformed wild type plant cell, a plant or a part thereof in a plant cell, a plant or a part thereof, a plant or a part thereof, comprising the steps:
a) culturing a plant cell; a plant or a part thereof maintaining a plant expressing the polypeptide encoded by the nucleic acid molecule of claim 10 conferring an increased tolerance and/or resistance to environmental stress and increased biomass production as compared to a corresponding non-transformed wild type plant cell, a plant or a part thereof; a non-transformed wild type plant or a part thereof and a readout system capable of interacting with the polypeptide under suitable conditions which permit the interaction of the polypeptide with said readout system in the presence of a compound or a sample comprising a plurality of compounds and capable of providing a detectable signal in response to the binding of a compound to said polypeptide under conditions which permit the expression of said readout system and of the polypeptide encoded by the nucleic acid molecule of claim 10 conferring an increased tolerance and/or resistance to environmental stress and increased biomass production as compared to a corresponding non-transformed wild type plant cell, a plant or a part thereof; a non-transformed wild type plant or a part thereof;
b) identifying if the compound is an effective agonist by detecting the presence or absence or increase of a signal produced by said readout system.

19. A method for the production of an agricultural composition comprising the steps of the method of claim 18 and formulating the compound identified in claim 18 in a form acceptable for an application in agriculture.

20. A composition comprising the nucleic acid molecule of claim 10, a polypeptide encoded by the nucleic acid, a nucleic acid construct which confers the expression of the nucleic acid molecule comprising one or more regulatory elements, a vector comprising the nucleic acid molecule or the nucleic acid construct, an antibody which binds specifically to the polypeptide, and optionally an agricultural acceptable carrier.

21. An isolated polypeptide as depicted in table II, which is selected from yeast, Escherichia coli, and/or Synechocystis sp. PCC 6803.

22. A method of producing a transgenic plant cell, a plant or a part thereof with increased tolerance and/or resistance to environmental stress and increased biomass production compared to a corresponding non transformed wild type plant cell, a plant or a part thereof, wherein the tolerance and/or resistance to environmental stress and increased biomass production is increased by expression of a polypeptide encoded by the nucleic acid according to claim 10 and results in increased tolerance and/or resistance to an environmental stress and increased biomass production as compared to a corresponding non-transformed wild type plant cell, a plant or a part thereof, comprising
a) transforming a plant cell, or a part of a plant with an expression vector comprising the nucleic acid molecule or a nucleic acid construct which confers the expression of the nucleic acid molecule comprising one or more regulatory elements and
b) generating from the plant cell or the part of a plant a transgenic plant with an increased tolerance to environmental stress and increased biomass production as compared to a corresponding non-transformed wild type plant.

23. A method of producing a transgenic plant with increased biomass production compared to a corresponding non transformed wild type plant under conditions of environmental stress comprising increasing or generating one or more activities selected from the group of Stress-Related Proteins (SRP) consisting of: 2,3-dihydroxy-2,3-dihydrophenylpropionatedehydrogenase, 3-deoxy-D-arabino-heptulosonate-7-phosphate (DAHP) synthase, 3-deoxy-D-arabino-heptulosonate-7-phosphatesynthase, 3-oxoacyl-(acyl carrier protein) synthase, acid shock protein precursor, aspartate ammonia-lyase, b0081-protein, b0482-protein, b0631-protein, b0753-protein, b0866-protein, b 1052-protein, b1161-protein, b1423-protein, b1878-protein, b2226-protein, b2475-protein, cellobiose/arbutin/salicin-specific PTS enzyme (IIB component/IC component), Checkpoint protein, CP4-57 prophage/RNase LS, Dihydrouridine synthase, DNA-binding transcriptional dual regulator protein, D-xylose transporter subunit, gamma-Glu-putrescine synthase, gluconate transporter, glucose-1-phosphate thymidylyltransferase, Glutamine tRNA synthetase, glutathione-dependent oxidoreductase, glycine betaine transporter subunit protein, glycogen synthase, GTP cyclohydrolase I, heat shock protein, heat shock protein HtpX, heme lyase (CcmH subunit), hexuronate transporter, histidine/lysine/arginine/ornithine transporter subunit protein, HyaA/HyaB-processing protein, inner membrane protein, L-arabinose transporter subunit, Lsm (Like Sm) protein, L-threonine 3-dehydrogenase, methylglyoxal synthase, multidrug efflux system (subunit B), N,N′-diacetylchitobiose-specific enzyme IIA component of PTS, NADH dehydrogenase (subunit N), neutral amino-acid efflux system, nicotinamide-nucleotide adenylyltransferase, ornithine decarboxylase, pantothenate kinase, peptidyl-prolyl cis-trans isomerase A (rotamase A), phosphate transporter, phosphatidylglycerophosphate synthetase, polyphosphate kinase, potassium-transporting ATPase (subunit B), predicted antimicrobial peptide transporter subunit, predicted arginine/ornithine transporter, predicted hydrolase, predicted kinase, predicted ligase, predicted outer membrane lipoprotein, predicted oxidoreductase (flavin:NADH component), predicted porin, predicted PTS enzymes (IIB component/IIC component), predicted serine transporter protein, predicted transporter protein, Protein component of the small (40S) ribosomal subunit, regulator of length of O-antigen component of lipopolysaccharide chains, ribonuclease activity regulator protein RraA, sensory histidine kinase in two-component regulatory system with NarP (NarL), sodium/proton antiporter, Splicing factor, threonine and homoserine efflux system, transcriptional regulator protein, transcriptional repressor protein MetJ, transporter subunit/periplasmic-binding component of ABC superfamily, tRNA pseudouridine synthase, tRNA-specific adenosine deaminase, universal stress protein UP12, Yal049c-protein, YCR059C-protein, YEL005C-protein, YER156C-protein, Yfr042w-protein, YGL045W-protein, and YOR024w-protein.

24. A method of producing a transgenic plant with increased biomass production compared to a corresponding non transformed wild type plant under conditions of environmental stress by increasing or generating one or more activities selected from the group of Stress-Related Proteins (SRP) consisting of: 2,3-dihydroxy-2,3-dihydrophenylpropionatedehydrogenase, 3-deoxy-D-arabino-heptulosonate-7-phosphate (DAHP) synthase 3-deoxy-D-arabino-heptulosonate-7-phosphatesynthase, 3-oxoacyl-(acyl carrier protein) synthase, acid shock protein precursor, aspartate ammonia-lyase, b0081-protein, b0482-protein, b0631-protein, b0753-protein, b0866-protein, b1052-protein, b1161-protein, b1423-protein, b1878-protein, b2226-protein, b2475-protein, cellobiose/arbutin/salicin-specific PTS enzyme (IIB component/IC component), Checkpoint protein, CP4-57 prophage/RNase LS, Dihydrouridine synthase, DNA-binding transcriptional dual regulator protein, D-xylose transporter subunit, gamma-Glu-putrescine synthase, gluconate transporter, glucose-1-phosphate thymidylyltransferase, Glutamine tRNA synthetase, glutathione-dependent oxidoreductase, glycine betaine transporter subunit protein, glycogen synthase, GTP cyclohydrolase I, heat shock protein, heat shock protein HtpX, heme lyase (CcmH subunit), hexuronate transporter, histidine/lysine/arginine/ornithine transporter subunit protein, HyaA/HyaB-processing protein, inner membrane protein, L-arabinose transporter subunit, Lsm (Like Sm) protein, L-threonine 3-dehydrogenase, methylglyoxal synthase, multidrug efflux system (subunit B), N,N′-diacetylchitobiose-specific enzyme IIA component of PTS, NADH dehydrogenase (subunit N), neutral amino-acid efflux system, nicotinamide-nucleotide adenylyltransferase, ornithine decarboxylase, pantothenate kinase, peptidyl-prolyl cis-trans isomerase A (rotamase A), phosphate transporter, phosphatidylglycerophosphate synthetase, polyphosphate kinase, potassium-transporting ATPase (subunit B), predicted antimicrobial peptide transporter subunit, predicted arginine/ornithine transporter, predicted hydrolase, predicted kinase, predicted ligase, predicted outer membrane lipoprotein, predicted oxidoreductase (flavin:NADH component), predicted porin, predicted PTS enzymes (IIB component/IIC component), predicted serine transporter protein, predicted transporter protein, Protein component of the small (40S) ribosomal subunit, regulator of length of O-antigen component of lipopolysaccharide chains, ribonuclease activity regulator protein RraA, sensory histidine kinase in two-component regulatory system with NarP (NarL), sodium/proton antiporter, Splicing factor, threonine and homoserine efflux system, transcriptional regulator protein, transcriptional repressor protein MetJ, transporter subunit/periplasmic-binding component of ABC superfamily, tRNA pseudouridine synthase, tRNA-specific adenosine deaminase, universal stress protein UP12, Yal049c-protein, YCR059C-protein, YEL005C-protein, YER156C-protein, Yfr042w-protein, YGL045W-protein, and YOR024w-protein comprising
a) transforming a plant cell or a part of a plant with the expression vector according to claim 12 and
b) generating from the plant cell or the part of a plant a transgenic plant with an increased tolerance to environmental stress and increased biomass production as compared to a corresponding non-transformed wild type plant.

25. (canceled)

26. A method for selection of plants or plant cells with an increased tolerance and/or resistance to environmental stress and increased biomass production as compared to a corresponding non-transformed wild type plant cell; a non-transformed wild type plant or a part thereof, comprising utilizing the nucleic acid according to claim 10 or parts thereof as a marker for selection of plants or plant cells with an increased tolerance and/or resistance to environmental stress and increased biomass production as compared to a corresponding non-transformed wild type plant cell; a non-transformed wild type plant or a part thereof.

27. A method for detection of stress in plants or plant cells comprising utilizing the nucleic acid according to claim 10 or parts thereof as a marker for detection of stress in plants or plant cells.

28. The transformed plant cell of claim 4, wherein the environmental stress is selected from the group comprised of salinity, drought, temperature, metal, chemical, pathogenic and oxidative stresses, or combinations thereof.

29. The transformed plant cell of claim 4, wherein the environmental stress is drought and/or desiccation.

30. A transgenic plant cell comprising a nucleic acid molecule encoding a polypeptide having a activity selected from the group of Stress-Related Proteins (SRP) consisting of: 2,3-dihydroxy-2,3-dihydrophenylpropionatedehydrogenase, 3-deoxy-D-arabino-heptulosonate-7-phosphate (DAHP) synthase, 3-deoxy-D-arabino-heptulosonate-7-phosphatesynthase, 3-oxoacyl-(acyl carrier protein) synthase, acid shock protein precursor, aspartate ammonia-lyase, b0081-protein, b0482-protein, b0631-protein, b0753-protein, b0866-protein, b1052-protein, b1161-protein, b1423-protein, b1878-protein, b2226-protein, b2475-protein, cellobiose/arbutin/salicin-specific PTS enzyme (IIB component/IC component), Checkpoint protein, CP4-57 prophage/RNase LS, Dihydrouridine synthase, DNA-binding transcriptional dual regulator protein, D-xylose transporter subunit, gamma-Glu-putrescine synthase, gluconate transporter, glucose-1-phosphate thymidylyltransferase, Glutamine tRNA synthetase, glutathione-dependent oxidoreductase, glycine betaine transporter subunit protein, glycogen synthase, GTP cyclohydrolase I, heat shock protein, heat shock protein HtpX, heme lyase (CcmH subunit), hexuronate transporter, histidine/lysine/arginine/ornithine transporter subunit protein, HyaA/HyaB-processing protein, inner membrane protein, L-arabinose transporter subunit, Lsm (Like Sm) protein, L-threonine 3-dehydrogenase, methylglyoxal synthase, multidrug efflux system (subunit B), N,N′-diacetylchitobiose-specific enzyme IIA component of PTS, NADH dehydrogenase (subunit N), neutral amino-acid efflux system, nicotinamide-nucleotide adenylyltransferase, ornithine decarboxylase, pantothenate kinase, peptidyl-prolyl cis-trans isomerase A (rotamase A), phosphate transporter, phosphatidylglycerophosphate synthetase, polyphosphate kinase, potassium-transporting ATPase (subunit B), predicted antimicrobial peptide transporter subunit, predicted arginine/ornithine transporter, predicted hydrolase, predicted kinase, predicted ligase, predicted outer membrane lipoprotein, predicted oxidoreductase (flavin:NADH component), predicted porin, predicted PTS enzymes (IIB component/IIC component), predicted serine transporter protein, predicted transporter protein, Protein component of the small (40S) ribosomal subunit, regulator of length of O-antigen component of lipopolysaccharide chains, ribonuclease activity regulator protein RraA, sensory histidine kinase in two-component regulatory system with NarP (NarL), sodium/proton antiporter, Splicing factor, threonine and homoserine efflux system, transcriptional regulator protein, transcriptional repressor protein MetJ, transporter subunit/periplasmic-binding component of ABC superfamily, tRNA pseudouridine synthase, tRNA-specific adenosine deaminase, universal stress protein UP12, Yal049c-protein, YCR059C- protein, YEL005C-protein, YER156C-protein, Yfr042w-protein, YGL045W-protein, and YOR024w-protein, wherein said polypeptide confers increased tolerance and/or resistance to environmental stress and increased biomass production as compared to a corresponding non-transformed wild type plant cell, a plant or part thereof.

31. The plant of claim 29 that has
i) an increased biomass production under conditions where water would be limiting for growth for a non-transformed wild type plant cell, plant or part thereof;
ii) an increased biomass production under conditions of drought and/or desiccation where said conditions would be limiting for growth for a non-transformed wild type plant cell, plant or part thereof;
and/or
iii) an increased biomass production under conditions of low humidity where said conditions would be limiting for growth for a non-transformed wild type plant cell, plant or part thereof.
